United States Patent Application Publication US 2019/0348154 A1 - sequence listing, part 27

SEQ ID NO: 100774 - DNA, 2763 bp, Enterobacter aerogenes
atgctcctgccagcccctactaaggaaggtttcgtgaaaaatgtcctctcagtaacgggagttcttattttattactaagcatcccggttttctcgaaggctaaaatgagggtgccagctggatttgaggaacttacacgcgggcagaccattatcgccgacgtttatctttacgggcagttcctgggggccatgcaggttcgcgctgacctggaaagcatcacgttcatggaccctgatgccctggtccgcgcggtcagaacggtatacggagacgccccaggactcagtcagctggtactgagccaggtgcagcacccaatggatcgcaacggcaaccttgcctgcagtactaacggaaatcgaacggggtgcgactatctgaaaacggatagtctcggactcatatatgatgaaaataatgcggttatccggcttttcatcagtgacaggtacccccccctggccgcgaccggcagccgctattacgacagcacgccggaggcagggaatgcgcttgtccatcagcagaatattaatttcgcaaccagtggccactatcaatccctgtcaatgcagggtaatggcgcactcggcgttggggagagcagtttccttggcgtagactggagctggctcgcacagcgttccggcaacgaaacggcgcagcagctcaatgcctcaaacgcctacttccggcaggacttcctgaagcgcatttatctgcaggcgggtgttatggatgagcgcgacatttacacaaatgccggcgggaacattacgcttgcacaactgcctatcggtcggatacgcggcctccgtattggttccactcttgcctggcttaaccgggaaacggtttctgcaggcacgcccgtcagcgtgctccttaaccatgatgcgcgcgtggatgcgtaccgtaataaccagcttctgtccaccttttatcttaaggccggtgtgcagatgctggatacccgctcattcccgtcaggcagttataccctgaccctgcgtatctatgagaataatcagctggtccggacagagacgcagctatacagccggcagggacagggctgggccagtgattttcagtggtttctccaggcgggtatgcccgatgactcgaacgtcacgaacggcacacgctcggagcatgaacgttatgccgttcatgctggcgggcggttacccctgaccaaaagcttgtcgatcaccgcgggagccgccgtctacagctcggcacaatacgctgagacggcggcggaatggtctcatggctttgaatccggtccgctggacgggctgctctccgcgcgattgagctggctgcagggcagcgagggttcgcgaggcagtacacagcaggtgacatatgctgatggtttttccctcagtttttaccgtaccgccctgacggcgggcaactgcaatctgcagaacgcgcatgcctacggggcagttggctgctacaggagtacaaacgctatgctgtccgtccccgtggccggctggaacgggacgctggggtactccgtgagcggcagccagggtcgctacgtataccgcagggatctgccaacagacaacgcagactatgccaacggtgccccctgggagcgcgtataccagtctcactcccgcagcgagacgtggcaggccggaataaaccgcgtttttgttctgaataacttcagtctcggtaccagtttcagcgcctttgccagccgttcagacaacgacccgggcctggataagggactctatttcagcttttctctgtcgggagtcggccgccaggataacagggcacgacacgcggcctccatagacgccagctggcagcagagccggcggggtgacagccagctgggatatggcgtgtcttacacgcgataccaggatgcatcgtctgataacgccgttggcgcctcgttcagcggcgtgaatacagacattatcaacggccagctgtatgcccgtgcggaagggcaatatggcagcggttctctcgtgctaagtgatgcgtggaataaaagcagcgggacgcataacacgggcagcagcggtacctacagttcatcacttgtgatgagcggtgaaggcgtgtcgctcggccggtggggaaccgggcaggctgcctccgcgctgtcggtcactgtggggaaagataacgatgaggaagacggtcccggtacagtaacggtatcgatggacggcggtgcgagcggggacgtggttagtggccgccgcagaacattcctggctccgggttaccagaaaacagcctacagtgtaaacgagtcgctggcgacgccggggggcatgacgagcgagataaggaaaggtatgggcaggagcagcttatttctccccccgggcaagctgctcacccggaacgtggcggtggaaactcgctacatctggctggggcgtctgcttgacgaacaacagcgtcccctggacggcggtatcccactcaacgtggccacctggtcgccggtgggcgacggcggctttacaatggaaacaaatcgcaaaattaacgcgctctacgtgatgcggggtgagggcttctggcggtgtcgcatcaaggtccgagcggtccgggacgtggtgcgttatctgggagctaccgcctgtagcaggacagacctggcggccttgcctgaagccgagcacaggcaggcccggctgctggcggccggagttcagggtgaagcaaagcccgtggcaatgtccgcatcaccttccccctaa

SEQ ID NO: 100775 - DNA, 501 bp, Enterobacter aerogenes
atgaaacgtattttaaacgcgaccgtcctttcaactcttctactgagcgcattcgccgcgcaagccgtgcagcgcgatatcaccgtcacggctacggtcgatccggcggtagacattaccctggccgacggctccgccctgccgagcgcggtgaccatggactataacgtaatcacgggcctgcagccgatcactaaaaatgtaaaactctggtcgaactccacctccaaaaacctgaccatcgcgctggccaactcgccaacgctcagctcctcaagctcaacaagcagtgtaccgctgacggtgaaattcaatggctcagcgcttaccactaccgcaacaacgctgacctatgccaactatttccctaacggtaccgctaatggttccctggccttccctctggtcattgccccgacaacggccggcgtactgaccgatgcaggctcttacaccggcacggtgagcctgattgtgcagcaagcgaccacttccagttaa

SEQ ID NO: 100776 - DNA, 324 bp, Enterobacter aerogenes
atgaataagcgctggctcccctggctgatactgtcgccttccctgttgtttttactgctgtttacctggtttccgcttggccgttcggtctatgacagcctgtttgatacccgcatggccagcgacggcgcacagtacgtcgggctggataacttcgcccgcctgtttgccgacggcgttttctggcaatcgctggtcaataatctgctctatatcctgctgacggtggtacccggcgtgacgctcgctctgctgctggcggtggcgctgagcgagaatcaccgcgtcaaccgctggctgcgcaccgccttttcttcccgatga

SEQ ID NO: 100777 - DNA, 1251 bp, Enterobacter aerogenes
atggccctaacggatactaaagttcgttctgcgaaacctgaggagaaagagtattcacttgttgacggtgacggcatgtttttacttgtaaaacctaacagttccaagtattggcgatttcgtttccgttttggcggtaaacagcatttgatggcgttcggtgtctatcctgaaatttcactggcggatgccaggaagaaaagggaagaagccagaaagctggtagctgctggtatcgatcctcgtgagcataaacgtgctgcgaaagaagagcaggcgaaagagattattactttcgagaaggttgccagagagtggcttgcgactaaccaaaaatggtcggaagatcatgctaatcgcgtaaaaaagagcctggaggacaatatcttcccggcaattggtgctcgcaatattgctgaactgggtacccgcgatctgttaattcccattaaagccgtcgagacatcaggccgtcttgaagtggcctcccgtcttcaacagcgcaccacggccatcatgcgttatgcggttcaaagcgggttgattgattacaacccggcgcaggagatggctggagccgtcgcatctggcaatcgacaacatcgcccggcgctggaattaaagcgcatccctgaattgcttcagaaaatagacggctataccggcaggccgttaacccgttgggcaacggaactcactttgcttatctttattcgatccagtgagctgcgttttgctcgctggtcagagatcgattttgaaacgtcaatgtggaccatcccgcctgagcgagaacctattcccggcgtgaaacattctcagcgaggatcaaagatgcgtacacctcatctggtgccgctttcaaggcaggcgctggcaatcctgaagcagataaaacagttttgcggagaacatgagttgattttcattggcgatcacgatccgcgcaagcccatgagtgagaacacggtaaacagtgcgctacgggtgatgggttatgacactaaagttgaggtttgcggccacggttttcgcacaatggcctgtagttcgttaattgagtcagggctatggtcgaaggatgcggtggaaagacagatgagccatatggagcgtaactcggtgcgagcggcgtatatccacaaagcggaacatctagatgaacgcaaactgatgttgcagtggtgggcggattttctggatgcgaaccgggagaagagtatcagcccgtttgattacgcgaaaatgtaa

SEQ ID NO: 100778 - DNA, 243 bp, Enterobacter aerogenes
atgcttccggagcctctgatacaggcctatcaaaagcagatatctattctatccagcatgcaagtattggaagaaaagcaaccgcaggacctcaggcaaaagggtacaggaacgatggagaaacctacacccttgactcaagaggaagttcagatgctgtatgtgcgccggatgctcccttccgagtacgagcgtctgcagggatttccagagaactggactctaatcgattcagagcagtag

SEQ ID NO: 100779 - DNA, 957 bp, Enterobacter aerogenes
atggcagtgagtatcgcggaatatttaggccaaagaacagatgtagaccaacaaattgtgcccgtcgaaagaggttcgcaagtacaatgccctttcatggaccgaacttgcgacaaagcaagtaaggtaagaaatcctacacctccagtgtgcagcgtccgcaaaccagatggaaccgtttggatagtttgcgaacatcggctatgctccactcgtcagaaaaagacggtcatagtaggtggtcgtacaagacaaattgaaaataatttagttgagcatcaaagagatatattaagaaaagtagcaaaactaatttatcaggaccctgaattacaggattcagatattggtgtaaaaagagaagtcaatatccctttaccagattccgataacagctaccatgccgactatgtaatgagaaatttttcgggtaggggaagagttgatgaagtcctgcttgaaatgcaaggtggtggagaaacaagcagcactggagaaattactcgacatattgccgcatgggccgatcttgagttccctactaatgaaatactaaggcaacctgtagcagcgaatactatcgaaaccaacgcatggagacgacagcaagaacaattcctggtgaagggaaatgttgttgatcaaaccggtgggaaaatcgtttttgctgttggtagcttactctatgactatttgcacagacgtttcaggaatgcaaatctaagggatcttaaagcgcataactggacgctatgtattctagctttcaaagaagacacgtcggaagaaccacaaccgggtccgattccgttgatcattgatgactcaaaaacattattcactaactattcaacgtttgtaagatttttaacagatcagggcgcaccacgccctgagctattcgaaggatcattcttacgtttagacaatagtactattacgatcatgcctcgttga

SEQ ID NO: 100780 - DNA, 1161 bp, Enterobacter aerogenes
atggcaaattggccggcgctatcagaatcatctgctgcaaagagatatatcaaagctagatacagccatatattcatagatgaatatcaagattcatctttatctcagcatgaactctttctaagaataaacgagcttggcttatgctccattgctgttggtgatgtttggcaatcaatctatgaatttagaggagggaattcgaagcttcttttagaattggtaagtaatacagaatgctttaagcattttgagataaatttcaatcatagatgccacccatcaataagcaattatgcttcaagattgcttgatccatcctatattttactacctgcagatgagataagaatattcaggagacgacttaatggaaatcttaaagatgctgctgttacgatttccacctggatttcaggatggctgagtagcggcgaatggaagttagaacaagcaaatcaaatagcaattttagcaagaaaagaaaaatctctaacattattctgttctggattaaacttaaacttcagactttatatcgacacacctctagataaaattggtactgattgctcagatctatacaaagatctgttagcatacaagtacggatctataagtacagcacaagaatttattaacaaggtttttgatggaatcataatagatgataatactcagttcttactaagaaaaaaaataaaaacaattagagaagaattaaaagatgaagatttaatccataagtttcatgacatcgcagatatcctagggataagctcgacagaacatactgacggggctgtgataagaacaatctctgacgatattttagtcaagcaattcaagccattagatgatagtgagatacaagtaatgactcttcataaatctaaaggattggaattcaaattagtattacatctagatctagatgaatggtctttcccatatagggaatataacagtgaagacagatatacacctctatacccgacgcttcaacaagaacttaatctccattacgttggtataaccagagctgagaattgctgcattcttattaactcctctcttagagagaatgcatctggggaatttaaaaaaactgatgaatcatatttttttaaactaccacatttaaacagtctatatatttaa

SEQ ID NO: 100781 - DNA, 696 bp, Enterobacter aerogenes
gtgcacggaagattcattgacgaggtcaaaaagaaatgggtgcttcaattgatattgattggcctgatgatcgtcctggcgactcgagttaccggggtgaataccatcatgtactacgcgccgacggtgctgaaggcgaccggccttggcgatgccgctgcggtaaccggcgcggtcgccaacggcgtggtctcgatactggcgacactgctgggcatgctgttaatcggtaaacattcccggcgcaaaatgttttttaccgggcagattggcgtcaccctcagtctggtatcgatcggcctctcgtttaagttcttttttcaccttgaaacgattgaaggcgttagcagcctgcacgcgaactttgccggcgccagctacatcatccttggcttaatgctgatgttcttgatttttatgcagggctggatagcgccggtcttctggctgatgctggccgaaatttatccgctacggatgcgcggcctggggatgggattatcggtcttcggcctgtggatcttcgacttcatcatccagtcgggattcccgattttacttaaccactacggcggcggcatgaccttcggcgtctttgctggcaccaacctgatcatgttgatgctgttggtgaaatatctgccggaaacccgcggattaacccttgagcaaattgagcaaaaattcagattctaa

SEQ ID NO: 100782 - DNA, 573 bp, Enterobacter aerogenes
atgagtattttcccgcccccgcgtgctgtagtagcaacatcctgtgttgaaccgcgtgcgcaagctatcgcgctaagcagcctattcgcggcaggcgcgctgttattgagcgtttccgccattattggcgctatcgctagtttagcgttgctgctggcgctgacgggggcttttgctgttggcaacacgattgcgcgctgccggtcgtggtcggcttgccatcgtctgctgttgtcgcgctatgcatttttgttgtcggcggttggttggttactgacgttgatcgcgtggaacggcttcttttactgggccgcgctactgccggggacggtggtcggcgcgcttgggcttggtatcgcctggcgcaacagcggaagagggagaggactaccggggatggcggcgaagagcgcgatagcggtaagcatcatcggcgttatagtagtggtcctgttaacggcccattatgacggggcgggagggagtggcttcgcctacgcacttgcggtgctggcggaccttgcgctgctgggggcgctagtggtgcgtatcagggagcaggatctcgagtaa

SEQ ID NO: 100783 - DNA, 1032 bp, Enterobacter aerogenes
atgaaaattgagacaaatagcatcacaccaagagtttctgatctttacaaacaaataagagatggttctctaattttaaaaccaccttttcaaaggaactttgtatggacaatgcgacatcaagaagagttcatcgacaccatactcaagggtttcccgttcccagaggtatatgtatgcgatggtgagatagatacaattagcttcaactcgactacccttgtaatagacgggcaacagcgtctaactacgattaaaagatatatagagggtgacggtgccgacgaattcaaaaaaatccccaaatatgctgacctttcaaacgaagaaaaagaatcattcctcggttataaagttgttgttcgtaacattggtaatgtagaagaacatattattagagaggtcttcagacgaataaacttaacgaagtttagccttgacgcaattgaaattcagaatgcaatttatgatggggaattcatacaaacagcaaaagatattttagattcagtagacattaaagattatggagtattaaagacttcagagttagataggatggctgaccttcattatattttattgataatggcaacaattgaaaatggtgggtacttctctcaagatggtgaacttgaaaacattattaataaattcaatgaggagtatccgaaaaaagagtatatgactcaagtattagtgaatgcattctcattaattgacaaatcaaacttaccgccagattcggtttggtttagaaaatcaaatttcttctctttattggttgaactgtctggatttataattcagcgaaacgaaaaaactaaaacaacagatcccgtcaaagttttacctgttgtagatactctttcggcattacttaatactttctcttcaaatctttataaatacaaagacactaaatccccatataaagaatattacccttgtatgtatcaaggtactaacaatcgtaaatcaagaataattcgctcagaaacaattcaaaaaatgatactttctaagctttaa

SEQ ID NO: 100784 - DNA, 615 bp, Enterobacter aerogenes
atgcttgtaagtgaaagatacatggcttttttagatgaaattcgcgcactgcctagtgacgttgaatcattaaaggacttctgtcgaagaaaaataatccacggcacgccattcgtatttaaggaaagagaggatgattattattacttcctaaagcaaattgcaaccaaattctctataccttttaacagcatacatatttccggctccggaaaacttggattttcatttattaagaagacggactttagtctgaactcagatattgatgttgcgataatatcgcattttctttttgataaagtaatggatatagtaggcgactttcaaatatcactcaggcaaagtaacgtttttttgactgctcgacagcaagaattttatttcgaattccttaagtattcagctatgggatggataagacctgatttattacccataaaatcttaccctaacgaatttaggagcgattggtttgatttttttaatagcatttcatataagaattgtatagctggaaattataaggttacagctggtgtgttcaaatcctatgaatgctttgaaaagtatacccttaccggtctagacaaacttacaatcaaactactttga

SEQ ID NO: 100785 - DNA, 987 bp, Enterobacter aerogenes
atgacattgttgccaggtattatccggggatgctggctgctaagtaagtgtaaaaggtcttctcttttgggtgaggactttaaaatcttccacacttatgacaagtttctatctgaaaacacatatatgtgtttttacgcttttttgtgttttagtgtcagccatcaacctcatgagaagagcgatgccatgttacagaacaacatcaaacagcttcgtacccaattgtcgatcactcagcgcgaactggcgtttatggtcggcaccagccagcagcaaatccagcgcatcgaaaccgggaaggttgcagcaaagttgggccttgctcaggcaatatgcaatgctctggataaacctctaaacgtcgtgttcccggaaagcgatcggttgatagacgacttccgtaagaagcgtcgtaaaaccgatgaagatcttgaggtaatagctacaagtggtattgaaatggatagcggtctctggaccgtaaaactttggctacaggggctgccggattatttattgttgcccatttctgctgctgataagcggaggttttattattattatcaggaaacagctagcccgaatgtagagcggttctttgtctttgactcggaccagtatcgttatgcgttaaatatgcgtgaagtggtatttcaccagttcttgtctgatagtctaccgccaatcgttgctaaagaagatgatgattacgaagacgattattttaatgtccatatcaccctggtgaacggtggccctgtgattccgctgagcgttgagcctgatgcgccgcaaaatgaagaggcgcatgatatcggtcagttgaatgcgttctttgacaaactggactgtgagcctgaaaccacagatcgttatatgttaaccgacgaagatggagaagatgcttttatccgtattggttctattgccatggtacgagtcgtacttgacgcgctggagcctgtggaagaagatgaagagtag

SEQ ID NO: 100786 - DNA, 846 bp, Enterobacter aerogenes
atgtccgaacaatacacccacactgaatccgatgttctgacaggccataccgagcttatcagctccaccagcattgaacgtatcgttgtcgggcgcaatgccgcactggaacaaatcaaagcgatgatccatcagctcgctgatatctctgcgctaaccgagagtattgggggtaaaacagccattgactgggcaatgcgtcaggaatttcgccgtggttgctggttacttgagaaagaacaaaccgccatgaacgtgatcacctgcaatctcgaccgtagcatatggcgcgatttgatgaagaaatccggcatgattgcgctgatggatgccgccgctcgcgacgaatggaatcgtaatcttgagcaggatgatatccccgccatcagcgaagagaacattatcagtacctttaagcaactgcaccacagcaaagacgatatgtttgagcgtgggatcatcaacgtatttaagagcctgagctgggattacaagtcgaactcaccgtgccggtttggcaaaaagattatcgtcgatggactggtgaattatggccgttggggatttagattacttcacgggaaacgacgggctcagttggcggatctggatcgcatgctgaatctgctcgatggtaaacctgttcccgaaaaccgtcatgatcttagcatcagattagatgatcacataagcaagcaacacagtaacgtatacgaagatgagtacgtgtcgatacgctacttccagaagggctcagggcacattactttcaaacgccctgatttggttgagaagatgaatgacattgttgccaggtattatccggggatgctggctgctaagtaa

SEQ ID NO: 100787 - DNA, 204 bp, Enterobacter aerogenes
atgttgacactcactaccgaagcggcgctggatattctgatcgactggctgcaggacaatatcgactgtgaatccacgctaattttcgataacgacgaagacagaaccgattccgccacgctattaccctgcatccagcaggcaaggaacgatgtccgggatctctgccatcttcagctcctgcacaacgtcaataaaccgtag

SEQ ID NO: 100788 - DNA, 492 bp, Enterobacter aerogenes
atgaaactctccctcacagtggaagctgatactgtcaacgtcctggccctcaacatgggccggatttccgtggatatcgatggtattgaactgaccgatctgatcgatgtggtctgtgataatggctattcgcttcgcattgcagacgagcccggaaaactgctgattgaagatccgcttcctgccagcgcccgctaccatggcattcagtgcagcacggcgcatatcacctgcgatgacaacgatctgctgtatcggctctcgcaacaacggaaagctcacgaggatgcggagtggatttgctataccggatcaggctatctcatccgtctggatgcgtgggcttttccggttctgcaactgaaacgatgcggactgtcaaaagccggtcgccggttgattatcactctgatgcgtcgctacccattgagcatcattcacctcgatgcctttggtgaactgctaccaggctttgagatcttcgactggtaa

SEQ ID NO: 100789 - DNA, 378 bp, Enterobacter aerogenes
atgcaaacacaatctatacaccctgtacgggcgacggcgtcacgcccatctcctgtcgatatctggcaaaccctgttgacgtacctcctggagcaacattacgggctcacacttaacgacaccccgtttggcaacgacagggtgatccaggagcatattgaggctggtatctcactgtgcgatggcgtcaattttatcgtcgaaaagtacgaactggtccgtatcgatcgtcacggtttcagcacagaaacacagtcaccgcttattggcagcatcgatatccttcgtgcacgaaaagcgaccgggctgatgacccgcaacgattacaaagtggtcaccgacatcaccaccggcaaatacagcggggggacacgatga

SEQ ID NO: 100790 - DNA, 375 bp, Enterobacter aerogenes
atgtccgatactgaaagtaccgatgccggggcgatacctcagcacacaatcgcttccccttggtgggggctgaagtgcgacaccacaccctgttttggtacccgcctggtccaggagggcaatcagctacacttcctgtctgaccggagcaatttcaccggaacatttcacgaaagcgaagcattgcagcttaatcaggcttttcccctgatgctaaaacagcttgagttgatgttggtatccggtgagctcaacccacgtcaccagcactgcgtcacgttgtatcacaatggtctcatctgcgaagcggacacactgggcagttgtggttatatctacctcgcgatttatccgggggaaccgccagcagcgtaa

SEQ ID NO: 100791 - DNA, 480 bp, Enterobacter aerogenes
atggaaacacagttaccgctgtttgccgccaaattaccggcatccgcacagcacaccatccgtgaggctctaaccctgctggagcgtcagttacgtgaacccggtgcgtcatttacctccagccacgccgtccgggactggttacgcctgcagcttgccacgcaggagcgtgaagaatttattgcgctcttcctggataaccagcaccggctgattgcgcatgaaaccctcttcaccggcactatcaaccatacgcaggtccatccacgggaagtagtgaaggctgcactgaaacataacgctgctgccatgctcgttgcacacagccacccttcagggcacgcagagcccagcgaggcagacagacggatcacagaacgtcttaagcaggcgctggatttggtggacatccgtcttctggatcacctggttgttggcgggatggagatcgtctcgctagctgaacgcggctggctgtaa

SEQ ID NO: 100792 - DNA, 819 bp, Enterobacter aerogenes
atgcgattagccagccgctttggccgaaccaaccagatacgccgtgatcgtccactaacccacgacgaattacaccagcatgttcccagcgtttttggcgaagacaagcacgaatcccgctcggagcgctactgctatatcccaactatcactctgctggagaaccttcatcgcgaaggatttgagcctttctttgcctgtcagactaaagtgcgtgatcagagcaagcgtgagcatacgaagcacatgctccgtctgcgccgtgccgggcagataaacggtcagcaggtgccggaaatcatcattcttaattcgcacgatggcgcatccagctttcagttattaccagggatcttcagaagtgtttgtacaaactcgctcgtctgcggtcagtcgtttggtgagatccgcgtaccgcatcgcggtgatgtcgttgaaaaagtgattgaaggcgcttacgaagtcctcggcgtgtttgaccgggtggaggagaaatgcgaggccatgcagtcactgctggtgccgccacccgctcagcaggcgtttgcgaaagcagcgctggcctaccgttttggcgaagagcatcagcccatcaccgaatcccaggtactgacgccacgtcgctggcaggacgaaaaaagtgatttgtggacgactttcaatacgcttcaggaaaatttgagtaagggaggcttaaatggtcgctccgcacagggtaaacgcagccgtacacgcgcggttaacggtatcgacggcgatatcaagctgaaccgagcgctgtgggtgatggccgaagaattacaacaggcactgagctga

SEQ ID NO: 100793 - DNA, 252 bp, Enterobacter aerogenes
atgagaaatcatcaggttccctcgttgccacaagggacgttcacccgcgctcaggctgaagctatagccgccgcatacatcaatatttctatagaagatgaccagggcatccattttcgtctggttatccgcgataccgacgacatgcttatctggcgcgactggaactttgccccggatgccggggtgatgctcaatcgctatatcgtcagtgatggtatccctgttccttcactctctgacgacaactaa

SEQ ID NO: 100794 - DNA, 945 bp, Enterobacter aerogenes
atgcagcctaaaattgatgtcagcgccattatcccggtcttcaatgcgcagaccaccatcgaccatctggtgaataggctcctcagcgagcaaacactcagcattgaggtgattgttgtggatgatggctctaccgacgaaacgtcgaccatactcagcgccatcaccgatgagcggctgattcttgttcatcaggaaaatcagggtgtatatgctgcaagaaatgccgcactggcagtacaccggggtgaatgggtggtttttctggatgcggatgaccggattgaagacggttttctccgggagcgactgaaaagcgcacgagcagctcaggccgatgtcgctattttcaatggctggcataccgactgcggtggcctgcaacggcgcccggtccatcgtaaacagccttatgctcagacgctcagtgggtatgcgtggatacagaattgcgtggtgcagaaagaatggccgcattacctgtggctgcagatggtgcgctcgtcttacatcaggaagaataatctacgttttcaggagggtaaaagccacaaggacatcctctggacgattaacctggccgctgcaaacggcctgttttatttcgctgacagaaaagactatttctacatcacgaacccggcatcgataacccatcgacaagattattacgatatccgggcgcacagctacattgatgttatcagtgacattctcgctctttcatccctgccgcaacacaatgaaatcagaacgccgctgagaaggcatgcgctggttgagtgtcgtcattttctcgggttgtaccggcgtaagattgccaaccggcaggcggtccgacagttgttcaggcagcgaatcgcgttgcgtcagctggttgctggggtcagcagtctgagcgacctattttttgtgctcaaattcgtgagaaagatttacctgtaa

SEQ ID NO: 100795 - DNA, 918 bp, Enterobacter aerogenes
gtggattttcaccagctatatcagataaaagcccgtcatcagagaagctacaccattcttacttacgagggggggcaggaaaaactgaagcttgtggcattgctgtgtattgaaatatgtcacatgtatccaaatgggaaaggaggtgcaaacatagtaggtaatttgattatagctcctgaattaataaaccgcagaaacagagatgtaataccttatcagggccatggttttgatggtattaaatcagtgggcgagtacactccatttaaaggaagtctgtatgatgggctggtagagcagtatggcgtcttaacggttaacgaagaattgagccgaataacacctgtcagacgctttcatggcaatgttcccagaaagattgagtttggtggtattgagcaacaacttcccttgttcacgttgcttcatggggagttgtggcgtcttgggcattgcaaaacctcagaatgtctgagcgagattcggcagcttttccccgaatatcctttgtatctggagttactggcaattgtgggtttccatgcggtgttatccggtgaccccgatcgcatcatggcacttttatgccgcatttttaataaatgctttgatgccacctcgttgttaagggaaccacacaagcagtatctcgctctgatgtatcgcttactgcgtaagtatcttcgtcgctacttcagcgttgagatagacgacagggaagccgtggtggcgctctacaatgggttctactcacaggagataatcgcgcctggcgatgccgacgatgaagttgtgtgttatcgctattccattggcgtcaaacattcttccaccacctttttctatgtaccaccacagaagaaggaacccgtcgatttatggcgtcttatgggggaagagctcacttttaagtga

SEQ ID NO: 100796 - DNA, 1608 bp, Enterobacter aerogenes
atgaatctgcccctgcagaattatcagggggaaactcctgaacaacgaaatatgtctgttaaagcctttgaatcactttcatttccaataaggtctcttcccaaaaaaatcagtaatgcaatcatcgctacgagtctaaataaaagagtctctgtagagattgctgccagttcatttctggctgctgcttctcttgcctgcctcccgctggttgaagtgatacctgtacatacaaagatccctgagcccgctgtgctcaattttctggttattgccgggtccggtagcggaaagtctacggtgttgagagctgttatgcaggtctttcatgatttttcatcagaggcgaatgaagaatataaaaatctattgaaccaatttcaggtcgatacaagcctgtgggaggaaaataaaaaggctctggcccgaaaccttcggcaggcgacgtccagcaattatggtcgtgaggatgcagaaggggctatggaggagcacctgaagaataaaccgcagaaacctgtcaggtttaagttcttatatcaggatatctctaacggtgagcttatcaaaagtctcggagataatcctgatgcgggtattttctctgaagaagctgttacattttttaaatctagggctaaaaacgatccgggtatatttaacctcgggtgggatggtgctccatactcatatcaacgtgacggcgtggattgtgaaatcaatcttcggctgatgttttgcctgatggttcagcccgatatttttgatgaatatatcaccaggaaccagacaacagggagagggagcggtttccttgcccgctttctgtcagttaaagtcgagggtgaatgtcaataccaggatggcgattctagtcatatgaaccgtgctcttgacgaatttgataacagagtcctggagctactggaacgggctaagcaacgtttttatgatggcatcactgataagcagcaattaatcctgtcacctcaggccattgcatttatgggcgagaaacgcgccgaaatgaagcaaaaaataagcgaaggaggaccatgggaacatattaaggatattgctcttaaatcgggctctaacgcgatacgactggctgcaatacttcaccactttgatgagcagtcagaaaatgaaatatcgctttcagtaatggaatgtgcacatagggtcatagactggtatatgcaacaggctggaagggtgttttataaaaatacacgtcttttcctttttgagaaagatgtgctggaagtataccactggatccacaacaaaatgacgatagagggaagagcgataatcgcaaagtcagaaattatgcgtttgggacccacgcataaggataataatctccgattagccagcaaactggaacctatcctggcacaactggcatggcaaaagagaatttatttgattcagaattacacaggaggccctgttcatatcattctggctaattcactcggcgtttttcagaatccaggcgtacggccagatttgttccctcatgggatcagatgtcttgagcccaattatgtacctgaaaggatatctctgaacttacctaatctgactttctcttggtga

SEQ ID NO: 100797 - DNA, 294 bp, Enterobacter aerogenes
atgaccaactcgccacaaacagaatatccggtatatgcaaaccagcatgagaacatacaaattggaaccccacttccaccagaagttgaaaaacggatccactttgcaatgggcgatgacatcctgctcagcatgaaagacatcaccgctcacagtggccttagtgacaagcattactattcccttatttccagaggtatgtttccccgaccgctgaaaattggtcgctcaagtcgctggagaaaaagtgactatgaagcatggctaaatgagcgggacacaaatcgcaagtaa

SEQ ID NO: 100798 - DNA, 936 bp, Enterobacter aerogenes
atggcacgaaacagaaacaatacgtttgaaggtaattttggtaaaacacccactgattactatctcgaacacttcaataagcccacacagcctgttccaggtggtttcctgaatgatcactggatcaatttttcctcgtccgaacagcgcctggtaagttatctgaatgactcgtatcccgactggatacatcacataacactgagaaaaaactcagaaaaggaacgacgcccgacaactattcttcaaaactatgttgtcagcactcagtgcaattttgattcttttatgcgtttcctacttgaagacttaagtgaggaggatgaaatagaagccggacttggctacctcaaaaaacttaacgaccaggatccggtggaaggcccggatttaacttccctgcatgtcaaaggcctgcgcaaggggcttgttacggtaaatgagctactgaatacgaatggaatggacaggtttgaagcggcctcttacttttttacactggcctttcattacttgagcgaaatgggccgcgaagccgagaagtccaatgtaatgtttgaagccttcgaacaactgggggagtttcggggatggtgcagcaacgtacaggcccttgaatcagcgttaaaaaaacgcgaagatgcaaaaaatgccgcaaatgtaaaagccgcgaagaattttggcgctcacaaaaaagaagttatacgtatcttagaagaggaaatcctgctagatccaaactcttataaactgaaaacagcgactgcattacacaatgtactgggggggcgactcgatgaattcatcactgcgaacagtctgaatgaatcagctgactcagcaaatatgatcaaggggtgggcacgtggtgatggggagtttaaagaacttttcgataaagcactatctgcatgtaaagagcaacataataattaa

SEQ ID NO: 100799 - DNA, 495 bp, Enterobacter aerogenes
atgaaaatagtcatcctgcatcgtattccatttgacaagatccgctacgatcagattatcgaccaccaactgcatgaggtttattatatttgcctgcaggggaactctgatgatttcccctccgaggcgaaggtgatcatgctggagagtcagcatttcgagccagctgagttaattaatttttatgcgccggtgtttgagtatgccgatcgtattatttctcgctccgaatacgatctgcttgccgcggcgaccctgcgggagcatttttcgattagcggcgataaactggctgagattcttcctttgcgcaataaatggattatgcgcagtcgctgtaaacagcaggggattcctcagcctgagttctggcatccgctggaatttattcaactagcgcctcgtgcgggtaaattcgtgcttaaaccacgaactgaggcttccagcaatgggattgtggtggggatttcgcgactatcaaacaggcatcgttag

SEQ ID NO: 100800 - DNA, 444 bp, Enterobacter aerogenes
atggaaattgaattaaataagagtgttaaagagagagttttccatgctgtcatttttgaagtgactgccaacgttatcatcgcgctgtcactcgcctggctgatgaacgtgccggtactccagtcaggctcgttgtccgtgatatccgcccttactgcaacggtctggaattttatttttaataagctctttgactcactgcagaaaaaacatcagtttcaacgcacatttctcgttcgcgcaatccatgcggttggttttgaaacgggacttatcatctccttaatccctgtggcaatggtaatgctgaacctgaccgtggctgaggctttttttgttgagattggtctggtgctgtttttcctgccctatacgatgctgtttaactggctttatgactacctgcgctggacattccttggacggaaacgtacagcgtcatag

SEQ ID NO: 100801 - DNA, 186 bp, Enterobacter aerogenes
atgcgaagtctcctgactaaaggagtatgtcttgcgttagcgttgtccgccgccgggacggctcaggccgctcagaaagagagccatgacgacaagctcaccgggataaccattttcgctcaaaaagagtctcaggaaagccaatgggacagtacaacgggcgaagcaaaatatctgagcagctaa

SEQ ID NO: 100802 - DNA, 165 bp, Enterobacter aerogenes
atgggacagtacaacgggcgaagcaaaatatctgagcagctaaaatacggctcggccactgacatctccatctcatcaactaacaggcttgatgagttctggcccctggttcttcacattaccaacagcgcgcgatacgggattccatatgaaatgatcagctga

SEQ ID NO: 100803 - DNA, 348 bp, Enterobacter aerogenes
atggccgtccagtacgcccgtaaaatgggttttgaggtgaccgtaattgcgcggggtaatgaaaaagagcgagcggcctttgagctgggtgcgcatcattacatcgatacacttgaggaaaacgcatcagaacgcttgaaaaatgacggcggtgtggattttattgtggcaccggcttcagaaacgttttcagcactcctgtcctccctggccccccggggaaaagcgatcctgctgggtaccggacaaacgccgctacaggtgatgcccggtatgatggtcggcgctgaacgtatccagtggcatattattgccatgtatggtccggtttttttactggcaaattaa

SEQ ID NO: 100804 - DNA, 1209 bp, Enterobacter aerogenes
ttgatatatcaatgttactcgtgccatagaacatcttttgaagttaattgtccatggtgttctggtgtaacgccaacaaccacctcaccatggggaaataaaaatattccggttatgccttctgatacaacacagatgataccgctcaatccatcattttatccagagtttcaataccgctcaaaaggcatgttgaaggatttattcggcaaaaagaaagaggtatcgcaacttaaccaattgcttgaaagtgttctgaaaaaatattcaaattttaaagacccatactttacaaacttcatttacacttccagattcactcattataaaaaatcaggaaaagaatcatccagagataatggttcctattcagacttagagttgttctgtgaggttctagtacgaaagggttttaacgaacttgaacaattaccacaactattagataagttactcctgacgacatcgttcaacgctcttttctatggattctctcgagaaatgaaaagacatatcaagtctaatttttctgattcgctaaagtcatggatagaagaggcaggcaccacattccgcaccgatctttcattatttctatattatatatggagcaataaagtatatttcccatctataatatttaatgataatgccgagaccacaccaggtatacctttgatatcattcgataacatggaaaaacatctaaatacttgcgaaaaaatatattttgatattttagtagacaggttagcaacacgtctggaacattttaatccccaaaaatttgtcacaatgtacttagttgatgctatggatggttttcagtttgaagatttcctggtaaaaatatttcaaacaatgggttatgatgttaaagaaacaaaaagaacacaagatcaaggcgccgatctctttgttagtcggtttgataaaaatatcgttattcaagccaaaaattattctgcctctgtagggaactcggcagttcagcaagctatttcggcgaaaacattttacggctgtgatgaagcaatggttgtgacaaactcttatttcactaaatctgcaatagaattggccgagtccgctttagttcgtcttatcgaccgtgatgaactacaaaaatatttagaggattacaatcagaaattaattgaagattttgcatctgagggcaataacccacaaaatgtagaagaaaaatga

SEQ ID NO: 100805 - DNA, 666 bp, Enterobacter aerogenes
gtggcgcgcgcgctccgcggcgaaacggggcgcgtccgcgttggcttcgccggcaatgctgtatttagcggtcagttaattgcggacctgcgccactttcatcaacgctatcccgatgccgaattggtgattgaagaggtcgccgctcagcggcaggcagaggccattttaagcggccatctcgatatcggttacgcccccgataacagcaatctgatgcatccagaactacagacacagccgctggggagatgggatatgctggtcgccctcccggatgaacatccgctggcagcaaatgctcacctgtcactggatatgcttgcgggcgaaccgctgattttgtatgaagcgcatgatgttcatgaacgtatctatatgcttcttagccaaaaacttggtgacaggtttcatgttgctcatcgttctgccagcacgctgagcgtactggcacatgcggcaaccgggcttgggctggcgttaatccctgccccgttacaacaaattcagcttccaggtatgtgttactgccagcttaatgaacctgaactgttcgccaacctggtgcttattcatcgtacccaagagagcaatcaagcggtgaatgcctttatcgctgccgctcatcgtcctgctgctaataccagattgactaaagtagcatga

SEQ ID NO: 100806 - DNA, 582 bp, Enterobacter aerogenes
atgcaaaatcaataccacgaccgccagcagcttaatgatttgcttaacggctggatccatcgtgatttggctgaatgggagcagctacgcaatttgtttcatcccgatggcactattgagattacctggtttgaaggtctggccagcgattttgtcgatggctcaatgcggaagggggcgtcagatttacgcaccaagcatctgattgccttgcctcgcgttacctttaatgctttcggcaacaaagcgattcttgagaccaatgcgatgatcattgccgagaacgtcaagttaaacatcggctgtgaatgccataaacgattttatgatctggcggagaaaagagacggcatctggaagctgtttcatcgtcaaagcatctacgatatgggcagctttaccttcccgcaggggccagtggaaatagaacacgatgtgctgacgcaatacccgcgtgagtatgctccgctggcctatctgttagcaaaaagctgttttccgctggggcgcttatttgctacacgcagtagcgtgctggaggtagaaatgaaagctgcgggacagtgctggttagcgctctga

SEQ ID NO: 100807 - DNA, 429 bp, Enterobacter aerogenes
atgatgagtacgcttgaacaattgaaactgaagtaccctggcgcaaatacatggcaaatgggcgatagcccggccctggccaatgaacttgcaaatctggttatcagggggctgaaaaccgcctcctgtggttcattttcgtctttccagcaggaaacatcagctcccagggtgggaagttacaatattatccttaatggccaggatgtaccggtgtgtgttatcaggatgatttcgatgcagctagtgcgtttttgtgacgttaacgaagcgtttgcccgcaaagaaggcgaaggtgatttaagccttgcgtactggcggaaagagcatcagcgattttttacccgagaaggtgtgttttctgatgatatggagcttatagcagaagagtttaaactcattgaagttctgtcagcagagagtgaatag

SEQ ID NO: 100808 - DNA, 1182 bp, Enterobacter aerogenes
atgaaatataaaaaaatcattattttgatatcaacagcagcgctaagttcctgtgcaataatgccaagtgggaaagttgcatacaagcttagaatagcatcaattgaagaaaatggagatctttctctttattgctataggatgcagtccatacaagaagcgttggcaatagcacagacgagtttcagacctggtcttaagactacggtattacaagcctatgttgataattataataaggtgatgaataatcttaaacatatcgacgcaaattccgatattaccaaaatacgccataaaggcgaaagttacgcttgctggatgcctgaaatgcgacgcgtaatgcccttaatgacaacagaaatgcaaacgcatataaaccctgaaaattatccatctatggaaaacgagagaagagaaaaaaataaaactggtgagattttttatgcacatgctaaaaaagagacaaacagaacactcaagcttcatgattttttgacaatttatcgttacaacccggaacgtgaaggtctaaacaaagacctacaagcagcttatgacaacgcttcaattcatctcattttaaaaattgttgatgacatgtctattggcggtgaatatgtatttaaggaacgcgtaattccaggactccgtaactatttcaaacctcaatcactagaggccatgaagaaaaccgcacaagataaaaattatttcccaaacttccctcttaatttaagctttatgagtcactatgctttcgattaccctgactccccgcagaaaactggcacaaatattgttattagtttgtatgtaacggactttgagaatgcggctcatcaatactcaataacggtccctgaagaaaaacatggaaccgtacaacagtgttacgacgtcccaaccttcagtcgcgaccgcaaaggtaaaaaggttaaaacaggtaaaactcaaagccgctgtgtggatagcacgtatacctataccgaagacttcgtgcaaaaaggcacaagctataccacctacctgactggaaaaatgacgatgagtattaatggtcgcactattcttagaaacgaccgtattataactagcgcggatgatgttcaagaggccgagaagcaaatggtcaggtatatagcttacagaataaaagaaggcattttcagcgctaattga

SEQ ID NO: 100809 - DNA, 324 bp, Enterobacter aerogenes
gtggcgccttactcaggcgcggtcagccggattgtgttcaagaccagtcggggtacgccgctgctgattatggcaaaacaggccagtggtgaggtggtgccgtttggagcggaagtgactgacagtgccggtacggtggtgggcagcgtgggccagtcagggcagatttatgcccgcgtggaaaaagcacgtggacagctgatcgtgaagtggggttcgcagggtaaccagagctgtcatattaactacattctgccgccgcagccggcgtcaggtcagaacaacagcattgtacggtttgattccgtgtgtggggggaaatga

SEQ ID NO: 100810 - DNA, 507 bp, Enterobacter aerogenes
atgccgctcctcatcgagcacgcgcatggcggtggtgtagtcgtagtagccggacgtggagaaccggtacgccgccaccgtcaggttactgtcggtgtcgggaataaatttgctgtagctcacctggtagctctgcccgctgctggccaccgtgtccttctgctccttcagatgagtccgcgcctgggtgacgctggcggaaaacgcccccacggcggtactcaccgccaggcctccctgcagggcgtaataatccgcgccactgccctgtatcccgccaaacccggtcagaatattgctcagcccccgctggtaggtcgcctgatacagggtcggattgaaggagatggacgggtcattgagcttgccggccacgatatcgtagcggtgcatccccgggcgcagcagctgcgtgaccgaggcgtacggcaccgagaacgtctgcacgctgccgtccgcttccgtgacggtcacatcgagattaccgccgtagcccgtcgggtataa

SEQ ID NO: 100811 - DNA, 876 bp, Enterobacter aerogenes
atgaaaaacaaaaatgagaaaaacaatgacagtctgttcaacgccaaatcaaaaaaggatgttattcgttcactaaaaatgggtgtagatatcaatacgctcaatgagcatggacaaaatgcattatttcactgtcgcactctcaaagcggcgcaggccatgatcgatgcaggaataaacattcaccacctggataataaggcaggaaatgcattatcccatatcaatgataaaaatatcattgaactctttattcgcaatggaattaatatcaatcacagaaatcagtctggccagttagcctttccgaacttttccgtcacaccagaagtaatgacactacttatcgggtcaggtctcgatatccattcactcgataataatgggcgcacactccttttcaccccattactcgctaatatctatattttattaatcgaagccggctgtgatataaaccacagagatcataatggccagactgctttcgattttctgcaatcaagtcagtacgatctcgcgttggcttattgtattcatttaaaagaccattcacccgtcacttttaaacatttaacatatgccagtgtagaactaatgttcgaactaaataatcaaggcatagattttaacgtagataaccaatgcagaatatctatcgatgaaaacgaggctaaggaaatcattatggtagtcagagagatcacagaccttagtcatgtaacattttgtcttggtaactctggattacctattatcaaacatgcaagtaaatcttttataaagttacttatcgactgcaatataacagtggatacagatttattgaaagatcgcgatctctacgatgaaataattcaatacaaaaatatttaa

SEQ ID NO: 100812 - DNA, 1032 bp, Enterobacter aerogenes
atgcggttctcagaccttgaactcaaagctaagtatgactcagatgaagaaagtatacttgaatgtgtacatatccccttgcttgctcgcgcagatcgctatgatagggccgtgggatacttttcgtcagatgtattggtttctgcagcgcaaggtctggataagtttatccattcagaaggcaaaatgcgccttatcattggagatccactatctgacgatgagtttgaggcggtgatggaaggggtatcaaatcctgttagagctctatcacttcaactagcagatttgttgcttgaaagcacagaacgaaacctaaagctgctaacgtatttagtggctaaagggctacttgagattaagttcgctttcacgcaccaaggtatgttccacaaaaaaattgggatcttttatcaacaaaatgaaaccgttgttttcagcggctccgcgaatgaaactatagctgggttatcgaagtataattctgaggaaatttctctatttttcaatgctctttggaataataacaagaagcgagtgaaagttgttgcaattgattcagatgcttaccaaaaaatccgagctggtgttgatctggacgtgttaagtaaagaattatttccggcatcccctcatcccaataagaccaaacctttcttctcgtatagcttccctaaatcagaacaagagttaacaaaactaaatattgaagtgaaaatacctcgtaagccattgatagtgaaagatagagcgtttgagttgtttccacatcaagtcgaagcgatagaaagctggcgaaaggcagattataacggtctatttaaattagctacaggttcaggtaagacattcacgtccatctctgcgatggttgaattgtatgaagaacgtcataagaatggtaacgcaacctttgttattattagtgtcccttatatcgaattggctaatcaatgggtaaaagagctagccccttttaatgtcatccctattcaatgttacgatagctctaataattgggctgctgcgtaa

SEQ ID NO: 100813 - DNA, 219 bp, Enterobacter aerogenes
atgcgaacctctggttcttcaatatcattaacgtttaccttgatattattccttataaaccacttaataatttccttgttttttaaactaacaagcggggtgtcataccatgagcaaaaagtaatgtggctgatattaatgactttctgcacttcagtaatgaactttttaatgtctttgttagcgtatcttacaacgcaacgctcattgattttgtaa

SEQ ID NO: 100814 - DNA, 276 bp, Enterobacter aerogenes
atgccagcttatgttgtccagaaacttccgcttcgtgccagaggcggacattgcttgcattttactatatttatagagatcagattgctgaagccctatactaatagcgaatgtatattttacttcattttattttcaaaattaagcctaaaaaaccttctcgataaaattactgatgttatgaaacataacttcttatctttaaagttagatggcatttataccttagggaaaggggtatgttgtgataacagcaaattttgtttcgacttataa

SEQ ID NO: 100815 - DNA, 249 bp, Enterobacter aerogenes
atgtctggaaaatataatgttggagttgtagctgattggcttgttacttacgccggtgcagagcgcgttattaaagagtttattgacctatatccaagaatttctatgttcatttttgctttagattttatttttgccatttccgacccatcaccaatcacaacaagtttcttatctggcatctggctaaatgcttccacgataaggtcaatgcgtttatatggaaccagtctggatgcagtgaaataa

SEQ ID NO: 100816 - DNA, 807 bp, Enterobacter aerogenes
atgagccactatctttggcgacggttggcacaaggcgtgctggtactgtgggcggccttcaccctgaccttttttctgctgcaggtactgcccggcgacgcgattttgattaagtttcagaaccccgacctggggctgagcccgcaacagatcgccgaaatgcgtgtggtctacggtgctgacagcccgctgtggcagcaatatttccacaccttgttagccatgctgcagggggatttcggctattcactgcaggctggactgcctgttagttccctgattgccagcaatttacccgacacgctggcgctggcgttgccggccttcgcgctggcggttctgctggcctttgcgatcgctatcgcttcgcgtttgccggggctacgcggtatcagtaatctgctacagtcgctgccggtgctgtttatctcactgccgaccttctggctcggcatcgccttaatccagatcttttcatttcagttgcattgggtcccggttatcaatcccggaccactacaagggctggtgctgccggttatcgcggtggcgataccgatttccgcgccgctggcgcaaattctgttacgcaccatggatcacatcgccgcacaacccttcgtcgccgttgctcgcgccaagggaatgagcgaaacacgggtgttatggcggcatgtcaccggcaatgctctgttaccgacattaaacattgccggcctgctgttgggagaactgatcgccggggccttaattaccgaaaccgttttggccgcagcgggctcggccaacttacgcagcaggcggtga

SEQ ID NO: 100817 - DNA, 216 bp, Enterobacter aerogenes
atgctctcctctgcgcccccgcaggggcgcaaccacccgaactcaggacttgatgttgaagtcctgaactttatctgcgttatcctgggtaatcagaatgccgcggaacatcacgcgctgcttcgccggcttctcgcctttttgcaggtagttatccagatcggtaacgccctaggcggcgatggcctgcgcctggagcatcacggtcgcctgtag

SEQ ID NO: 100818 - DNA, 774 bp, Enterobacter aerogenes
atgtcattagacgttcttcggtgggaacacaaatttgaactcaagcctgggatttggatctatgtcccaagtactgacggaatcaaatgtggagagaagatacttcgagaagtcagaagtaagtggattgcaccgctctatttttaccacctaagaactggcggacatctcaaagctgccagattgcatttaaaaagtgattttctcgctgttgtcgacatcaaacaattttttcagtcaactagccgcagccgtatcactcgtgttttaaaaaactactttacttattctcaggcaaaagaaatttcaaaattatcaactgtgagaaatctgactggtaccccgcatcagcacgtccttccgttcggttttgttcaatcacccatccttgcaaccctttgcttggataagagtcatttaggtggtctactgcgtcgcctaagcaaacatcctgatatgaaactcagtgtttacatggacgatttaatcatatcttcaaatgattttgttcagctgcaaactgcatacgacgaaattttagcggcgatggaaaagtcgggttatcaagccaatatgatcaaaacgcaggctccatcatcactgattaaagtgttcaatttgaacgtgagtaagggagctatgaaagttacctcacagaagatgagtgactttctcattgatttttatgcgagtgactacgagccacacaaaataggtgtcaaaaactacgtcgaaagcgtaaatccagagcaagcaaaactattgaaattgtaa

SEQ ID NO: 100819 - DNA, 180 bp, Enterobacter aerogenes
atggatatcaatgaacttggcttagttaaggcgcgtgttgaacttgttaccgctattctcaactgtgcaattgcatttgttggcttagttggtgcggtcttcactcttcttaacatggccttcaactacgactctttatcctatgtcattagacgttcttcggtgggaacacaaatttga

SEQ ID NO: 100820 - DNA, 420 bp, Enterobacter aerogenes
gtgattgccagctggctgcatacacgggagccagcaaagaaggaaaccacaagcgttaagcggcggaagaaaaccacgacaacaaaggagcaggaggcaaaacagggggattatctggtcggaacggatgaaaacgtgctggtactgaacaggacctatgccaaccgggccaacgctgaatgggccgccaaaatgcaatgggaacgcctgcagcgtggtgtggcgtccttctccctgcaactggcagagggccgggcagatctctacacagaaatgcccgtgaaggtcagcggctttaagcagcccatagatgaagcggaatggacgatcaccacgctcacgcatacggtcagcgctgacagtggtttcacaaccagcattgaatttgaggtgaaaatagatgggttcgcaacggaatga

SEQ ID NO: 100821 - DNA, 588 bp, Enterobacter aerogenes
atgatgatggtgctgggtttatatgtttttcagctgcgtaccgtgccttatcaggagttgcagtatcagagcagctggcgtcacgccaccaacagccgggtgagccgccgtccgtccacacagtttcttagcccggacaatgactcactcactctttccggcgtcatgctgccagaaatcacgggcggcaggttgtccctgctggcgcttgaccagatggcggagctgggcaagtcgtggcctctgattgagggcagcggtacgatctacggcgtgtttgtgatcgagagcctgagccagactaaaacggagtttttcgcaggaggtgaggcgcgccggattgagttttctctgaccctcaaacgcgcggatgaatccctgtctgatatgtttggcagccttagcgaccagctgagcaacttgcaggattctgctgcatccgctatcggtaacattaaagacctgaataggccactggatcacctggaccagaccaacgagagcgacgcgagttttttgatgaagctagcgcggcagtacggggccattgcctctgtaaaagacgggcatctgctgtttatccgctag

SEQ ID NO: 100822 - DNA, 216 bp, Enterobacter aerogenes
atgagtctgcccatcgcgaaatatcgcgccccgcaggagagaatcgccagccagtcagcagtgatgcattttgaaacgcaggagcccatcactatttatgcgcagccggggcagaatgcgcaggacattgcccgcgaggtggcaagactgctggacgaacgagagcgccgtgccagggcgaaagcccgcagcagctacagcgatcagggggtatga

SEQ ID NO: 100823 - DNA, 159 bp, Enterobacter aerogenes
atgacccctaacatttcaattactctgaatacgccgcacgtcacaatcgaacgttatagcgagctgaccgggctgcctgtcgacgccattaacgacatacttgctgatagtcgtttgcctcgtaccgcctgcgtaaggataagaagcgcgagaaggtga

SEQ ID NO: 100824 - DNA, 591 bp, Enterobacter aerogenes
atgtcaacatcaaagcacccaaatgagatcaaaataaatccccatcagggtggtaaagctgcgatagaacgtttagtcaaagcttatggcttcacaacgcgtcaagcgctggcagaccttcttggggtatcaaaaagcactttagctaatcgttatatgagagatacgttcccagcagactggataatccaatgtgcgttagagaccggtgtatcgctacgctggttgtcaacatctgatggtccaatgcgtttgaatgcgagaactcaagttgcaagcctcaataaaacaaaaattatcgatggcaagctaattgatagcggttatattttgtttgatacaactttgcttccttgtaatgttgagaatataagtgcagttgaatatgagaattcaacgtatctaattcgacaggatgttaatgaagtaaatgatggcaaatggatggttttaatagacggtctgtattctattcgtgaattggcaagactacccaataatcgaatcatgttagaaagtaaatcaagtaaaataaaatgcaatattgaagatatcgaatttattggtaaggtgatacttacctgcaactaa

SEQ ID NO: 100825 - DNA, 1995 bp, Enterobacter aerogenes
atgattgttggtgttattttaaggaacttcaagaattttagaaatcagcattatataccattaacagtgaatgcccgttcttcttggttaattggcgagaatggtgttggtaaaagctcaatacttcaagcattggatacaattcttaataaaaatgactttaataaattagacataaacaatgatgcccgtagccaaggattattgaccagggaaccattcattgttcccatttttcttattcgtaaagaaaaagttagaagcaatgcatcaatttataaaactctagaggttattagtgatatcacatggcaaattgaaagtgaagattttaacttattacaaagaccattggctgaaaaattcgtggctcataggaccttgttagaagaaaaatattctagctccgaatattttttaattccaattggattaattaagaaaggagcaaatgacatcccaacacctacaatgtctatatttgagtcaattgaagattaccatattgagttagaaagccttattccggactcaacttcagcaacatctaaccaacgaaaatattttttccaaatagcattatctagaactctcgaccatattaaagaaatctataattatatttacctgcctgctgaaattacagtatcagaatattcaaaaattgaaagtaatcttttacaatctctcttaggggaaaaccttcaacaaaaaatcagtaaaataatcaagaagaaagatataactgaaataaatcgcttccttaatgaattcgttgaacaaatttcaaaaaaactggatggacgctatcaattcaaaaaaccatctcaaaggcaaaattcattcacacaaaggcatatggtagccaacatcatcgaatcctatttcagtgataagattctccattacatagatagtgtaaataaagatacgcccattcaaaatttaagttctggtgaaaaaagaaaggcattactagatcttgcaactaacttcctaaaacataatcctcagaaatctcaacaaagtactatacttgctatagatgaaccagagttatcattgcatgccacttcatgttttcaacagtttgaaaaaataaaaacaataagcaatattggaattcaatcaatttgcacgacacactggtatggttttttacccgtggcaggttctggaactgccatttatatagcaccttcacaaaatcaaattaaggctttagacttatctaattataaagatgaattaaaaaatcttaccacagagacaaatggttcttatttagatgttttagaaatgaaaagtaaccatgaccttacccaatccattgtttattcaattacttcacaaaatagctataactggattatatgtgaaggtaaaacagataaagaatatatttctaaacatttggaatttgaaagtattgataatttgattgtgctatccgtaggtggttcagttgctgtaaagaaaatctacaatcttttaacccttgctttagaagaccgtaaaaaaacgatttcagggaaagtatattgcttattggacaccgaccataaatacagcgcatttcacgcaaccgatactatcccaagtattaaaatccgtagattactactcaaccaaaatatggatgagattattttagcaaaagtaactgatgatagtgtttatccaccaacagagatcgagcaagcattaaatgctgaattttatatcgaaacccttagaacattatataataatggtgaggaagcattctcatttatgaaaaaacccttagttttacaatcatctgtttctggcggtgccctagatttaaatatgactgaacataaaaagattactgaatattttgacacgccaggtaaaaaatatgaattttgtaacacctatattgaaattatgacagagtcagaatatatccaaactcctggatggttaatggatattcgggatttcttccaaaacgaaggtgatgtaccctaa

SEQ ID NO: 100826 - DNA, 558 bp, Enterobacter aerogenes
atgaatgattgtgtagacaatataaaaaccattgaagagcaagaaaaagaacttatcgataaggctgaattattgttcgaacaccaaaaagagcaatacgaatcttcagttgtaagagtccgtcgcctggaagataaggcactcaaaacatttgggtcgctaaaccttattattacagtggcacttcttatagttagatattggtggggggatatttttcctggcaaatatacacctttacatgcattttgctggatttcactttctgtatttataatcatgtgctttatttcatgggggttttctttcagtgcaatgcaattaaaagactgggaatgtccttctacagatgcccaagggatggaagttttttatatggataataaaatatataattcactttcagcatatgctagagaatactctaggcttgcagatgttgtgggtaatatacatagggataaaaccaagttaatcaataactgttttgaatcaatgcttttcggagcttggtcgtttacagcttttttaatttccgttgcaattattaaaatttaa

SEQ ID NO: 100827 - DNA, 237 bp, Enterobacter aerogenes
atggatatggtaaacggtgaacgtgttacctcccagaaaattacaaacttgggtgccgacggcatcaaaattgagatgggtttgatgccagccaaagacgggaataactacgggtttgagtacattcaccgtcctggtagcgaaaaacggtttttgaacgttcaactgctgcagaacagtatggatgcgccgaagctgattggatcgtttccttgcaggaagcttaatcatgaatga

SEQ ID NO: 100828 - DNA, 981 bp, Enterobacter aerogenes
atgagcaatcaggtctttgaaattgttcaggccatgtcagggcaggggaactgcatcacgatccctggcccatatctggacttctttgcaggggacaggcagcaacatttgctggcggcaattctcaatcagctggtgttctggtcgggtaaatctgtcctggaaaatgggtggttttacaaagaacacgcagcccttgcaaaagaggttcgggcgaaagacggcgatgtggtcaggaaggccatgtacaagatgattgagcaatatttagccgatgttattgaggaagaacttcgacaggtaaacggtaccccgaagaagcattaccgcatcgaccaggaggcgctaatagcgaaaattttcccgtcaacactggattcggcttttaagccgaatggaaacggctcaagagccgaatggaaacggcctaagagccgaatccaggaatcggcccataagccgaatggaaacggctctcaagccgaatcctatctctatacagatcttaaaaatacagatcttaaaacagatcttaaaaaccatggggggaaggcttcccctgtggataaatcgaatcaggaaattgagattcaggacgccaccgaagacagcaatcttgctaccgatgaagacttcgatctcgcgatgtggttctggtcaaccatcatcgaaatgtacgaacgagcggctgaattcgacggcaccctggcgagaccaagagaaccaaattttgttggctgggcgaatgaagtacgcctgatacgccaggagcacggctgcacctacgaacaaatccgcacgatggttgagcgcattcagcgtgatcggttctggtgcccaaaaatccaatctttgccaatgctgcgcagcaaatggcctgagctggtgctgaagctgtgttctggaaacctggcgacaggtaacgcgttcggcatgggtggtggtctggatacacatatcccgaaagggttccggggttaa

SEQ ID NO: 100829 - DNA, 699 bp, Enterobacter aerogenes
atgaaatttgaaatagacaccagatttctactagacacaacttttcatcgtttagaaataatccgtgacgatggcctatatcgccacctgcgcatgaagcagccaggaacatcttgttattactacgacattattacttggcctggatacttgactgtaaccggcgatatgggaacctggactttcagccgcatcgcggacatgttcaacttttttggtgcctgggaaggtgaaataaatacccattattggtctgaaaagttagaggctggagcgggatgttctgcacgtgagttactggcgaaagaatataaccatgaggcgttttgccgcagcctgaaggaatcaatgagagagtatctcgacgattccgaagaagaccagacggaagacgaagactgggatgatgaagacgaaacccctgacagtgaaaaagccaaagttcgtgaagcagtacgggaactgtgccggggtgaatttagcaacgagtgggaggcatatcaggcagtctatgaagctgactggcccgatcgctggagttcgtgggatatctgcgacggcctgacgttcaaaacctacaccagccacttccgctggatcctgttcgctatcacctgggcaatcagcaaataccacaatgcaaagattgttgataaagcgatagctacatttttgaccgtgaaaggagcttcagtatga

SEQ ID NO: 100830 - DNA, 345 bp, Enterobacter aerogenes
atgagcaaatcacttaatgcccgctgtatacgccgctgggaagtcgagtttaaaggccgctgtgattcgaaatatagcccatactggcgcaagcgtgacctgcgtgggtatatccgcgaagcagcgctcaccaccgctgactgcatgactgaacgcatggccgaagatgcggcgagatttgataaaactggatcgacctatggatggtctcctgaattttctgaatggtataacgagcaccgtgacgaatataaacgaaaagcctatgcccatcttagtgagttcgctacaactgatgaaatagacgaagagattcagaacgaactggatgcatggaatgattga

SEQ ID NO: 100831 - DNA, 348 bp, Enterobacter aerogenes
gtggtgctgagctacggcgatttcgatgtcaccctgcaccactcgaaggtcagcgactccactatccccagcgaaatccagggtgaagaaggcgcgctggtgattgagaaaatctccgaatgccagaaggtggcctttattccacgcggcggcaaagcgcaggatctcacccagcctcagcacatcaatactatgctgtatgaagcagaagcgttcgcgcggctggtggaagccaacgacgtcgctcatcctgggcttgaagtcagccgcattacggcaaaactgcttagcgaaatccgtcgccagaccggcgtggtcttcccggcggatactcagcctgtggcgtaa

SEQ ID NO: 100832 - DNA, 675 bp, Enterobacter aerogenes
atgacattttcgattgccgcacgctgcccggaaagcgggcagtttggtatcgcgatcagctcttcaagcattgccgtcggcgcccgctgcccgtggctgcaggcgggggtaggagcggtatcgagtcagaacattaccttaccggcgctggggcaactcactctggcgcagatggagcaggggctgacggcggagaaagcgatgcgtcgggcgctggcggaagacgactttagccgctatcggcagattatcgccatcgacgccagcggccagaccgcgtggttcagcggcgataaaacgctggggacctggcatgttgtgcagggcgataactgtatcgccggcggtaatatgctggcatctgaggctgttattgccgcgatggcggcaacgttttcgcaaaccgaaggcgagctggcgacgcggctggttgccgcgctgcaggccggtgtagcagagggcggcgaggccgggccggtccattcggcggcggtgaaagtggtagatgattactcctggccgctggtggatctgcgtgtcgactggaatgaaacggacccgattggcgagctggcggcgctgtggcaggcctatgaaccgcaaatgcaggcttacgtgacgcgcgcgctcgacccgcgggaggctcccagttacggagtacccggcgatgaatag

SEQ ID NO: 100833 - DNA, 645 bp, Enterobacter aerogenes
atgacaaaacatcaatctgttaatgtcgagaatcttgaaagtaataccatcagacctatccccttaaatatgcgccacggcaaaccaggcgatctttttaccatttggtttggctccaacattatgctgttaacggtcatcaccggcgcgatgtcggtgacgattttccacctttcctttttatggtcagtgattgcgctatttatcggcagcctggtcggcgggctctttatggcgctgcattcggcgcaggggccaaaactcggggtaccgcaaatggtccagaccaaagggcaatttggctcctatggttcggtactggtggtctcgattgtcgtactgatgtatatcggctttaccgcctccagtctggtgctcggcgggcagtcgatgcacgcgatttatcagccgatgaactcggacattgggattatcgtggttggcgcgctaagcctgttcgccaccatctttggctataagatcatccactcctacgcgcggatcatgtcgtggatttccggtatcgtactggcggcaaccttcgtgtggatagtcttcatccatggcctgccgggcgattttgccgaccgcggtggcttcaacatcgtcggttttctcggcgccgtgtctatcgccgcgctctga

SEQ ID NO: 100834 - DNA, 783 bp, Enterobacter aerogenes
gtggcgcggctcaataaaatcgcgatatcgctctgtgcattactgtttacatctatctcgcttacgccattggcgcatgcttcagggcatacgcacgcttcggctacgccgaaggcgcacccggcgaaaggctccaccgccgagcgtaagaagaaagcaacgcaaaataaatccaaatccaccgctaaaactacccgtaaaaaaacctcaagcgcgaagtcccctactcgtactaccgcagcaagccaaaccgcgcttaatcgtcaagtcgccggcgccactaaaaaatgcgtgttgcgtaaaggctacaaaaaacgttgtaaacctgtcgctgatgaaccgaatctgacgattgccgatgcgcacaaagcccgagtgcaaaaagcgcaaagcactgccatgaataaactcatggatcagctaggcaaaccttatcgctggggaggctcctcaccgcgtaccggtttcgactgcagcgggctggtttattacgcctataaagatctggtaaaaattcatattccgcgcaccgctaacgaaatgtaccacctgcgcgatgcccgcccggttgaccgcgatgaactgcaaagcggcgatctggtcttcttccgcacccgcggacgcggcaccgccgaccacgtaggcgtttacgttggaaacggtaagtttatccagtcgccgcgtaccggccgtgatattcagataacctccctgagcgaagattattgggttcgccactacgtcggcgcgcgccgcgtaatgacgccaaaaaccattcgttaa

SEQ ID NO: 100835 - DNA, 1326 bp, Enterobacter aerogenes
atggggtttaatgtggaaataaaatgtattgaaagtgatcaaattttttttgctaagatgaatagatatagtttcaaactgtcagataagaaatggcaacttgataaagaaaactgcgtataccctcataaagttgtagatagaatgcctacaaaaatgaaacttagctacttaaaaacattagcttactatgcgtctgaatatagttctttttatatacaaaatattaacaatctattttataagtggtttggtgcaatgaccatcgatactattgatgacaaagcaatatatcaattgaatgtttatttaggttcagaaagaaactacaaactaaacttaattaaggctttcatcactaaatggaaaaatctcaattaccctggggtagatgcgactgccattagaatgctggagaaaataaaaatcattccaaaccaaacaggagatgcagttaaaagacgagatccaaataaagggcctttaactgaaacggaattcaataacattattaacgccgttggaaaattttatcatgagaagaaaattcaatgctttttgtattgttatatccttttgctggcaataacaggaagaaggccattacaattgatatctctaaaagctaaagatctcattaaaaatgagagagggtgctttttgaatgtaccaaaagtaaaacaaagaaaatgtttcagaaaagaatttaacatggtaatgatagaaccgttcttatatgacagtttatcaatgctaattaatcaaaatcaggcgtttgttgaagataaattcagtgttgggattaataactatagaggcgaattaccaatcttcatgaatttagataagattacggaaacaaaaaggattgaggattttttatctgatttaacaacagattttttccatatgaaaaattcagttatgtcaaaactattaaaacactttccgtcaaaattcgatgttaggtcagaaaggactaacagctatatagaacttaatgctagaagattcagatatacgttaggaagtcgactggctaacgaaggagcctcaattgaggtgattgctaaagccttagatcataaatcagtaaactcttctatgatatatataaaaaataatcctgacaacgtttatgacatcgataagagactaagtgcgttttttaaccccttatctaatatacttatgggcatagagattgaagaaaacaagaacttttttatcaagtatgtttcagatgcatttttcttattagaagatacgaaagaggatttgaaatgtttaacgtgtaaaaaattcaacccctggagagcattatga

SEQ ID NO: 100836 - DNA, 414 bp, Enterobacter aerogenes
atggataaaacaaatattaacttaatggaaaggtatctacttctgcttgatcgattcgttgataaactcgctgaatctggtttctcagagcaacgaattatagaacaatcgtatcttttttgtgcaggattttatatcaaataccaaaatggtatcgaaaaaatgaccttctccaacagggaggttgttttaacctttctgctactttcatactatagtcatataaataaactggatgatgatttgatcaacaaagtgcgtatgaaaaatgtatgttcttcattgattaactttatagtcagtaatggtagccgaacagagaaagtctatgctaatgagaaaaggaaatatgaggcttcaactctaaaaagagaattatcgaaaaaggataaaaggaaaagatatgggttgtag

SEQ ID NO: 100837 - DNA, 1197 bp, Enterobacter aerogenes
atgacgattgcgaaggatagttcgactgatgaaatcattcatggaaatgatctccgtggaatggatgatttttacattaagacaacgagttttgaatgcccatacgagccttgtaaaattaaagccacaccttgtagttttactatgaaacatgttaatcaatcatattttagatatggcgataaacataaggatggatgtggtattcatgatccaagatataaaaacaatcatacttcaaatgacgaaagaaaacataattcgccacctgctccggttatatcacttttaaaaattgatgtaaaaccaagaggtggtgttaaaaatgccagaaatattaaaaatgaaaatcacaaggatgaaaaaaaaggtaatgaacatcctgtatcttcatcaagtattaagccagtcgttgactattacataaataatagcaatcataatgaacagctatcaatccctccatatggcacgcgatcttataaagatacatttcaacttattttttacaaaaacaacatacgttattacaaacctgctatttattatggtgtagcccagtctaatattcgtctgcatgaagattcagataaacattgtattactttcctcgcaagggataagaagacccaaaaaccatttacgcttgaaattgatgtttctgactggaataaaagtcagaaggatgtgttttggaaggaatatgaaaagcaaaggaaggaagctgataggtattataagggacttaaagataaaaggaatgctaaaaaatacttgacggttttcttttttgggatgccggatgaaaatgataagtttctatttaagacaaaccactttaaattagtatatgtggctttcttgggtaaatttgaaagctcatataatgatagtaattattacattgaaaatgatctgtctgtatcatcattgaatgaacaacccatttcattatctgatatagaccataaaaatcatgaatataatattgaaacttcattagattttagttctcctttgccagagccagagccagagccagagccagagccagagccagagccagagccagagccagagccagagccagagccagagccaataagatcctctttaaaggaaaatactgagactgtagaaatgaacagtaaagtttgggggaggctgaaaaagataatcactttctttaaaaagtga

SEQ ID NO: 100838 - DNA, 375 bp, Enterobacter aerogenes
atgaaaaaaatcataatcgtaggattcgtttttctgaccttggcaggttgttcttcagtaggcaaccagtcattgaaaaatgagacgcaggaaagtgtgaaaaccaaaattgttaaaggcaaaactacaaaacaggacgtgttagcatcgttcggtgaacctgacagccgttctttgatcgatggtgaagaacaatggtcatacactatgtataacagccagtccaaagcaacctctttcatccccgttgtgggactgcttgcaggtggcgcagactcacaaactaaatctctgacagtttctttcaaaggcgaaaaagtcagcacatacatctttaatgctggaacaagcaacgtgaagactggcattttttag

SEQ ID NO: 100839 - DNA, 669 bp, Enterobacter aerogenes
atgagcatctccgctacgaaaagcaggaagaaagaagctgaagctggtctttctgatgatcctcggcaaacggaaatcacgacacccaattttgtgctgtttggtgaaactttcacatttattgagactttctctgccactgtcatcgactccgatccaggcaatggtcatatctgggtaaaaaccaacacaggggatgagaagcagatttctgactatggtgtccctttcagaagttcacacactatccataaatacgaacttcgccaatatagtgaggatggttcgtatgatgcatataaagatgcgcttatcgttaataagaaaacgggtgaacacgaggtaaacttaaaaagaaaaaccattattatccccgcttttctgacaatgctatttcatactgcctccacagcatcgtattacagagcaatgcctcttccaaagtttctcaccgttattttcattttactttgtgctgctgcacttatttcatttctcacactaccctggggatttaaagacggctacatgtggagcgaccacaaatacatgtggtttacatatcttttctcaagagttggaagttttatttgtatcaatttgatgaaaagaagaagccagaaatttgaaaatgaacttagaaatcttattgagtcagtaaagcgctaa

SEQ ID NO: 100840 - DNA, 1233 bp, Enterobacter aerogenes
atgaaggggatgcagaagataaagcgaggtaagaacttcgctggcgtagtgttttatgcattgagaccagcttctcatcacaaagttgatccagttgtcgtaggtagcaatatgatggggtgcctcgctaaagagctaatagctgagtttggtgctacaaaaacacttcgccctgatgtggctaaacccgtttggcacaactcgcttcgcttacctaaaggtgaatcactaacggctaaacagtggtcctacatcgcagatgactacatggcaagaatggggttctctgaaacgcatctcagatgctacatcctacatgacgacgaagacggccagcacatccatatcatcgcaagcagagtttctcttgatgcaggaaagctctacctcggcaagaacgagaacctggcaagcacaagaataattcagcaacttgaaagagattacaatctgacaagaaccaaaggaccgaaagcttctccagcagcgccctcacctacaccgaagctcaaaaaatcccgtaatgagctgatgatagaaaagagaactggtgagctatgcccaaaagcaatcatccaaaacgcccttgatgaactgcttgataccaggcaatcgattaccgacttcgtgcaacagcttatggcacaaaatatcaggccaatccctaacattgcttctgcgggtaagatgaacggtttttcattcgaatatagggggattgctttcaaagcttcgcagctcggtaagggttattcttggtcagccttgcagaacaaactcaactatcaaccggaacgtgataatgctttcctgtttgaactgaaagcatctatcagtgaagcgccttgtacgttcatgactacagatgctcctgaaatcacaacaagagtggttcacagccccatagaagcgcttatccatgataaccgtgctggtcaggacgaatacactaacgcttctgtaaagcagtttcacttagaagctggtgctaaagaagcgttaaaagaagcccccaaccaaagctatgcagtttcagcgttcaggtggttggaatacatcccctacctcgatgtaatttatcgtatgttgaaaaacctcaaaatcccaacccttaaacgtcctctaaaacacaaaaccatcactgacgtgagagtggtagagattatgcctctcccccaaaaaaatcgcatcgaatcagcacctcaatccagaagagcttcgctttcgatgtaa

SEQ ID NO: 100841 - DNA, 402 bp, Enterobacter aerogenes
atggtcgaaagtaatacttttaataaaattgttgtaagtaagcattcccgtaatggaagcattaacgaagcgaagctctcacacaaccagcttcgttctcattgcgtcagtgtcagattaaatgatgcagagctaaagcttctcaatgagaaacgtggccgtcatcgtaaaggtgaatgggttcgtttagccctcattgaaaagcttccagtaactgtccctcctatcaacttagaagcatggaaatctctgagcgaaatatcacagaagctgaacaagcttgtcgctcatctggataacaaaagccacggaagctctctgacgcaaacagaactattcgcagtgaagcgccagatatctgagcttcgcatgaagctgattactgctgacttatggaaataa

SEQ ID NO: 100842 - DNA, 210 bp, Enterobacter aerogenes
atgataaatataattaaaatattgtccgaagaaaataaaaatatacccatgatagtcttgcatatattttgcatcctgctatctatattctttatttttctttcatttcaatggggaattatccccggctggttggaattaatatctgcaatatatatggggatgtcaataacaacattccccatctttactatatatattttaagttga

SEQ ID NO: 100843 - DNA, 738 bp, Enterobacter aerogenes
atggtcgaaacgtctccaaataaagatagtgtaaaagaaaaagcttataattttttaagtagtaaaaaaatcacagttcaactagatagttattctgaaaagactgaaaatattgttggcatagattatagagttatttcattctgtcaaaatacaaaaacaattgatgtggtgattgatcatgatgaagactcaagtttaatacttaaaacggagtttataaaaacaaaaacattaaaacactttttaactgtgatcatttcattattttatataattaccattataattttctttattctcccatcttcatgggtaggtaaaatattattattttccacaccaattgcctttggttattttttgtattatatggcttataagactgcaaaaatctatcttaagaaacttactgatactataacttttagcagtgcagctattgcagcagctacagcactttgtggattaaacctgccacaatacttgtatgaccacgaagcaaatggaattatacaaatcattttatttttaatattacaaacattttctatttttgccaccacgaaatgtttaatttcatggggtgaaacaatagaagaaagcagaagatactacaaaaaaaatgaaatcataaaaaagaaagcgggcattttaaaaaatacaaagctgcttattatctcagctttgttatattcaaagatcaggtttcacaaaaacaataaaaataataaataa

SEQ ID NO: 100844 - DNA, 726 bp, Enterobacter aerogenes
atgatgaaagagcgggcctggaactccaaaaaatttggtccgggaatattattgtattcatccacttatctgaaaaagcataggtacactgactctcataaggactttccatcaaatgagaaaagcattgagttagcaacgcttattgaacgttattggagttcattagaggctgaacttctgagggataatgttgctgtcattatccctgaatatatctctatggatgaactctttaaatttcatcttaggtatgcacagaagtgctataaatggggtgaattagttatatcagacaatgaggatgttgcatttgaagcatttaaaaaagcatctgagttatttgataaaagcatggggatggtttggtataaaacttctgtagataaacgaaataaacttttaagtatcagaaaggaatctgggcgaaaaggagggatgaaaaaagctgaagtttatggaattatccaaggaaagcttgtggagcttattaatgttttagccccagagcagggatggggaagtaaagctgctgccgtgagagttctcattgaacctttgtgggaatttgttgaggaatcagattttatgattgataaccaaagtaaaaaatatagattagcaactgctagtcaagatgctttagctgaaactatcataaaatcttggtcgcaaaataatgaaaatattaaacaagcttttgatgcgaatgtaagaaaaaaataa

SEQ ID NO: 100845 - DNA, 138 bp, Enterobacter aerogenes
atgatccaacttttccgaagaaaagaaagcttggaacacaatcagttggatggcttgaatcagaaattgatgaatggttgttacatcgtagtcttattaattaattataaagaggagttagataggatgtatgtctaa

SEQ ID NO: 100846 - DNA, 1515 bp, Enterobacter aerogenes
atgtctaaaaaaaacagctcaacgcaaaataaagaacttggactaaagttccagacgcttcccacttttgcacaacggttaataagctacatacattataaaacaggagccgccgctgaacttattttaatagtgttacttggggtaatggcacttgcctgccaggacaaatttgatattcagcttaaaaatgggagaacctttacatcactttatctgatgctattggcacgctcaggtagcaggaaatcaacggtattcaggctgttgatgggggaaatttatcaactggaaaaagagctgcgaaatgattttctgttaaaagagaaaattcataagcttaaactagtatcctgggaaaccgagctaaaagagcttaaaaaacaatttggcaaagctgttcgtcagaaggttgatgtaactgaggcacttgaggcgctggaggagtgccaaagaagaaaaccatctgtcccagaaagaaagtatcttactaaaaatgattcgacaagtgagggacttagaaaggcattagcgctgggttctccatcattgatgctcggttctgatgaagccggtggggtgattgacagcaatctttttcgcaatatatcaatttttaactctctttggggagaagggagaatctctgacagcagagcttatcgtgacagctacgatgttgatgatgtccggctgaccgtattgctgttgttacagcctgaattgtttaacgactttataagtaagcgggggaaaaaattaagaaaatcaggattcttagcgcgtttactattgattgatctggagcaacttcctgaactatgcaacatccctgatgcgtgttcatggtctgatgaaccaggacttgatggttttttctctattctcgttaagcatttgcaagacgggatagagcgtagagaaaaaaatgaagaacgtatctgtattactttatctgaagaggcgaaatcgtcatgggatacacaaagtaaacgaatcagggaactaatgcaaaaaggagaggagttgcatcactatgatgatttcgcctcaagaattatggagcaagctacgagaatcgcagcagtaatgcaaatgtttattacacccgactcaccaataattaccaaggaaactttaatgtcagctactaaaataacacaatggattattaatcaccttatcactaaggtcgatactacccgagaacctacaactgcagaaaaattggtatggttcatggaggagcatcttgttagtaatggttcttacgatttcaagaggaatgatatcattaaaaaaggtccatattcagtcaggcgttcagaaagtctgaattctgctttagaaaaacttgaatctgaaggaatagtacaactatttgaacgaggtggggttaattatgtcaaatttattggttccaaaatggaacctagtgaactagctgaaaagactaatatcccgttgttagattcaggaacagttgcgatgagtaaactacgtttacctgaataa

SEQ ID NO: 100847 - DNA, 699 bp, Enterobacter aerogenes
atggaatcactatattcacttaccaatgaagaaaccgataacttggtagaaatagcctccagaaagtatagatcgcctattgacctcgatattctcaatccactactcaacatggtctacggcacactggagcagcataaccgaatactagctattcgtactgacacaaggttcgctcaatcctatgtaccgggagagccagatctaccaatatgcttccagcgcgatgatgcgcaggcaatcactcgcttcttcgagtcactgaaaagccagttacgggcagatcatcaccggtccaagagaccgggtaacccgacatttccatcttatgggtggtgtagggaacgtgatgcaagcgtacatccccattatcacctgatgttgttgtttaatgcagatgtatataggtacctaggcaactaccaagaactcaatgctaaaaatatggcaacccgaatacagaaagcctggtgcagtgctgtagggcttgctcacgaagattacgcaacattaactgaattcccaccaaatgctgtttataggtttagcatcttcgatgctttggatcgtaacccagtctactgggatttcctgattcgactggcgtatctggcgaaaactaggactaaagatgtccacagtggttaccgcaactttggcacaagccagtgtccacgcttaggcggattagcctgttaa

SEQ ID NO: 100848 - DNA, 1155 bp, Enterobacter aerogenes
ttggctaacgaattttggatcgccggagcaggatcaggtaaaacctataaaattatccaggacgctattaaggtgatagaggatggagggcgtgtattggtggttacctacactacgaacaaccaagccgagctccgttctcgtttcgtggaactatatggcaaaagcagtgatgattttgtcgtaaaaggcctattttccttttatctggaagacttagtgagaccctaccaaaatgtcgtgttccctgagcgcatttccaccacagcgttcaccgagcataaccctcacttgaggcctggtacgaataattggtatcccaataggggagaaaaaattggtggggctctaaacccactccactatctgaccccctgcaagacaaaagcatataccggcctactagctaagctggctaccaggatcgccagctcgacaaagaatgctcctgccaagaggttgaaagatatttatcatcgggtctttttcgatgaggttcaggatttagttggttgggattacgatgttatcaaagcgctaagtaaaataatgcctgacacgatttgctgtgtcggcgatttccgtcaaactatttacactactaccttcggccataaggcaccgcaaacacctgcgcaaaagatccactattttcagaagatgaattttgagcagcgctctcttccgagaaaccgcagatgtattcaaaaaatctgcgatctgtccgatacgattcatgcaggtctctatgaaaagactctgtcagaggtggaaaatgttcctgaagagatggtccatcattacggtgccttcgtcatcataccttcacaggtgagcgattatctcgccatgttcaaacctcaggttctgcgatggtcatcatccatggggagagcctatttgccgcctgacttggcctgtcacacctttggctccagcaaaggtctcggtttcgatcgtgtcctgattatttcaccggagaaacatctcaagtatctaggcggcgacctcagggtatttgacaacgataaaactgaggagtctagaaacaagctgtacgtggctattacccgagctcgttacagcttggcgtttgtcgttgaggaagagcatctagcagatatcaaactgccacgttgggttgggctcgtgtaa

SEQ ID NO: 100849 - DNA, 1659 bp, Enterobacter aerogenes
gtgcgcgttaaatctattaagttgaccaatttcaagaaattcaaagatgatcatcttgagttcaacgatgacgtaaacatctttgtaggcgataacaatgccggtaaaagtacgattctggaatccttggaaatagttcttaattacaactatcgtggccgtccctttaacagcgagttcacacctgatattttcaacaaggatgctgttcagcagttcttggcttcagacaaatcagccaagtatctgcctagcttgacgctcgaggcattcatcgacggagtgcctgaatatcgagggtcgaacaattccttgaaggtcgatgctcaagggatcacggtgcaagtgcgcttcgatgctacgcttgaggacgtgtatgctgactacttgcagacaaaacctaatattacaagcattccgatcgagttctacaagctggagtggttggatttcggatggaatcccattaaggctgtagccaagaaattcaaggcattgtacatcgatccgacacgcatccatccaactttgggtaagaaccagtacatctcgaccattttgaacactgctttgaacaaagaggagctggttaaactgactctcaattatcgcgagaaccagcaggtgttcaacaactcgggggaggtcaagatggtcaacactggcttagatactgaccacttgattacggacaaaaaactctccattgccgcgagtaccttgcctgccggatctatacagaccagtcttcaacttgaagtggatgacgtacctttccaattcatcggcaagggcgagcagagtaatgtgcaaatcaaactcgcgattcagaacaaatcgaaggatatcgacttagtgatgatggaagagcccgaaaaccatctttcgcacactaaccttaataagctggtgcactacatcgagaggcagcggggtaccaaacagctatttctaacaactcacagttcatatgttctcaacaagctgagcattgataaaatctgccttattcagtcgggatataagcgccttcataaccttgatcctaccgtcgtcaaaacccttaagcggttgccgggctatgataccttgcgtgtggcattgtcgcgcaaggtgatcctcgtagagggtccgtcggacgagctggtgctcaagaagatctacctccgcaaacacgaccgcctgccggagcaggacggaatagatatcattgtggtgcgcggagtcgggttcgatactttcatttccgtgggcatggagattggtaccagtatcaacgtgctccgggataacgatggagcctatgatgagaacgtcgtgaaggcccgtgactcctatgctgcctatcccaatatcaagctcatctcttctgcgaaaaatgaggagttttcgcttgagccagcgatgatttatgccaatgcatcagacttaaaaacgctgaatgctttcgctaaggaagtgttatccaaacagacctacaacctctatgcagaggttgctggcttgaacaaacggcgcgaatttctgattgaatggtttcgaagtgttagggggaacggtaagggcgctcgtaaagtcgattcggctatcaagctgtttgatgggaacctagatttcaagtatccggccttcctcgatgaggtattcaactttggctaa

SEQ ID NO: 100850 - DNA, 456 bp, Enterobacter aerogenes
atgggtgatgtggtaaacggttactggattctgcggggtattcagcagcaaattgaactggctaaggataatgagaataccctcactgaacgtttgatgctgatcaaagcccgcaccgatggcggagctcttgatgagactgatttcgaacgccagcgcagcgaactggccgcgacaatagcaaatctaatagagctgcagtcacagaaaggtgtggcgacaaaccagttgcttcttatgctgaatgaacaccccggtgcacttaaagatttgctccagtacaaatcagacagcctgttgccaggcgctttacctcaattagcactggggattcgttcggatgtcgccttaaactggcctgatatcatggcctgtttatatcgactgcttcaatatgcctacaggggtaaggtgacttcgagcctgcaagtggacactggtggatcggcgaggtaa

SEQ ID NO: 100851 - DNA, 1101 bp, Enterobacter aerogenes
atggccttagcacatttaatgcgtgacactttatcccttgttaagcgggatggaagcagaaccgatgggataaaggggagcgttcagaaggataagatatacattcatcgaagcgatattgctattggagaaggtgatcttcttatccgaagtatgccgcatggtggtgttgaagagtatgtcgttatcgagccaaatttcaggcagggattagggagtattcccgcaggttatcaggcagaggttagacgaacgacagaagcaactacgggacacgttatatcgtccacctcaacggcggttccggagtcagttatttccctagtgcagtcgtacattgcattatgtattaccatcgttaatgatgatgcatctcaccccgagaagcatgttactgcctatcattcattgcgccagaaaatccttgaactgaacaatgtcatgactatcccttcttggatacacttctcccaaactcctgcagcagtgaagaatagcgtgggtttaaacgtccagggaggcagtggtggatgggatagaagacgtcaatatttacagagtgaaatgatgaacatgctttcgagctacaataattcatcgttcgccggacattctgttagtataaataccattaaaaccactgaacaggttagtgggttaactacaatggcaagcgattcagtacgtaatgtaaaaaagaaagtcttcattgttcatgggcatgatgaacacttaaaaaatgaagtttttatctttctcagcaaagaagggttcgagcctgtcattcttcatcatgagataaatgaaggactgactattatagaaaaactggaaaagcatatcgatacggtttcatatgccgttgtgctttatactgcctgtgataagggcaaggccaaaaatgatgcggaattgagtgaccgggcacgacaaaatgttgtattcgaacacgggtggcttatttccaaactctcacgtaaaaatgtcgcggcgatcgtagaggaaggtgttgaatttcccggtgatctttcaggccttatcagaataccgaagtctgaatggaagtatcagctctcaaaagagttaagcgttatcagataa

SEQ ID NO: 100852 - DNA, 1131 bp, Enterobacter aerogenes
atggcatacaccagaaaccagcatgttctttcgcagtgggttctgcgaaactttcgtagtgatgacacggcactgatgccgaaggataaacagcgtgtctggtgtcatgtcgtggtgcccagtgcggaaggcgaaaatgacatcaaggatatcccgctacccatatccagcgtagccatctgtaaggactgttttcgtctgaaggatggtgatacaggtgagtttttcgatattgagcatgagctcagcgagtatgaacaggatatgtccgttcttgtccgggagcttgtgcagcatcatcaatttgcccgtctggcaaattgccatatacatgactttccagtggaaaaactgtcaagctttgctgttttacagatgatacttaaccttaataacccgcaaagtcgatttcctgacaaggataaagtaaaagcaacgttgataaaccctttgcttaataacattgacgaacatatatcagcagcgctttcacttcctgtaacacaacctgctcttgcctctgagcctatttaccaaaaactgatgcgcatcgctggttcctcatccgaagtggaggaaaaagcacatgccatgtttgttgtttattccttgctggctctgcaaaaaaaaccgacgcccgtaggaacagctgcctatttgagggacgagatattctccggtatttacggcattgatgtttttcataccggccatgaattaaacagcaccgaaccaagaccagtttttactgtttcccctaatgtattttgtcccttaattgatgagaaagtcatttatttaccactttctcataacttcgctctgcgatttaatcagcggtcggggaaaggtttctattcggatccgataatcaggatattcagcccagcccctcaggtcctttcctgtgaaaatcattctcaagtgagaatataccagtgctcctatgattacattgatcaggttatgtcaactatagatatgtttaacgtaggtttttcaaacattatatattcgagctggcagctcagcgatgttgaaaactatctgaggctgcaggacgaacatcctgatacctattatcttcccgaacagccggttcgctgggcagcggttgcggataaaatctga

SEQ ID NO: 100853 - DNA, 771 bp, Enterobacter aerogenes
atggaatacgtggcttttggtgatgagagtggtacgacaggaagtgaccgctgttatggcattggtttgctgtgtgtgcgtaaagacacgttgcacatcttcaatgagcgcgtccagaaattaaaagataagtacgggattgtcggtgagttgaagtggtccaagattaagaacagtgcagggcaggcaaacatctgcattgagctactggctatggtgctcaagaactcgtgctgcttccactcaattgttgtagttaagaacatttacaacaactggcagacggacagggagttggctttttaccagacgtacacaatgctcgttaagaacgttgctaagcagattaaaagtgacgttgaggtgatcatcgaccagaagattgataaatacaaaaagaacgatgaagtgacaggtattgttgctaacaacatgctggctagggcagggatgaagaagctggttaagtctgtgacgatgcacgactctaagcatcatcttggattacaggttgtcgacattctgaccggagctgtgaactctgggtacttgaagtaccttaatcctcggctagaactatcagtagctaaggagcttgcctttgaacgtatggctgctctgcttggctgggattttttccattacgatacattcccgaataaggattttaatatctggcatttcccgcaagagatgcgagctatgccgggttcaaagagtattcgacctgattacagcgttccattggttaatcgggaagagctgccctaa

SEQ ID NO: 100854 - DNA, 1059 bp, Enterobacter aerogenes
atggaaagtatcgcgctatacaactgggctacaagtgttttgtcttctattacagaagatttgaatgatcattactataaagaaattaatggcagtctcgctttacaatttgaaactacagatattgtgaacgctagagctttagtttactcagagcgtgatgaaccaccaaggcatgctatatcaatcacatataaattaatccgatcattatatgatgatgctgctgcttttgtagattatgttcactcgggtaaagatgatgaagcttatgatatgtggtttaacgggcaaaccaactttaccactttaagagatgagtgggataaaactaatttcactaaaaacatttttctagcaggtttgacatgggttttttttcatgagttaggacacttaactcagggccatttatttataaggaacaggtatagttccgatattaatgtaatgtctgaaattcacttaaataatttatcatcagacaataacgatgcatctgccatttggcacgcaacggaacttgcagccgattatttttccacatgcatgtgtgtagtagaaattgttcgacaacttgccattaatgaaaattgcgaattggcaatttgctttttgacatgtggtatatcattaatgttacatcgttttcaaggcgaaaaattttatgaggttcaaacagaaccagtaggtacacatcctaggccattcgtaaggcttgaaatgatcgtacctttaatttttgaattactttctattacaaacacagatcaacgtcgtagttatgtgcttgcaggtggtgaatcggccaacagggttggactgttctggataagaaagattggaataatggagggtattcctgaacattaccttatcgaaggtacattgaaccggcctggagttgttgagtatttgaggcatatcatttttatttgggatagcatttcatctgaaatctctgagatgttcacttttggcacaaaaaaaatgcttctcaacttcacgaatgtacttcggactgcaccagatttgaatgatggtacacaggaaaaataa

SEQ ID NO: 100855 - DNA, 645 bp, Enterobacter aerogenes
atgaaaagctatttaaaaggtgtttgggaatacttcgcgagtcacatgttgtttatgtatctcggctcagtctcttttgcatggattgatatctggttttttaaaaaaattgaaccatcaacaattactgcaacagtttcaacaataacacttggactagcgatttatgcattaacaagggtaaatgaatggattaaaaacaaaaaatcagaaaaggctttcgagagaactacattgttcatcgacagcatatttcgatcaaaggacttaaatcatcaatgttatcaatcacttatttctatacaaccaagaataaaaagtgagaaccccatactctacaagcatctcactacaagtgggagggagttactttccgagtcaaaagatttacgattcgaattagttgcaattcgggatagttttggtttgtggaaaatcaaaactaatcattcagaccttctaaataatctcattaccacctacactgctcttgttgcacaatttaatatcatttatattttaattgatgaattagagcgtggtgaaagggtagtttctgattcatcatgggatagttatatcggaatgatggcaagcgcttattcaaattaccataatcagttcgaaatattccaaaggttgtag

SEQ ID NO: 100856 - DNA, 864 bp, Enterobacter aerogenes
atgaaaaaacctgaaggtctgcagtcgctgcagaactcactttccagcttgccgcaatgggtgtctgaacgtgttctgcaccaggtaagccagttaaccggctatgagccagtgatcggcattatgggtaaaaccggagcgggaaagagcagcctgtgcaatgccctgtttgctggtgaggtgtcacagatcagcgatgtggcggcctgtacccgtgaacccctgcgctttcgcttgcaggttggcgagcgctttatgactattgtggacttgccaggtgtcggtgaaagcgaaagtcgtgatgcggaatatgccacgctgtaccggcaacagcttccccggctcgacctggtgctgtggttgatcaaggccgatgatcgagcgctggcggtggatgaacatttttaccgggaggtgattggtgaggtataccggcataaggtgttgtttgttatcagtcagtccgacaaggttgaacccaccagcggtggtgaaaagttgtctacagagcagaaacaaaatataagccgcaaaatctgtctgctgcatgagctgttccaacctgtaaaccctatctgtgtggtgtcggtacgtttgcagtgggggctgcgggtgatggctgaacggatgattcgttgcctgccacgggaggccagtagtccggtggcagtacagcttagtgctccacttcgtaccgatgccgttaataaaaaagcacgtgacgattttggtgaaacggtcggctcggtactggacacagtaagctccatacccctgataccggccccggttcggacaattatcctggctgtacgtgacactgtagtatcggtcgctcgtgctgtctggagttttttcttctga

SEQ ID NO: 100857 - DNA, 237 bp, Enterobacter aerogenes
atgtctgaatctcaaattttgccaccgggacctttcacccgacagcaggctgaagcggttacccaccggtatcgcaacatcaacattgaagacgaccagggcactcacttccgcctggtggttcgtgactctgaaggtcgaatggtctggcgggcgtggagctttgaaaccgatgccggtgaaggacttaaccactatatccgtcagtatggcatcctcagagcatcctcctgctga

SEQ ID NO: 100858 - DNA, 459 bp, Enterobacter aerogenes
atgacaacagcgacacaaaacaatctcgtatctgctaacgagtccgaatttgaactgaccgtaacgcaggtacctgacgaacagcgtatctgcttctggccgcagtactttggcactatcccgcagtggataacgctggaaccccgtattttctcctggatggaccgcttctgtgaggcctacagcggtggtatctggtccttttacaccctcagcaatggtggtgcgtttatggctcctgatgctgacaatgacgataaatggcgtctgttcaacagcatgaacggcaatggtgcgcaaatgagcgcggaagccgcaggtatcgctgtctgcctgattgaatacagtcatcatgcctgccgtacagagtgtgacgcaatgaccacgcactattaccgcctgcgggactatgccctgcagcatccagaagcccacgccattttgcgcatcatcgactga

SEQ ID NO: 100859 - DNA, 318 bp, Enterobacter aerogenes
atgagcaacatcacatggggcctgcagcgggatatcacgccacgtctgggagcccgtctggtgcaggagggcaaccggctgcattatctggctgaccgggccagcatcaccggtaagttcagtgacgccgaatgtcttaatctggatgtggcatttccacattttattagccagatagagtcgatgctgaccactggtgaacagaatccccgtcatgcccactgcgtcaccctgtaccacaacggttttacctgcgaagtcgataccctcggtagttgtggctacgtatacatcgccatttatcctactctgcgttaa

SEQ ID NO: 100860 - DNA, 321 bp, Enterobacter aerogenes
atgaaaactctacctgcaacgactttgtgggcagctaaaccatgcccgtcaccagtgatcgtatggcaaatgcttctttcacgcctgctggatcagcactatggcctgacactgaatgacacgccattcagtgatgaaactgtgattaaggaacatattgatgccggtatctctttagccgatgccgttaattttctggtggaaaaatacgaactggttcgcatcgatcgtaaggggtttagctggcaagaacagtcgccttttattactgctgtagacattctaaaagccagacgggctatgagggaaatgagaacttaa

SEQ ID NO: 100861 - DNA, 981 bp, Enterobacter aerogenes
atgtcgattaagaagctcgatgatggtcgctatatggtggacattagacctcgcggggcagcaggacgccgcatccgcaggacgtttgacagaaaggcagaagctaccgcgtttgagcaatacacgatagcgaacgccagccaaaaagaatgggctggtaagcgcgccgaccggcggcctttaagtgagttgctcgatgcctggtggcggtaccacgggcaaaatcatgaaaacggcaaaaaggaattcaatcaccttttgaagacaataagcggcctcggcgatcccgccgttagtcggttaagcaaaagagatttaatggattaccgctcaagccgtttgaatgccgggatcaaggcatcaacgattaatcgtgagatgtatcgattatccggcatgtttacgaagttaatacagattgaggaatttagcgggcagcatcctgttaacgggcttccaccactggcggaagaaaacccggaaatgacatttctggagcgagaagagatcagcagtttgttgaacgttctggagggggattatctgttagttgccctgctatgcctgagcactgggggaagatggtcagaggtcgccacactgaagcggtcgaatatcgtcaactgccgcgttactttcctgaagacaaaaaatgggaaaaaacggacggtgccaatctctgaagaactggaaaaaaaggtgaaaaaagaggccagtgggaagctgttcaaagtggattatgagaggttttgcaagatactgcgggaggtgaagccggatatcccggaaaaccaggcaacacatattctgcgccacacctttgcaagccatttcatgatgaacggcgggaatattattgcgctgcaacagatcctggggcatgcgaatattcagcaaacgatggtctatgcgcacctgtcgcctgactacctgcaaaacgcggtgacgttgaacccgttacaggggggaattgcggcataa

SEQ ID NO: 100862 - DNA, 294 bp, Enterobacter aerogenes
atgacctttgaagagaagctaaagctcatccgcagcgcggaagaaatcaatcaagcacaactttctgatatgacgggaatttctttaagcacgctgaaaaagattgaggctgggtatcacgatcctggctggaatgttttaagcaaaatcacacaacacccccgcctccaaaaatacacgctatggctgatgactgacaaaaccgccccgcaggctggtcagatcgcaccggccctcgcgcacattgggccagaatcaacggaatcagaccaatccgggaaacagactggctaa

SEQ ID NO: 100863 - DNA, 273 bp, Enterobacter aerogenes
atggaagcgagcgattacgcgatcaaatatccgcttgatgctgtccatgtggagaagttcgccgagctgatcggcaaaccaaagtccgccgtggaagaaatgatcaaggcaagaaagctgccggtgattgagctgcgcgacccaaccaaaccgaacgcccgcgcgggtgaacgctgggtgtatatccctgagttcaaccgtgcagtgcgtgaggcgtattacaaccgcccggtagaacagcgcgatgcctggttgctgtggatggggctttga

SEQ ID NO: 100864 - DNA, 888 bp, Enterobacter aerogenes
atgattaagtcaccgataaaatgggctggcggtaaaactcgcgtcatgccgcagctgctgaaacacctgcctaaagctgattgtctgattgagccatttgtaggcagcggaaccgtatttatgaatacggattaccgccgatatgtgctttgcgatagcaatctgaatttgatcaatttcttccgccaattgacagaccgaccagaagacacaatcgcagcgtgccgggaagtatttagcggcggaaatactgccgaagagttttataaacgccgggcagagtttaatgctctgggcgaaaaagctgattctgacccggacgccgcgatgtttcttgctgcgctttttttgtacctgaatcggcacggatacaacggactttatcgcgttaatctgaagggggaatttaacgttcctttcggtaagtttgcagcgccttatttccctgaaaaagaaatgcgtttatttgctgaaaaagctaatgacacaaaagccatttttatgcatagcgacttccgcctttcaatccgtgctgtcgtatacgccagcgatgatgctgtcatttattgcgacccgccgtacatcccggccagcgaaaccgccaatttcaccgcctacggcaagctatttaccctggacgatcatcgctccctggttacaaatctgctcaatgctaatcgccagttcggcacccgcgcggtgatatccaacagcgataccccggaaacccgcgagatctattccgctttcaatctccactccttcagcgttcgccgttctgttagtgccaaaagccgcgacatggccagtgaggtaattggcgttttacgcatgtgtgatggccgcgccatagctgatcagcaggagtctattgatgaacaagattga

SEQ ID NO: 100865 - DNA, 156 bp, Enterobacter aerogenes
atgaacgaacaaaccaattaccgccggttctggcgaaatcttgtgatctgctgtgcgctttgctcgctgctgttctggctcccgatgggctatctcgcctttcgtgttggctccgtggtgtgggaggcgctgtggtcgcttattacaacgaaatag

SEQ ID NO: 100866 - DNA, 1041 bp, Enterobacter aerogenes
gtggtcgcttattacaacgaaatagacccgttcgccgctcaatggctgcgcaaccttatcgacgccggtcatattgcgccaggcgtcgttgacactcgttcaattgaggatgtaaccccaaatgaccttacaggattcacccaagttcaccttttcgctggaattgcggggtggtcgctcgcgctacgtcgcgcgggatggcctgataacagacccgtttggacaggttcatgtccctgccaacctttcagcccagcaggcagaggcggcgggtttactgatgagcggcacctatggccctccatgcattggcttgtcggccagtgccgccctgtcgtggtctttggcgaacaatctggcagctctcacgcaaacaactggatcgaccttgtacaagctgacgtggaagcgctgggctatgccttcggggcggtcgcgtttccgtctgcgagcgtcggtgcgccgcaccagagagaccgctcttattgggtggccgacaccgactgcgagcaacaccaagaacgctatacggaatgccgaaagaataatggcgaggaaagatgctggcaggcaaagcaatttacaggacgtggtgaatcttgctgcatggccgacaccggccgcaacggatggcaaggggggatatcagggcgggaggatacgaaacggaaaattatcgacggacaggctcgatgtggctgcgcagcttgcgggttggccaacgccaaccacgagcaacgaccgctcaccatgtccgcaggaagctatgcggacgtatcgagacaatggaacaaagatacagaagaggttgcaggatgttgcggcgttgtgcggcccggcccggttaacggtttctggcgagatgctgactggcttcactgccaggatggaaagtggcggccagttagacccggatcattcccgctggctaatggggttccctccagagtgggaaggctgcgcgcctacggaaacgccatcaacattgaagcggcgacagcgttcataaaggcttatatggcggcggtggatcatgtctga

SEQ ID NO: 100867 - DNA, 216 bp, Enterobacter aerogenes
atgaaatcagcatatatcagttatttcgaagggtacgacgcaaaagggaatctgatctacaacgggaacggcgctgcaaccgtagagcacggcgatggtgaatgcatcgacccgtcagagcttaaagatcagcattgcgccttcctgctgaaaaaagccagagaaaccaacaatcttgtttcccggattgttatcaaaaaccttatgaaattgtga

SEQ ID NO: 100868 - DNA, 696 bp, Enterobacter aerogenes
atgagttatctgggaagtaaggcggccagcggtgtttatcaaaaaatcatcgctgaaatgccgccgcacgatacctacattgaaacgcatttaggcggcggcgcgatcatgctgcgtaaacctccggcaaaagtgaattgggggatcgatatcgacccgcaaaccgtcgaagcatttaaccagggcaaccctgattttctggataggctggcagatacgttgtttattgatgttggcgatgccgttgagtttttacgtcgtttcgattactcctctgccggtcgggtattgatttattccgatccgccataccttcatgaaacacgttccagttccgcgcgttatcgacatgaatacaccgttagcgatcatcaccgcctgcttcagtgcctctgctcgatgccagaaaacgtgagcgtaatcgtatccggatatccttcttctgtttatgacaacgctttgcagggctggcgctcgcgagagtttcaggccatgacgcgaggcggcgtgcgaacggagaaaatctggatgaactttccagaggggcgcgcgtactctcacactttcgcgggtaaagactacaatgatcgttaccgtataaagcggaaagcaaaccgttggaaaatgaagtttttggcccttccgcatgccgaacgtttggcgataatgcaggcgctttgcgaagtcgaggactaa

SEQ ID NO: 100869 - DNA, 216 bp, Enterobacter aerogenes
atgtcatttgcattcggattgtcattatccggggctatgttcagttcgaaagagcgactgaccaaggctctgaaggacaacaaaaacagttacaccattagtcgtgatggctatgtatctcttgacctcaacaaaaaagaggttgtagatgcaatcactcgccagattgagaagctcggcgatatcaaggaagagtctggaaagaaaggtgaatga

SEQ ID NO: 100870 - DNA, 834 bp, Enterobacter aerogenes
atgaatacaatcattctcgccgtcgttttgattagtggctacctctacgtaactagatctgtttcagctcgatataaatttaagcgttccgaaggttgggacgcttatttttatgttgcagcgtggggcgtcttgtttaccctcgttgcttggcttttgtgctcgtttatcagtgtgctaggtatctttcgctggatttatggcttcctgctgtcgcatgacttcatcgcggaaagcactatcaagcgtgtttttcccctatcccccgcagagcaatttaaattcgcagatctgaaatttgcagtttttggcgtgacgtcaatgttgttagcttgggcggcagggcgtggcatgaggtggcatgtctgccgtaatgctgacagaaggattgatgcgctggttaaagccgtacatcatgaccctttggaaagccttctcattgaagcagccgttagaaaaatgccagtaatcatcacactaggttcgcggaaattctatgttgggatagttgattgtcctcaatttgagcatggtaaaactgattacttgcagatgttaccgctgcttagtggttatcgtgataaagatactctgacagtgaacgtaaccacgaactacaagcggcactatatggatagcggtattctcggcggcgccggggatggtcagattacactcgcagacttcaggacgctggttcctaaagatgagatagaagggatatcattcttcgataccgatacttactcgcaattcaaagcaaaagaagaggcggacaaaatcggttccactatgttatccccggcgtttgttcccagaaaaaacgggagttaa

SEQ ID NO: 100871 - DNA, 564 bp, Enterobacter aerogenes
atgcgtggcgccgaagctgccacggcgaagctgtccggaatcacggtagccattcgcacgctgtggacgccggcggcatgcccggttgatttattgccgtatctggcgtgggcgctgtcggttgatcggtgggataagaactggccggcagagaaaaaaatagcgtcaatccagcaatcttactggcttcatcgccggaagggtacgcgcgcagccgtgcggcgagtgatcgaagatatgggtttttccgcgacgtttgcggaatggttcgatgtcggagatgaaccgggcacgttccggcttgagattgatgtaaatgatgttggccttacaccaaaaacactggatgaactgaatcgcctgatcgatggcgccaggccagttagtcgccacatttcacaactaactctgtcaacgagcaccagagggacggcatttgtgggggccgcaattgtcgagggcggaattattaccgtatacccggaagggtatgagccggacgacagcattcattatgacgggcaggcaaattatgacggcaattattattactccgggaattaa

SEQ ID NO: 100872 - DNA, 1992 bp, Enterobacter aerogenes
atgagtgaaataaacgaaatacaacaatgggaagacggcattccatttattacccgcagtgataaggttgaaggtggcaatgcaggcaagattaatattcagactcgcattctggcgaatcgcacgcgctacctgaaaaatcagcttgaggcttataacggactggtgaaatcaggagaactgccattttccgattttgaaacggctcaggaatttattgatgccggtaagatccccgcaggcagtttgttttctgttcgctctgataacccggattattgggtggatgagtgcattaatcagaatggtaaggctgttgccacaggcaagcatttgctttcagagtcagctattaccgcgcgcattaatatggatgataacggtaatattaccttccacaaggatgcggatggggtgaaccttattgccgttgatgattcgggtggtatgcatcttgtcggcgtgagtgggacggttcaggatcgcctgaacaccgtgcaaaaaaatacatcaccggcgattctgcgtctcactgatgcggagaatgccgcatatgcttcagttgatgagtatggtcatttacggcttgcgggtatgcctgacagcctacaggagcggctcgcgggattaacaaaacgcgttgatgcaatgcgtaagcgccgtactattctggatgcccgtgagtgtggactgaatgccagaaccggagaagatgcaacacgtgcgctgcaacgtgggtatgactggctgtctggtgaaggcggcggatatctttacacgcctccgggacatttcaaactcccgcaacctgtcgtaccgcgctcgggcgtttcgcttgtcggcgctggtcaggcttcaactatatttttgccaatggggtatttgccagcctttcagtaccgggggaaggaaacggacactgcgcccgagatatatgttgaaaatatccagttctgtgattttaccgttgatggtgagaatcagcagctgcatccaacgcgtggttatattcccgatattaaaggcatcttcctgcaatattaccgcaatgctgtctttgaccgcctgaccatccgtaataccggtgcaacagggtttggtgtggatatgccggatcgcgtttttgtctgtgatttcacggtggaaaattgtggcaggctggcgcaggtgggtgagcttggcgcttctggttttggtcttggaaccagcttcctcagcagtgagccgatttttctggcgagaattctgggtatcggaaataaaaacttcggtatcttttttgaaccgcagcgcggcggcggtacggcgcaggatgccattgtgtcaggggcaaccttcatcggcaattatgcggggatggctgattgcggaattgagggcttgattgcatccgatgtgaatctgcgcggcaatcagattggtttcctggctgatgtgggaaccaataacggcgggcgtccggggcatcgcggaaaactgcataactttattatcaaggataacgttaagcacggtatgcaatttgattcctcaaagaatgaaaatcttatcggggaatacgccattacgggggcgcatatttccggtaatggtgaggacggaattaacgttcgctactcacaggaagtgaccaattcagggctgcgcgtttctgattgcgatattaatgctaatggtcgtcatggtgtcaactttgaggcgggcccggttgtcaatgcgcatatcactaacagccgtttctggaataacggcagactggtacccggcaacggaattaacagtaatcgcagcgtgaagaaaagccgttttgcgatgaacagcttttacgactttcaggatattcctacgcagcaatatcccgtttctgtcagcggcgatatggaggatgtggatatttcctttaaccatggtgcgggtaatgcatttaaccgctttaatctgaccgggaagcaaacccgggtgactaagatttcaaatccggggatcgaataa

SEQ ID NO: 100873 - DNA, 1422 bp, Enterobacter aerogenes
atggcgacaaatattcagggcaatatgaaatataagggccgtttaagcctgctaccgtcagcgaatgccccgctgccggaaggggctaacctcttcgctgattttgccggggggagatatgtcattcagcacgtcagcggaaatgttatccgatcatcacagctaaccgatattctgtcgtttacccgcgccacgacggcaacccgcattgcagagagcgggctgattgaatatatccagtccaatgagcctgcaattgattatcaccccataaccggtgaatgtctgggactgcggattgaatatgcgtcgtggaatcgcattgaatggagccaggattttaccaagattgcgagctgggcggcgtcgggtgtggcgcttacgccaggggctacaatagcgccggatggaaacaaaacagcgaccaaactgattgaggctacggattcccagccagctccccgccagttggttgcgaccaccacgaccgacgccatcaaaggttcgccgtacactttcagtatttttgcgaaggccaataccgccagtgtgctccagattgcggcaacgggtgcactccaggccacggcttacgctaactttgacctgattaacgggaggattggtaaaacctcgccaggttcatcaaccagcggattattgcaggttactattgagccgttcaggtatggctggtatcgctgtgcgattaccatcacgccttatactggtgaacagccaaaatttaccctggcattaacggaaagcgacaccagtgcggggccgctcccgtcatatctgcccgttacgccgaagtctgtctttatctggggggcgcagcctgagcgagcagatggtgcgtcgtcatatatcccgacgaatggcgccgaagcgcaacgcgccagtgatatttgcaccacgtcaacgctgaccaaattcgttaccccggaggccggaacagtacagatttctgttgtgcatcctcacagcctgaaaaatctgactgaaaagtatggctcgttgtcctgtgcggcggtgctcgataatagtgtggtcgggccgcatatccgtttcgcgtacaggccgccaaatgccgggggaaatgagggcgcggtgctgggtgtgactcctgattcatcgggcactgcgcagaatctggagataccttccatggctgcggtgcgggacagtgaacagacgtgcattttttcctttgattctgcttcgctgaaaacccggctttttgatggctataactggtatgagcgtagcgtaacagcgatgccgccggagcttaaccggctttgtgtagggcgtgcttatctggattcaactaactacctcaagggctatatcaaaaaaatcgtttactggccttccgcgctgagtgaatcggcgatggaagaaatgctctctctttaa

SEQ ID NO: 100874 - DNA, 1038 bp, Enterobacter aerogenes
atggcgaaaagattttatacgcgactgactgccgccggagaacagaggctggcagaggccgcggtttcaggtgcgccggtaaatatcacacagatggcggtaggggatggtaacggcagtgtgcctgaaccggcaaaccgggaagatctgcttaacgaggtttatcgtgctccgttgaatcgcctggtgatagcagaccaggcggcaaatgttatccgtgctgaaatgctgatcctgccgcaaaccggcgggttctggatgcgtgaggccgcgctttatgatgatgacggggtatgccttgcggtggcgaacctgccggagtcatataaaccgaaacttgcggaaggctccgggcggttgcacgcggtaaacgtctggatagcgataagtagcactgagaacgtgcagctgattgctgagccatcagtcatcatggcgacggtggatgagattgaacgggctaaaaatgaagtaaaggattacgtggatcagcttcttggtgacactattacagcggcaaagcgtgatttctgggaagaagacaacccgccgggaactgtgcgcttctttgctcaaaatgtcgatccaaatgaaaaatggccgtggtcgaaatggacttacaccggcgagaataaaacaatccgtgtcggcaaggctgacggttcggacgtcggaagcaatggcgggcaagatgaaattactcttacaggggaacacttaccgccacaccggcacggggtaaagggaaaaaccaaatctttccattttgaacggattgaaaccgaagaggcgggggagcacgaccatgaatttccgttgaccggggacgccagtaatacgggcatggctgatggtggtgatccggcaaaacaagatggcactcagagaacgtcaacacaaccagcacaccggcatggtgtcaacatccctgatcatgagcatgaaattgactttgaatcagagagcacggggggagggaagtcattcagtatcgttgaagctcacaccctgctgatgtgctgggctcgggtggcatag

SEQ ID NO: 100875 - DNA, 285 bp, Enterobacter aerogenes
atgtgctggtttctctatcttattcgaaccgctgataaccgcctgtataccggcatcaccaccgatgtcccacgccgctttcttcagcatcaggaaggcaaaggagcgaaagcgctgcgcggcaaaggcgaactggcgctggcgtttagtcagaaagttggtgaccactcactcgctctgcggctggagtatcgcatcaagcagctaacgaagcgccagaaagagcgcctcgttgccggggatggttcgttcgagaccctgctggaggggctcagaaacgattga

SEQ ID NO: 100876 - DNA, 474 bp, Enterobacter aerogenes
ttgaaaggccgttttttatttgctgtaactttgctcgcttcgagcgtttcctgcgcatttgctgccgctgatttgcccgtcaccgtgacgccgccatcgatccaggccggttcctgggtgctgatggactacaccaccggtcaaatcctgaccgccggtaatgaacaccaacagcgtaaccccgccagcctgaccaaactgatgaccggttacgttgtcgaccgcgccatcgacagccatcgcattacctttgatgatatggtcaccgtcggtaaggatgcctgggccaagggcaatccggtgtttaacggttcttcgctgatgttccttaaagcgggcgatcgggttagcgttcgcgatcttagccgcgggctgatcgtcgattccggtaatgacgcctgcgtcgcgctcgctgactatgtcgccggcggccaaccgcaatttgtcgcgttgatgaatagctacgttgaataa

SEQ ID NO: 100877 - DNA, 726 bp, Enterobacter aerogenes
ttgaagcttgatatgcactgtcatttggatctttataaagatccaagtgatattatccaaaagtgtacagagaaaggactttatgtcctttctattacaactacacctaatgcctatattggcactcatcgactgtctgctaataacagtagaatcagaacggcattaggtcttcatcctgaactagcccatctaagacaccatgagttagatattttcgatattttactcccacaagctaaatatgttggagaaatcggacttgatggtgggaaagattataaagaacattcggaagtacagcttaaagtatttaaacatatacttaaaaaggtacataaccaaggtggcaggattatgtcaatacattcaaggggttgtgctgaagaggttgttgaacaacttaaaggaattgatggtattcctgtatttcattggtttacgggttcagaatctgaattaaggagcgctattgatattggtgcatggttctctgttggcccggcgatgttaaactctattaaaggacgaaggatattacaattgatacctaaagatagattattaactgaaactgatgggccattcgcaaaatatgctagtaaacggctattcccttgggatgtagatatagctattgaggggatttcgaaaatatggggatgtagctcagagtacgtagaatataaaatcgaagaaaacttcaggaatatccttcagttatga

SEQ ID NO: 100878 - DNA, 1341 bp, Enterobacter aerogenes
atgaatatttatgttgaatatgaacatgcaaaactaccattggcagatgaaaaaactgtttctgtgcagatttattcgcgtgatggtgtagttattaaaaatggcattaagcctagagatgatattgcaactataggtaagccaatatttgatgctataaaaagactgggagtaagtatatcagatgaagttatggactttttaactatctctcttgcagtaactgctgccgatacatttattataagagataattgttttgatggctggacaagaaatataaatctatttgtttcattaaataacccagtaatttgggaaaaaaacaaaccacttttagaaaaagctttacaatttttgagtggtgatgtatggaatttcaattttaaaggagatggccctaagccaccgcaaccattcaaagctgttaatgggcgaaaattgattaatttagaggggttagattgtgtgtcattattttctggaggtcttgacagtgctataggtgttatagattttttatcttcgggaagaaaacctttgctaatcagccattcgtataaaggggataaaactaaacaagatcaaatagcccataaaattcgtgagaagggcaccttttcaagacttcgttcaagtgccaaccctattggcagggggatgacaagagacattactatgagaacgcgaagtttaaacttcttagcgtttgcacttgtaggtgcatatgcggtaaaacagattaataatcataaagatctatcaatatttgttcctgaaaatggttttatctctttgaatgcaccattaacgcatcggagagttggctcacttagtacccggacaacacatccgtatttcattggaatgattcaagaactttttaataatcttggcttcggtgtaatattgattaacccttatcaattcatgaccaagggtcaaatggttagtaattgtaaagattctaagatgctttctgaaattgtggatctaaccgtttcatgtagtcattggaaaagaaaaaatcaacagtgtggatattgtgttccatgtatgattagaagagcagctttaatgaaaggtactctaaaagaatctataagttatcatcatgcctcatatccaaccctacgtgattttgttaaaaacaaacaagatggtcgtgatgatgttatcgcggtatcagtagccttagataaatctaaaaaaataaatttgaaatcatgggtattaaagtcgggaaagcttaaatttgaggatcttgataagtatgaacaagtgttttcagatggcttacttgaagttgaagacttcttgaaaaaggaaaaggtgatttga

SEQ ID NO: 100879 - DNA, 744 bp, Enterobacter aerogenes
atgggtacatctcagtcaagtaaaggtcctaaaaatggaaacgaacttgtaccaccttgggctgatcaaacaaaaaatgggacaaaccaaaacctaagtggatttagaactttatttggtagatttgctcgtaatagagattccgtcgcattgaaaggggctttgtctcgttatgcaagacaagtaacgggcggttctgaatcagttaatgctcgtttaggaaatattataggcgctggtggggggttatttgaattattgaatgaaggtattaccaatgattctggtatgaagccactggtagatcttgacagtcttaaaggactaccctgcgaagatgtgattgctaaaatatcacattcattgtctgatggtagtgaagatgcagacaaaatacaaaccgccatgaatgatgcgttagttgaagcattgaacggtaaatccacctttgacccatccgatataacagacgatgtgattattgagacaatgatttgttatttgactgacagtatttttttgcagattactatggatgcaggtaaagcatggaataatgctcaaaatgcaaaagaattacaggtggctgaaaattctttgcatgagttgattagtgcgactgtagacaatatcatggaaccaaaattaagtaaaaatataagatctttttcaaaagctgattttataattatccaaaaggatgttatcacagaagtttggaatgaatggaaaggatatgaataa

SEQ ID NO: 100880 - DNA, 1038 bp, Enterobacter aerogenes
atgatacgaacttcggtttctgaatactttaaaggtacatctgcaagacaccatattgattatttggataaacttattcaggtacctataagagtgccgagaacaggtcttctggagattagatcatatctttttttactccatgcagtaaatgcaggaatagaggaagatttaattgaagatctacgactggctttagagaaatctttacaagagtcatggcatgaagatccgatgaagaaagaagatgctcttaaggttctaaaatgtgaaggaaacatagagttagctattgcttttgatcaagttgatcgaatcgcacctattttcgcaacatctcctataatccatggaaatccacgtattgtaaaaagattactcaacatagttaagatgagatcaaatattgctaagagaagaaagatttcgcttgatgaaaatgttataacaaaacttgttatatttgaacgttgtgctggcgaggaagccgcaaatgcactctattccatgatcgatacaaataaaaatttcaaaaagataattagtgaattagaaagtaaaaaattagatgaacttcctgattcagtgccttctgtatggaggaaagatgatacaacaagtgattttattcttaaatggcttgagcttgaaccaaagttaagtgataaggatttacgtgcggccgtatatctttctcgtgagactatgcctgcgggacattatgttcttggtctttcgccaaaagcaagggaggcattgaatattttggtagcaaccaaaagaaaaagttcacaagcggcttcgagagctttgaaagatatttctaatgaagaattcattccggtaatggaagggataattgaacatcttagaaatataactgaatggagcagccagccagatggttttgctggagccatattaatcgctgacaataatatagatgcagctaaaatacttaaaagattcatcgctggtatcaatgaacaacctcattggatgaatatgcttataaaagacaaaacatggaataaataa

SEQ ID NO: 100881 - DNA, 342 bp, Enterobacter aerogenes
atgaaaaacgaacagtatgattacaatgagttatatgaacttctgagagcttattatattgatacttttccctaccctcatgaatttaaaaccatttattttttaaatttcctgtcgcggaaagaaagatgcaaaggaatcttctatgaagaaaataatacattaacttttaaagaagatggtcttcactggatgaatgataagttcaatgacgcagaatttgtagcaaaaatagctttagatagtgagactttcaataattggttaacagatgaaggttacataaaaaataatacggcaaccgataaattcgttaaacaaagagtattgataaaccaatag

SEQ ID NO: 100882 - DNA, 369 bp, Enterobacter aerogenes
atgctaatcaaagttcggtcattagatgaaaatggtaacacctccctttatcaccaacttgaaatcaatggtgaagcatttagtgatttcgttaagtcaagggaaaaagagacgaaggagaaaggtgctgaatgggcaatgggaggcattaccgtttttgcaaaagaaatattaaagcttgtcaaaaaccaagggagtgaacgtgatattgagatggagtttaccaacttaactatgatggcttggttgattgattccatctggggaggaatatcgtacaaaaaattgctgaaatgtgatttcgacttcgttgtacatccagatggcaccgttatttataaccgagaagaaaagcaatcaagaatataa

SEQ ID NO: 100883 - DNA, 243 bp, Enterobacter aerogenes
atgaaagtcatttcttttgttaaatctaaaattgctgtggcttcaaccgcgctttttgtttctgcaagttgttttgctgctgatggcgcaacgggtagcactgactatgcaggtcaggcaatggattcactgctgactcaggcaaacgatcttattgctaaagtatggcctgttgttgtcgctgtcgttggtgcgggtcttgccattcgtttgtttaaaaagttctcttccaaagcagtttaa

SEQ ID NO: 100884 - DNA, 1230 bp, Enterobacter aerogenes
atgaaaaggaaaatattaattatttccgctattcttatttcttctttttcacatgctgactcatgggaaagcattactaaatctacttttcaaagctctgcctattctgaaagtaaacaaataaccaaccaagatggtactaaacaaactgtttattatattgatgcagctatgcaggcttctgcctgtcagggggctaaagacagtgctcagggtgtttttactcaggttaaaccaacttatgagggagtatggcctaactctgaattccgtcttgtgttttctgacgcttgtacttacagcgactctccgggccagaaggataaatactggactttaaccgcttatattataggtgatattcaacgttctattcctgatgaaaaaccttccgagcctacgcctgaagagatttgtgaagctaaaccttccgaagaaggtgtatttaataatgtctattcttatgatggtgaacgttatatttattataacggttgtgaatatgaggccactggcgtcattgtttgccaaggtgatggtactgtttgtgctgcgatatggaagcctaccggaaccgtagccgatccttcagataagccttcttctcctgctggcgatggcggggatacggggggtggtgatactggaggcggtgatacaggcggtggtaactcaggtggcggttctggcggtggtaatggctcaagtattaccaaaggagatattcagtcagctatcgaaggtgcttcacctaaaattgccagtgagattcatgataagttaacagaaaaagacacctcatctgatgataaaaaatcggctgatgaacagactaaaaataatataaatcgtcttggtgactctataaataaccttactcgcggagccggacgttttgctgatccttctggcggtgattctcgttatgggaaaggggattctgaattagacagtgcttcaacattggctgaatccgaattaggaatagctaaagattctcatggtgctttatgggaagcattcctgaataaaggtgcaatgctccctaacttacctaatggcaatggttgttctgaatttgttattttccccggtgaaatttatcaggttgatattgaatgcgataaattactcactatcaaagatgcgctttcatggattttttattgccttaccttctggtatgtatttacgtctttaacttcattacttcgtaaaggaggtgagtaa

SEQ ID NO: 100885 - DNA, 342 bp, Enterobacter aerogenes
atgcctttattattaggtattcctgcactattgcgttttcttattggtcttgttcctttatttattggctatgtggcaagcttcctcgcacgccttgcgactaaaacaggattgatagccgtagcattagttgcattaattacaacaactgtcactctcttaatgcaatatcttgctgaggttatgtacaatggcctccctgctgatttttcacatttaattgcatctgtcttaccagaccattttcaggcctgtgttaatgtcattatggttactcgaattagcgtttttgttttcgacttaaaacaaaaattccttgattatgcaaacaaggtgatttga

SEQ ID NO: 100886 - DNA, 249 bp, Enterobacter aerogenes
atgtctgtaaaaagcagggtgcgcgatcgacttcccggtggtcgcctgaagtcttaccgtcgtgttggttcacattttaccagttgttccaggtggtttgataaatcaccgtcctggtatcgcaatatgatgatgacccggccagagcgccgtgaagtcagaaagcttctcaatcagattgtacgtggccgcgacgctgacggcatcgcatttccggtcagcaacaagccgtttgcatggtggtggtga

SEQ ID NO: 100887 - DNA, 519 bp, Enterobacter aerogenes
atgtggtctgatgttgaatcaagtgtagactatttgaactttggagaagtctcaagtttggctgtggatattttaaagtcaaataatatgcttccggtgtctattgggatctttggaaactggggggcaggcaagtcatcattattaaaaataatagaaaaacagatcagtgaagaagatggtgaagatattttagtagtaaactttgatgcttggctttatcagggttatgatgatgctagagctgctttattagaagtgattgcaataaaattgaatgaagcagctcaaggtgatgaaaatattgttaaaaggacattcaatctctttaatcgcgtagataaggtcagagctttaggtctaacaattgaaggcattgcactggcacatgggattccaactggtgggatagtttcacggggattaaacgcaattaaagatgtctttaataatggcatcaatgaaggtaattataaagagtctattgattcaggtaaggaaatagctaagattggataa

SEQ ID NO: 100888 - DNA, 618 bp, Enterobacter aerogenes
gtgctgaaggaagcaactgaaagcctgggggtgttgccagagactggtatggaaagggctaaaggcattgttctggtagaaggaaagtcggatgtcactttcctgaggcatgcggccagttcatttaaacaatcaggtgtgctgccagcctctcttgaggacgtgaaaattgtgccagtcctcataggaggatgcgggagcgtcaaacactgggttaccttaaatctggccaacgatctggggcttccctggtgcgtatttctggactccgatattgggggagaccctgcacaggttctgtccattcagaaacgtaaaaaagaagtggaggaagccggtaaggtattcttcgccacgcgcaaacgtgaaatagagaactatctctgcccggatctgatcgaagaaattaccggtgtagcagtcacgtttacggacacctgtgacgctaaaaaaataatcggccgggctgtgggaatgaaacccgataatgtgcttgataaattctggccccagatgacagcggaaagaataatctcaagatcaacctatcatgacggaacgcaggaaagaattgaactgattgagatcctgagcgacattatttccatgacgagataa

SEQ ID NO: 100889 - DNA, 543 bp, Enterobacter aerogenes
gtgtcacccaacaggctccagcgacagttcaatccggatgctcctgatgagcgttgggtaacggacataacctacatcaggacccacgaaggctggctgtatcttgccgttgttgttgatctgttctcacgcaaaattatcggctggtccatgcaatcccggatgacaaaggacattgtcctgaacgcactgctgatggctgtatggcggcgtaatcccgaaaaacaggtgctggttcattcggatcagggcagtcagtacacaagccatgagtggcagtcgttcctgaaatcacacggcctggagggtagcatgagccgtcgcggtaactgccatgataatgcggttgcagaaagttttttccagttgttgaaacgtgaacggataaagaaaaagatctacggaacgcgagaagaagcccgcagtgatatttttgattacatcgaaatgttttataacagtaagcgtcggcatggttctagcgaacagatgtcaccgacagaatatgaaaaacagtattatcaacggctcggaagtgtctag

SEQ ID NO: 100890 - DNA, 279 bp, Enterobacter aerogenes
atgagcggtaagcgttatcccgaagagtttaaaactgaagcagtcaaacaggttgttgatcgcggttattctgttgccagcgttgcaacacgtctcgatatcaccacccacagcctttatgcctggataaagaagtacggtccggattcttccactaataaagaacagtcagatgctcaggccgagatccgccgtctccagaaagagctgaaacgggttaccgacgaacgggacatattaaaaaaagctgcggcgtacttcgcaaagctgtccgactga

SEQ ID NO: 100891 - DNA, 618 bp, Enterobacter aerogenes
ttgtttatatttggatatcttcgtgcttcaactcaggaacaggatgcactgcgtgcaaaatcgaggctcaaggactttgctcaacaacacaatcatcgcattgctggctggtatgttgaaaatgcttcaggcgcagcattgcaccgaccggaactgatgagactgcttcaggatacagagccaggggatgcgatacttatagaacaagtagatcggctttcacgcctggatgataatggctgggaatctttaaaaaagatgattaatgagaaatcgctttcaataataagccttgatttgcctacaagtcacattgccctgtccacaccatcagcttatgactttactcatagtatgctccgggcagtgaataatatgatgctggacatgttagctgctatcgcccgtaaagattatgaagatcgtcgcagaaggcagatggaaggaattacagccgccaaggaaaaagggaaatacagggggaggctagcagataaggaaaaacatgagttaattagaacgcttcgcaagaaaaacggaaaatcaataaatgaaacggcaaggctcgccggcgtttcacgcatgacagttattcgagcatgtaaagatacggattga

SEQ ID NO: 100892 - DNA, 900 bp, Enterobacter aerogenes
atgtccagattcagtaaacagctgtgcaaacaacttgtcacacttgctcgtcagggaaggggaagttataaaactgtggctgaccgctcaagaattgcagaacgtttttctgaacgtctgtctgaactgaatattcagattagggacgtaaaacatatcaaaacttcccatattgaaaaatatattgagagcaggaaggcagacagtttgtctctcaggacgttacagaatgagatgtctgctatccgctctgttttattatcagcaggaagaaataaactggccgatcccaatcataccagcctgagtaatcaggccctgggaatttctggtgctaaccgggatggcactaaacttcctattacagatgaaaaacttaatgcggttgtgaattttgcgcttaaaaaagatgaaggtgttgcgctcgcggtacaactttcaagataccttggattgagaacagaagaaaccgtgcagtccgcaaagtcgttaaaaacatggaagcagtcattgattaacaataatgagcgtgtccgtgttgttttcgggactaaaggcgggcggccgagagaaacaacagttttcaatcgtgaaaaagttttatcaattcttgataaggcaattcattatgtcagtgaacataacggaaaactgattgataaaccttctctgcatactgcaatagatcgttaccgaaatattgtacgagaggcagggatgaatggtaaaaatgccccgcatagtttgcgttacgcttattcacgtgatgctgtaaatcatcatattaaaaatggaatgagccgcgacgaagctgaagcattagtatcgatggatttggggcatggagatggccgtggtcgttatattaaacaagtttattttcgcggtgaaacagaataa

SEQ ID NO: 100893 - DNA, 699 bp, Enterobacter aerogenes
gtgtttaatctcttgtcctatttccataataaatataaaggccgaattatagagtgtgacgaaactctggattacagagccaactttgagcatgcattaaaatttacaaaagggctgggctttaatgaaggttcaataacggatttgaaggatggtgaattggattatcataatatgatggcaaaagtgtgtcatgaagcagaagtggatagcttctctttttcagcagggcaatgtctcaagtggtgtcatttccttcagccatattttgaatccgcacttggctgtaaaatttggacgacagtcggtcaattatggaagggagataaatggctttataatcccacatatgatgaatttgaaaaatggtccaacaagggatttcagcccgaagatttttctgagacgcctgctctaaatcttcatgcctggtatacaacagatactggtcatttgattgatatttcatatctgagtactctttcaaatgtatttcctgattgccatgaatatactggaggtgtgctggtaggtaagccaaatgatatttttcctggctatcaatacgtacctatagtcgttgggcaaggtatagtagaaaaaattcaaagcaaatcttttataccttttcttgctaatgacgttgaggatctaatgtctgttggaatggtgatatatgcagaccctaacaatgaataa

SEQ ID NO: 100894 - DNA, 546 bp, Enterobacter aerogenes
atgaagggtctatatactattttaatactacctgttctcgtaacagcttgtagtatgaatgatatagcaactacaaaccagaaaatcagtgatggtgcctcaggaataatgaattccctgagaggtaactcctcaggaaatgatgagcagcgtatgaaagtatctccttcagaaaaaaaagaatcgacctctaaaagttatactgtaccagtagatgttgatactgcagcagcaagaattaaaaggaagtttaagtttatctctaatgatgaactgagatcaattagagaaaaaaataacgatggcgaatggactgccagcgcaattaccgatagtaatcaggaatgggatgcgatgactggaagttattataaaatgggctcagattggggcgactatgatgatcacctaactattgagctagaaaaaaatgggtcaggtagtcgtattcatataacgtacagttcttcttcaaagcaaagactcgcaagtagcggcttgcaggatttaatgcaaaatattaagaatgtagctgaagggaagtaa

SEQ ID NO: 100895 - DNA, 1035 bp, Enterobacter aerogenes
atgtcagacagagtgatgcctattttgcagttactgactccgcgtgtggaaatttacagtatcgatgaagctttttgtgatcttacgggtatgcgtaatctgttatcgcttgaggtgtttggccatcagatacgtgatcagattaagcgaagaacacatctgactgtgggagtgggaataggccctacaaaaacgctcgccaaactggctcagtatgcaagtaagcgctggcccgcaacgcgaggtgtggtagatctcagtgacagacagcgtcagcgtaagttaatggctttagtaccagttgaggaggtctggggtataggacggcggctgggtaaaaaattacagtttatgggcattaacaatgcacttcagctggctgagctgtcgccttcattcattcgtaaacagttctcagtagttgttgagcgcacggtcagagagctgaacggtattccttgcctcggtttagaagaatttactgccccaaaagaacaaatcatatgctcccgatcttttggagaaaaaccgtcggacgaagtcagcctgcatcaggccatttgcgctcatgctgaacgtgcagcagaaaaactccgtgcagagcatcaattttgtaaacgggtagcagttttcatcagtaccagccctttctcagaaaatgaggtgttttataagaatcaggcggtaacagagcttgctgtacccgctcaggattcacgggatatcattaacgcggctataaaggcatttgatacgatatttgtaccagggcaccgttatcatcgtgctggcgtgatgctcactgatttccgaagcgctgccgtatctcaattgaccctttttgatgactttcagcctcatcgtaacagcgaagagctgatgacattaatagacagcattaaccattcaggcaaaggctctgtttggtttgcagggcaaggtattaaagatgcatctatgggctggaagatgcgcagagaaaggctttcccccgccttcacgactaagctaagtgatataattaaagtgaagtga

SEQ ID NO: 100896 - DNA, 1281 bp, Enterobacter aerogenes
atgtccatgttcggcctggctgacgttaattcattctatgccagctgcgagacgctgttccgcccggacctgcgtggcagacctgtgctagtgctcagcaacaacgacggatgcgtcattgcacgctccgctggcgcaaaagcgcttggcatcaaaatgggtgcgccatggtttgaggtaaaaacacaggattatccggaaaaggtgcacgtgttcagctccaattacgcgctttatcacagcctcagccagagagtaatgaccgcgcttgaagagataacgccacgcgtcgagcagtacagcattgatgagatgtttctggatctcaccggtattgacggctgtgagaacttcgaaacttttggccgtcgcctgcgtgcgcatgtctttaccacaacgggtctcaccgtcggtatcggcatggggccgaccaaaacactggcaaaatcggcccagtgggcgggcaaggagtggaagcagtttcgcggcgtactggcgcttacgccaggtaatccgaaacgtactgaaaccctgctggctaaccagcccgttgaggaaatatggggcgtgggacggcgtatcggtaaacgactcaaccttatgggcatcgaaactgctctgcagctatcacgcgcgcgtccgaagttcattcgcgataacttttccgtggtgctggagcgcaccgtacgcgagctgaacggtgaatcatgtattccgctcgaagagctgccaccggcaaaacagcagattgtctgtagccgcagcttcggcgagcgaattacctcaaaagtcgctatgcagcaggcgctgtgtcagtacgctgcgcgcgcagcggaaaaactgcgcggggaacgtcagtactgtcgcaacatcggtgtgtttatccggacgtcgccacacgcaaacggtgaggttttttacgggaacagcgctggtgagaaactgacgctgccaacacaggacacgcgtgacattattgaatctgcgatgcgatcacttgaccgtatctggcttgagggtcgaaggtacatgaaagcaggtatcatgcttgataacttcactccaaacggtgtaagccagctcaatctgtttgaagataaccagccgcgggccaatagcgcacagctgatgaaggtactggatgatatcaaccagtccggaatgggaaatgtatggtttgcgggccagggcattaataccgaatggaaaatgaaacgtgaaatgctaagccctgcttggaccacgcgctggtctgacatacctaaagcgcgcgtgctttga

SEQ ID NO: 100897 - DNA, 441 bp, Enterobacter aerogenes
atgtttcacgcctttgagttgatgcacccggcggataatccgccgcccagctacaggccccttttcctggaacgcgtaccctgcggttttccctctccttgccaggactatgcggagcaggaactcgacttaaacgaatatctaatagcccacagggcaagcacctttttcctgcgcgcacagggcaacagcatgcaggatataggactttacgacggcgatctgctgatagtcgatcgggcactcaggcctgagcacggcgacgtggttatcgctgtactgtacggcgaatttacggtcaagcgccttcttattacccagaaagggccggtattgcagccgatgaatcccgcctatcctgttattatcccagacccggataccctggaaattttcggcgtagtggcgcacttcgtgcacactccgcgccggagaaactga

SEQ ID NO: 100898 - DNA, 900 bp, Enterobacter aerogenes
atggcaacactgaacctcgatcatctggctaccttcaggctggtcatcagccggggcagtttctcgggggcggcagaagtacttggcttgtcgcaaccggcagtgagcctgcagataagacagctggagcagacgcttaaggtcaggcttattgagcgaaccagccggggagtaagaccaacgactgccggtttgactctcgctgaacactgcatgaaaattgatgcggtggtaagcggagcggttgaagcggtttccctgcattcagacgaaataaccggcaccgttactgtcggcacaggcgcaacagcctgtatccatctgctacctcacttactgcagcaacttcgacagacccatcccctgctgaaggtggatgtacgcacaggcaatacttcagatattgtacggggagtggaggaaaaccgtatagatattggtctggtaacgctgccggcagccggtaaatgcctgagtgtcagcccgctgggtacggatgagtttgttgtaatcatggaaaaggacacctcggagcagagtgcaaaaccgctgtctcctgatacccttttgccactgccgctgattgtatttgaacccggaagtgccacacgcgatctgattgacggatggttcagcgatgcagggcatactgtcagcccggttatggagcttggcagtattgaagccattaaaaggatggttcgttccggcctgggttacagcatcgttccccgtatgtccgttgcaagtcatgaagaaaggcagggtctcagtctttactcagtaacgccatcgcttcaccggactctggggacagtgatgcgggaggatcggattgtcagcaggggcataagtgaagtactgaacagactaagtaagatctttcctgaatcaaaataa

SEQ ID NO: 100899 - DNA, 528 bp, Enterobacter aerogenes
atggaaataaccgaagcagatgaacgacatattcccgctatacaacagatttatgcttatcacgtattacacggcaccgccacttttgaaaccgaaccgccgggtgaggctgaaatggcagcccggctgaaaaaggtacatgcagcaggactgccctggttggtggcggttgacggaggaattgttcgaggatactgctatttgtctctataccgggaacggtgcgcctatcgctttactctggaagactctgtatatgttgatgccacgtatcaggggcggggcattggaaaaatgctgctatcccgtgcagtaggatgggcagaagcccgtggttttcggcaacttgtagcggtggtggggaacagtgaaaatactgcctcccttgctcttcaccgcgctgcaggcttcagcatcactggcaccctcaggtctgtaggattcaagcatgggcgctggctcgatacggttatcctgcagcgtacgctcgggcatggcgacgctacgcttccggaaagtacagaatga

SEQ ID NO: 100900 - DNA, 1233 bp, Enterobacter aerogenes
atgacacaaggatatctgacaggccgcaccattttctgcatcggcatgacgcagcttatcaactggggtattacgttctacatgccgggtgtcttcggagccgccatcatggcggaaacaggctggtcttccggtgagacattctccggcctgagcgttgccatgctcgttatggggctggtttcaccgcttatcggtcccgtaatggcccgtaccggtggacgcaccctgatgatggcgggaactttggctataaccatcgggtgttttctgatggcgtttacctattcaacattagcgtgggatgccgtctggatcctgacaggcgcgggcatgcggcttgctctgtatgacgccgcttttgccatgcttgtggaaaccgcaggcgcagaggctcgcaaggcaatctctctggtcaccctgctgggcggtctcgcgtcggccgctttctggcctgctggcgcagcgcttcttcacgtcaccgactggcggcatgccgtcatcatttatggctgtgcgggcctgctgagcctgttttttttaactgccgttccggcaggcagtcgggtaaaacttcccgtaacagggcgatccggccattcggctgacgcaacagcaacatcagaggacacaaaagcactcatcagcggcctgtggtatgccactctgatagcgttgataagctttgtctccaccggcgtgtccacacattttccccggatactggcctcttatggcgtgcctgctctggctggcatgctgtggggagtggggcagttaggtgcccgtctgctgggtgtagtttcaggtgcacgaatctccgcgatacgcctgaaccttataaccggtatcctgcttcccctctgttttctgaccggccttgcaggcagcattactcctgtggctacagcctttttcgttctgggctatggggccgtaaacggactgaatacgatcgtgaaggccgtacttcctcttgtgctgtttgatccgcagcagtacgcccgcaaaacaggaatactgatgtcgccggcattttttctcgcggcactggctccgtctgcgtatgccatactgctggagcgctacggtatacccggcacgctgcttttttccttcatcctgaccctgatcattacggcgatttctgtggtcctctggcagcgtcattctggctctgttgtgcagaaccgggaccatggagcatctacccttcacgaaaaaaatgtttga

SEQ ID NO: 100901 - DNA, 354 bp, Enterobacter aerogenes
atgccgtcactgctgcccctgcaactttttaagaatctttctgacgaaacccggctcagcctggtgctgttgttgcgcgaaaaaggggagctttgcgtctgcgagcttgtatctatcctgaaagaaacacagccaaaaatatcgcggcacctggccctgctcagagagagtggactgcttatcgacaggcgcgacggcaagtggatccattaccggttatcgccacacatgcctgcgtgggcagcagcggtcattgagcaggcatatctgtgtcagcgggatgaaattcttcatctcagtcagcaggctgagcgtgataacgcaaccaccaacggcaaagctgtctgcatgtaa

SEQ ID NO: 100902 - DNA, 459 bp, Enterobacter aerogenes
atgaaaattggtgaactggcccgccaggcgggatgtcctgtagagacggtacgttattatgagcgagaggggcttctgcaggccgcattgcgggaccagactaataactaccgccattacgatagcgcacatctcgaaaggcttatgtttatccggcgctgccgggcgctcgatatgacccatgaagaaatccgggtgttgctgcaggcgcgcagccagccagacgcagactgcggtacggttaatgccctgataaatgaacatctgaaccacgttcaggcccgtattcgtgaactaaatatgctggaaaaacaactatttgagctccacagccactgcaatgccaaccgggcaacacgggactgcggtattctgcgcgaactggagcaggcagaagagcctgaggatatcgtgccggttatcactgcaggtcatctggccggaagccactcttactga

SEQ ID NO: 100903 - DNA, 2529 bp, Enterobacter aerogenes
atgccaccaaaaacgactcagaccacaccggcctgttgcagcaccgggagctgctgctcaacggacggcctgagccagatgtccgaaccggttgcagagcttccccgcaacgatgacgttcagacgcgtctgcgcatcatgcagatggactgcccgacggaggagacgctcctccgaaaaaaactggcaaaattacctgccgtcagcaatcttgaattcaatctgatacagagggtgcttaccgtgacccatacaccgcaggcgctggaaccggttctgcaggcggtgcgctcgctgggttttgacccggaaccgattgataaagcaatgcagcctgaaggcagctgctgctcaggccgtgaggcggaaaataccggcggttcctgctgctcgcctgcccctgtcacattcggtgagctgcagacgcagcaggtgaccgctgacggggtgcgtaccagtatcaggatcatgcagatggactgcccggttgaagagggcatgatccgtaaaaagctggacggcatgtcagccgtcaaggaactggatttcaatcttatgcagcgtgtactgacggtggttcacgcaccggatacgctggagccggttctggccgccattcgttctctgggctttgaacctgaacttcctgacagtaatggccggcacgcggtcactgaggaaaagaaaaaacactggtggccgctcgcgcttgccggtgtggcggcaatcgccgccgaagccatgcactgggcgggcatgccggaatggctggaagcggctcttgctctggctgccgttgcggcctgtggcctgtccacgtacaaaaaaggctggattgctcttcgcaacggcaacctgaatatcaacgccctgatgagtattgccgtcaccggggcgctggcgctcggacagtggcctgaagccgccatggtaatggtgctgttcacgattgcggaactgattgaagcgaaatctcttgatcgcgcccgcaatgccatcggctctctgatgaagctgacgcctgaaacggccacggttcagcaaccggacggctcctggaaagaaactgaggccaggtctgtatcccttaacagcgtggtcagggtaaaaccgggcgagcgtatcgctctcgacggcacggtggtccggggcaggaccgccattaatcaggcacctattaccggcgaaagtctgccggtggataaaggggaaggtgacccggtcttcgccgggacggtcaacggctccggtggctttgagtaccgtgtaacggccgctgccggaaataccacgctggcgcgtatcattcatgccgtggaggaagcgcagggggcaaaagcccctacgcagcgctttgttgatcgctttgcacaaatttatacccctgtggtgtttgctattgccgtcgcagttgccgttctcccaccgctgattgcaggtgaaagctggcaggagtggatttacaaggcgctggtgatgctggttatcgcctgcccctgtgcgctggtcatttccacgccagtgaccattgtcagtggcctgacggcagcagcccgccgggggatattgatcaagggcggcgtttatcttgaagaaggccgaaagctgaagtggctggcgctcgacaagaccggcaccctgacgcacggtaagccggtacagacggatgcgattatctataccggggtggcagaagatgaggggcgcagtctggctgtgagcctggcaggttactccgatcatccggtttcgcaggctgtatcggcggcatcagatggcattcagcgttatgaagtggaaaactttgaggctctgccaggccgcggcgtgcgcggcgtcatcaacggtcaaacctacagtctgggcaatctgaggctggctgaagaaacggtgcgctgtccggaagcggtcagggctgcactaacggaactggagaccgggggtaaaacggtcatcatgctctgtgacactcatcaggtgctagggctgtttgcggtggctgatacggtgaaggaaagcagccgcgaggcgataagtcagttgcatagtctgggtgttaaaacgctcatgctgaccggagacaatgcgcacactgcgcaggccattgccggtcaggttggtatcgatgaggcgcggggggatcaactgccggaagataaactgcgtgctgtagaaacatttacggcgcagggcacgaccggcatggtgggcgacggcatcaatgatgcaccggcgctggcccgcgccgatatcggctttgccatgggtgcaatgggcacggataccgccatcgagactgccgatgtggccctcatggatgatgatttgcgtaaaattccggcttttgtccgactctcccggcagacgtataacattctggttcagaatatcgttatggctattgggatcaaggcagtgttcctggccctgaccattgcaggtatggggaccatgtggatggccgtattcgcggatgtgggggcaagcctgcttgtcgtggcaaacggtctgcgcctgttgcgtaagtaa

SEQ ID NO: 100904 - DNA, 300 bp, Enterobacter aerogenes
atgaaaccgcgtaacatgattttattgctgatgctcgcagtcgtgtttccggcaacggctgcgcaggcagtacacggaaaccatgccggaatgtcaccgtcttctgaggcctatatggacggcatgaataatatgcacgaaggaatgataaaggccgtacaggacccggatgcagacagggcatttgccaggagcatgattgaacatcacaaaggagccattgccatggccgaaacggaactccgttatggtaaatcaccggcaatgcggaagatggctgaaagcattatcagcgcctag

SEQ ID NO: 100905 - DNA, 2127 bp, Enterobacter aerogenes
atgaaagcagaaacaggaattcataaaatttatgtccccttcaggcgttcagattatcagctgaataatgtgttaagcattgaagagcttgaggcattaagcacagggcacaaacgtatctctgctttgagcaagcaaggtccgctgtcatctttactgcggccacttcaggatattgccgcccgcagcggtacgagtgacagactcgtcaggattatcattcctgtcgtgctggcggaaatacaccggacaaggaaaccctgctggctgtgggattcggaaaagtggctgacgttgtgcctgcagcaccgttccggcaggccccttattgcggcatttgccttccatcttggcccgtttccctcaccgttcgacctgccgcatcatggtgctccgtcgttgtacgcctgtgccatctatggccgggacattttcattcaggaactcaaccggctgactgatacgcttgtctcgctgggatacaaacgacagaaccagaaaaacgccctgtcagccctgctgggcatactgatgatgatgaacaataatcctgagcttgaaagcttcacaactgaactcctgtggcgcgcgcagaattatcacgatcggggaatcgcacgaacagtaggcagagtttcacatgcgctggccgcaatgggcatcctcaaaagtgccgtacgtatgcgcaattaccgtgagtggcacgaaaaacccacagaaaatattgccacagagtgggtaacgtggtgccggcgctggagagaaacgtcggtgcttcggccccggtccagagagagccagtacagctttatcctccgctgcggtctgtggctcgcccgcgagcatccggaaattcgctcgccgtccgactggacaatggagatctgcgccagcttcattgctgcaatcggaagaatgaaggttgatgaactttcactgggtacagaacgtggggtgcgccgctctccacgttccggagagcccatgctgccaaattcccgtgccggtttcgtgtatgccgttcgtcgttttatgtttgactacgaactctgggaatggggacgtctgaaattcagtccggcccgccatctctccacacctgatacaccgctctttcgtcagggcgtcaatccgcgtgttattgatgatcctgtatggctgaaactggtctgggcaagcctgaatctgcgtcaggaagatttgctcagtgaaattcactaccccctctctatgctgcaggctatggcagtcatctggacgcatgcagggctgcgtcagaatgagctgatgcgcctgaccgctggctgcatcattccacaatcggaagatattaaccgggacgacggcagtaccattcctgccgggactctttgctatctgaacgtgccggccggcaagacatctaaagcctttgttaagccggtttctgcagtggtgaaaaagtatgtcgatatctggctggcagaacgaccagaagaacaggcagctctgacggatgaacgcaccggtgaaaaagtccgttttctgtttcagtaccggggcaaaccggtgggaagagacataataaaccgcaccgttattccggttctctgtgcccgggcaggagtgcctgaggaagacagccggggccccattaccagccacaggggacgcgcatcggccgtaactgccctggccagtgttcctcagggcatgtctttatacgagctgatgcagtggtcaggacactcttcgccgcaatccaccatgcattatattcgaatacgcccgacgcagcttgctgcctcttttgttaaagctgaccgggtagcgcacatgataagcgtgctgattgatcatgaccccgcagcaaccagcctcacgggacctgcgacatattatgatctgggcgactctttctgtactaatcccttctggagcagttgcccgcaccgtatggcatgcatcggatgtgattttaatctgccaaagagaagtgcaagaggactgttactggaaagtaaggcatcggtaaaacattatcttgaagaagtgccactgacgcccgatgagaaagaagtaatagaaggtgatgtggaaaaactgaacgccgctcttatgaaaacagatatcccacgtattctgtag

SEQ ID NO: 100906 - DNA, 978 bp, Enterobacter aerogenes
atgcattccgcatctgctcttctgctgactgagcagtggcttacaattctttcgaatttaggaagagccagcgcaactattaaagcctatcgaagtgccctgacgcatttttttgccttctgtgaaatacacgacattgctcctgaaagagcttcctttgaagacattgcaggatatatccgacctcagctccctgatatgccgtcgtccgttgcaagcgccacgctccagttgcgcctttcagctcttcgtctctggtatgactttctggtttatcaggatatttgcagtctcaacccgttaccccgttcgggtttgcctggtgccatttataccggacgcggcctgatcccacgtatcaaccgactccccgttattcccgatgacggggagtggctcaggttcctgaaacacgtttctgcagcgcctctgcgtgaccgactgatgcttgctctggcttattatggggcgctccgacgtactgaagtgacggctctgaggcttgaggacattgacctggctcatcgcctgatacgcatccgggcagaaacgacgaaaaacagacgggaaagaatggtctgctatagcgccgacgttgcgccggtactggcaaaccattttcaaaagctacggctggaaggctggtcaggcggtgctttgttccgttccgtctctgaccgtaattacggcgctcctctctctttctggagctggagtaaaaccgtacggaaatgggcggcagagactgatcagccagacatcaccacgcatacttttcgtcacctccggctgacgcatctggcacgggccggatggaaactgcatgaactggctacttatgcagggcacagggacccacgtacaacacaaatttatattcatctgtcgggaacggatatggctgcccgcatggctgctgccgtcgctgaaaccgaccgtaagattgcagggcttatctttcaggcgggagccgtgtga

SEQ ID NO: 100907 - DNA, 516 bp, Enterobacter aerogenes
atgccaattcctttagaacagacgatgtgttgggataaaagttcgcagaaaaattcagcaaacacaccggttttgatgatggcggcgatagccagacttacaggtagcaatccatcactggcatgtgttcctttgtttggcgatggggtttcatgtggtttcccttctcccgctcaggattatgttgaaaagcgtctttccctggatgacctttgtatccgctatccagaaagtacttacctggtgcgagcagaaggggattcgatgcgtaacgccggtatcagagatggagatttattaatagttgaatgtattcgtgaggccaagcacggtgatattgtcattgcagctgtaaatggagagtttacctgtaaacgactgcagttgttgccttctccagccctgttgccagctaatcccgcatattcagctatacccctgactgacgacatcgaaaccgttgtcttcggtgtggtacgccatcttgtgcattcattcaagtttaggggcgcttag

SEQ ID NO: 100908 - DNA, 1521 bp, Enterobacter aerogenes
atgacaacaaacagctatcttgagtattttctcacgctgctcggctgggtgatcaataacggcctgtggaatgtcctgctgagcaccgggctttttgtcctgccgctggcgtttaaggtggtggggatctggctcaaagtccgtgaagagggggaggatgaaggcaacaaggggatgctgtcgctgcctcgtatcgagaacgcgctgtatgccggattcctggtgatgattgcctgctgcgtaccgctgattaatgtcagcctcagtacgatgcagtacgacacaacccgggcaaagagctgtggtgtgtggacgccaaaagcgccggatgaaagcgggtatgccggcgtggtcaccagtctcaacgaccagacggccgcagcaccggtgtggtgggtgctgattcataaactctcgaaaggggtaacccaggcggccgtggcgaccattccctgccgccctgacatgcggcagatccgctttgaagtgcagcatacgcgtatcgacaacaaagcgctggcgcaggaactgcaggacttcaccaacgactgctattcggttgcgctgtatctgtggaagcaacaggatcagggccagacaaaggacaaaactacgctgcgtgatatcgaatggattggcagcagtacattcctgagccggtactatccttcgttgcagtccaaactgccccgggctgcgttcccatggtctgacagccgggacagtggccggcccaataccggaagaggaggctatcccacctgcagcgagtggtggagcagtacggacacaggactgaaagcgcgggtgaaagatcaggccgaccccgatatgtggctgcgtatctcggccgcaatgaaaatgtcaggctttaacgacagtgactatcaggaagccgtcatccgtcgtctggtaagcccggaaagcctgactgtctcacagaatggtcacgtgtatgccggctatggcggcaatgccgattttaccctggataatgccgcggcgcgcgtggcctccattggcggtacggccctcggcagtctggccgcgttcccggcgttcgatgcgatgcgacaggcgctgccaatggtgcaggccatcctgctgatggcaatatatgtcatgctgccgctgatcctggcatttgcggcctacgaattcaaaaccgttattacgctgacctttgtgatgtttgctcttaacttcctgacattctggtgggaactggcgcgctggctcgacagctggctgttaaccgcgttgtacagttcggatacacacagtcggttcaatatggcgggactgcagaacagctcagatgaccttattatgaatctggttatgggcactatgtttctggtacttcctgctgtttggttaggggcattatcatgggcaggagttaccatcgggaatgctttaagctcagcatatcagcaaggaacagcaaaagctgaaagctctggaggtaagttgggagaggctggagctaatgctgttgcaaataaagctatgaagtaa

SEQ ID NO: 100909 - DNA, 339 bp, Enterobacter aerogenes
atgcgtaataaaacgactgtcaggaaagtcttgacccgtgccggcttcttcctcgcctgtatggcgctgttcatggtggtctcactgatgatggctgacaccgccatgaaacatccgactgaagctgctgcattccggagctggatgcagtcgacgcgttacggctggctgatgtggcgactggcgctgtatgcgcttgttgcctggggcctctggaaaatccggcatgcgccgggttttcgggaggcataccggcggccgctgctgcgcatcagtgtggtcagtgtgctttttatcgcgttgtgtgagtacgcgatgtttaccggtccgggagcctga

SEQ ID NO: 100910 - DNA, 1464 bp, Enterobacter aerogenes
gtgaaaaaaacaccttcattttcagccgttcgcttaagcctgctgctgaccggctcactgctgactgtcctcccgggcgcgcacgcggccgatgatgacaataccatcctgggcatgtccctgccgcaggtgaacaacagcgccatcggttacggcaagtccgtcgatggtgcggtgtcggacaaactgttctacaccctcggcggcggctcggtcatttcccagccggccacgcgcggcaatatgcagaagctggggctgaataccggctggagcagtgacctgatgtgcggcaattttgatctgaaaaccacagtcggcaaccagctcaacggcgtcacatcaggctttaaaaacctgatgggcgacgtgattcagggggccaccggcgcggtggccagtctgccggcgatggtcattcagcgggctaaccccggtctgtatgacatgctcaccaacggcgtgcttcaggccaatgtgtcattcgacaaggcgcaactcaactgccagaacatggcgaaaaaaatgatggacttcagcgacagcagtaactggacgcagcaggccatgatggatgagtacaaatccatcgtaaacagcggtgatgctgacgcagttcgtgttgatgacgcaggtcgcaaggccagcggcgcgtcaggtagtaactgggttggcggccaaaaacgtgggggggcggggcagcccgcgatacgtgtcacccatgaccttgtcgctgccggctacaacatgatgaacggtctgcccgtcacgtctgattcgaccgtgggcgaaagcagctgtaacggtggcgcatgctctaaattcggcagcgcggaagaggcggcggccatgaccgtgaaggtgctgggcgatcgctcgatgcgcacctgtgccaacgcgagtgaatgtaccagcggtgatgcggatgaccagcccggtacgaccgttgccggcaccggttttgccccactgctggaagaggcaaccaaagccaacgctgagcagctggtcaggctcgtcaacggtacggaaaagcccacggccgcgaatctggcgaagctgaaaactggcggactgccggtgacggccggcgtgattaaagccctgcagcgtgatccggataacgcggccctaaccgcccgccttgcaggcgaactggccatgtctgacacggtggaaacggcgctgctgatgcgtcgcatgatggttaccggtatgtcggagccgaatgccgctgcccagccaaaggccattgataccgccggccagcgcattgaggcgctggatcgggaaatcgcggcgctgaaaaacgagatggagatgaagcgcgaactgtcacgtaattctgtgctgaccattatcgacagggagaatcagcgcgtcgaaaccaacccgcagacccagtccgatgacaataccgacagtcgcttcaaccagatggcagcgccgcagtcggctgaatga

SEQ ID NO: 100911 - DNA, 993 bp, Enterobacter aerogenes
gtgaatacaaaaccttcccgcatcagaaccacagtgtgctcgctggcggttgccacggtactgggtacggcaaccgcgccggcagctgttgcagcacttaacacggcgcagattattgccagcgccgtatcgcaaaactgtatcagctggcgtgtcagtggcatctgttactggctgttctgcaccccctttggctgcaaggtgcgcacgtcggtcaaagtcacccacttcattcctcaggcagtcgtttcgacctatgtcgcgccgggcggcaacccgtggcaggaaatggcgtttgtcagccagaccgccggcgggctggaaagtgccgtgaccagcgggctttccggtgtttctgccggaggagccaatccggcagacatgaaaaatcccggccagcgcaagtccgccgtgcgtttcaagtatgccgatgcgattggccacccggccacctccctgattggcggcagttttccgggctattcctgtgataccgcagccaccccgttaatgccttacttcctgagtacgctggattcggcggcctggcgcacgggcgtaccggagtccctgtatccggaagcgcttgtgcccggccagcgggaaatcggcagtcaggcagcagccaatatgtggggcaacatctatccccgttcggggtttatcagccagaccgatgatgacaaagcctctgccgtggtggcgcagcgtgtggcagacattatcacccgcgccgggcagccccatgtttatcaggtgctccagggcagccatcatgacgggtactggccaccgggcgaagtcacggaaaacaccggcacgcgcaatcacaaatggcagcggctggctccccacatgactcagtcatgtgccgtcttcccggacgggagctataccgccgcgagcgataacaatgaagcctttgcgttctggcagccctacagctgctgcaaaaagcgcgggcagaaatttttgggcagcactgatatctga

SEQ ID NO: 100912 - DNA, 399 bp, Enterobacter aerogenes
atgaaactgacctcacttgttttcctgccggctctgctgccggcatccgtactggccggcacggtcgtcttcaccgacagtcagcatctgccggcaaatctgccgccggacgtgccggtggtacttcttgatggtcctgaccaactgcaggccgagatgttcggggaactgcctgcagacccgcagcaggccgaagcacaggtcaggcaggttatggcatcatctgcctggcaacaaaaacagctgcagctgaatgattcctatcgccaggtggtccgggcctgggaactgggcattaaaaaagtgccggccgtggtgtttgatgaccgcgatgtggtgtacggcaccacggatgttgacgtggccacttccctgcgtaaccgggggggtggtcagtga

SEQ ID NO: 100913 - DNA, 660 bp, Enterobacter aerogenes
atgaatatcaggtatctgtatggaaaggagaagattcttggccccgttatccgcgacgaagctccgatacgactgtgtgacctgacgcattattcacgcatggaaaacgaaaaaatgcgcgataatgaaatggaaaaaattttcactccggatcgttatcaagttgctataaaaattaatgggcgcacccttaaccctgacgatatgactgcagatcccatgtttacgctatcgcctcgtcattgttattgtatatgtttgagtaatcggcaagatgagccagaactctatgctgcttttaaagctgatatctgcatcgcattcgacgttgatctcctccaagaaagactttctcttttagaccacagattcccgggtactgaaattaaagggaaagatgtgatctattatcatccaggaacggcaccagacagcttcactcctgaagaacttgttttttttaaaccaaatatattttctcatgaagcagagtataggattgcgctattttatcctctaaacaaaacagggtttgcatacgagggaggagttttacctttcaaaatggaaggtgaatcaatgttcatggatatttcccatcagcaaaaaggatttataagtgaatgcgttaagaaggttatgcgaaggaaatcttcttga

SEQ ID NO: 100914 - DNA, 378 bp, Enterobacter aerogenes
atgatgacactgaagtaccctgaacccgccattcatgagcacagtggcggtgcgcttttcaccctgtcgcctcagggggagcccggcttgctcccggcgacacatcagcatctggtgaggctgcgggcgatgctcaggcagcgcctgaccgggccggtcaaaatgacgtgtcacccgcaccgggtgggactcagcagcagcgtggccatctatcttgagggaaagctgaagcaggcggtgaatattcttatcaccgtgacgggacagacgagctggccgcaggaagaggagtatgcgcatccgcgctggtatatcacggtgccggattcggctgacctggtgtatctgatgctgtggattaacgggcttgacgtataa

SEQ ID NO: 100915 - DNA, 2859 bp, Enterobacter aerogenes
atgctttcactgtttacgcgtaataaatccaccgaccggcagacgccggttgatgacggccagtccgttcaggcagatgaaaccctgaccgcggccgtgaagggccggcaacctctgaagcgccccgggaaaatgacgcgccaggatgaggagaaggtttatcacgccaatccgtccatcattgactttttgccctgggcagaatttctcgatgaagagcagtgtctcctgcttgatgacggcgtgtcggtgggggccgtttatgatgtgacaccggtggcgaccgaagggcgaaccgaagagcgcctggagcagatccgggactcggttgaggatgcacttcaggacagctttgatgaacatgacgtgaatccctgggtcgtgcagttcttctgccaggacgaggacgacactgacgcgtacctggacaggctgcgcgggtatgtcaaaccacatgcacagcgcacggcgtttaccgacgcctggctgggtgaaatggagcgccatatccgcagtatctcccggcctgagggactttttactgactcgctgattaccggccagccgtggcgcgggcagcagcgccgcacccggatggttgtttatcgctggcttggtaaaagccgggatccgatgccgccggtggcgatgctcaatcaggtgtgtgaccgggtcgttaatgccctgggcggggcggggatccgctgcacccggcagaacggcctgcaggtgcatggctggctgctgcggctgttcaatccgtcaccggactgggtggagaaaaccacgctctatcggcaggctgcttacgcagacccgcgcgagacacctgaaggcaccgtgccggtcagcaatgattttgccgaaaccctgtggttcacgccgccggtttcagacccggaaaacggcgtgtggtggattgacaacaagccgcactgcgcggtggcggtggaaaaactgcgtacaccgccggagccgggcaccctgaccggcgagaaaagccggggtgaaaagaaaattaatgccctgatggatatgtttccggaagggaccatggtgtgcatgaccgtggtggtacagccccaggaccggcttgaagagcagtttaaccggctgtcgaaaaatgcggtcggtgagaataccgagtcgggccgcgtccgccaggatgtgaagacggtcaaagagtatctgggcaaccggcacaagctgtaccgggcggggatcaccttcctgctgcgcggcgacgacatgaccagcctgaagcgcaagcggctggagctgtccaccgtattgctaggggccggtctgcagccggtacggccggagtttgaagaaggtccgctgaacagctggctgcgggcgctgccgatgtgctttaacccggacagcgacaaaaaacactggtatacccgtctgacatgggttcagcacctggcaggacttttgccggtaaccgggcgggaaaccggcacggggcatcccggcttcagctttttcaaccgcggcggggatacccttacattcgatccgctcaacaagctcgaccgcacccagaacgcgcatctgctgttgttcggcccgaccggggcgggcaagtcggccacgctgtgtgccgcgctctcccagctgatggccgtccatcgtccgcggctgtttattgcggaggccggcaactcgttcggcctgctggccgacttctttgacagcctcgggctgacggtgaataaaatcagcgtcaaacccggaagcggcgtcagtctgccgccgtttgctgatgctcacaaactggtggaagaaggcctggccgcccaggccgtggatgagagcgacctgcctgatatcgacacggacgacgatggcgaggatgacaagcgtgacgttctcggtgaaatggaaatctccgcgcgcatgatgatcaccggcggcgacccgaaagaagaggctgaccttaagcgtgccgacagggcgatgatacgtgaggcgctgctgatggcggcacatgccacgtataaggaagggcggcagatgctgccgtctgacctgcagaaggcgctgtacgacattgcctctgacaacgatgagggcgtcatcaatgtccgcaatgctcagcgcaaggcgaaagcggcggaaatggcggaatccctgggcatgttcactcaggccgggagctttgaagcggagctgttcaaccgcgaaggggagctgtggccggaagcggacgtgacgctggtcgacctggggcatctggcgcgtgagggttacgaggcgcagatggccctgaccatggtctcgatgaccaacatgatcaacaacatcgcggagcgtgaccagttcctgggccgggatattgtcttcacggtggatgaggcgcatatcgtgacggtcaacccgctgctgtcgccctacatgacgaaggtggtcaagatgtggcgtaagctcggtgcctggctgtggctggccacccagaaccttaaagactacccggatattgccgaaaaaatgctgaacatggcggaatggtggatttgtctgaccatgcccccggaggaggtcaaagatatcagccgtttccgcgcgctcacgccggagcaggaatcggtgctgctttccgccagtaaactgtcggggtgttatacggaaggcgtggtgctggcgaaacggatcgaagcgctgtttcgtgccgtgccgcccagtctcttcctggcactgggcatgacggaaaaagaagagaaagccgaacgccgggcgctgatgaatgaatttcactgcagcgaactcgaggcggcaaaacgcgtcgcgcagaatctggaccgtctgcgcggtctgacggataaacaacaggagcctgccacggtatga

SEQ ID NO: 100916 - DNA, 411 bp, Enterobacter aerogenes
atgtacagaacggttttcattctggccctgagctgtgtaatgctcagcggctgctcaacctccaaagaggaaatgctgccggcgggcgataacaccatgcttgaactgtggaacggggcggacggtggcggcagtacttcccgccagtctgcggcggcccgcgacacgctgcgacgcccgctgacgggcagcgaaacgcaggcggacgcgcaggccgaccgcagctacagccgtactcaggaaagcgaaatcacccagcagtttccccggctgcccaaccccgacatggtgatgtacctgtatccccatctggcagacggtaacacgccggtgccgggttacagcactgtgttcccgttctacagccagacgcagtatgccatgcctggcgagcgcacggaggccctgtaa

SEQ ID NO: 100917 - DNA, 1500 bp, Enterobacter aerogenes
atgcagattaaatctaatgccctggtgaagtttatcgtgccggccgtggtgattgccgggctggccgtggggctcaaaagctgcaaaaacgaaccggcagaacaacctcaggcaaaacaaagcggctccctgaaaaacctctcgccggatgaactgaaggcgctgggggtggaaggcgacacgccggaggacaccctgcgcacgctcatcggccggctgaacgatgtgcgtgaccgccagaaaacgctggataagcagaacgcggatttggtgaaagaaaacgaacggttgcgccggcgcaatcaggacgtttcaggacaggtgaatgaggccgttaatggcctgcgcgagcagtacgacaagcggcaggctcagcttcagaacgaacaactgagcctgacggcgaaaatccaggagctgactgacaaactcaaaaagcctgacagcgagaaaaaaacggcggacagcgatatcccgctggggctgggactggacggcatgggcagcagcaccggggggagcgcttctcagggcagtgacggcatgatgtgggtcgcgccgacggaccagaaagagacggatccgcgggatgcggccagcggcaaagcctcacctcagttcccgacctcttttctgggggaaaatgagctgacccgccagaaagccgcctatgagcagaaagtgaagggacggacgaatgaaaaaggggcggaagagagcgccgagccggtttacacgctgccggaaaattccacgctggtcggcagccgcgccatgacggcactgcttggccgggtgcccatcaacggcaccgtgaccgatccttatccgttcaaggtgcttatcggtaaggataacctgacggcgaacggcatcgagttaccggacgtcgaaggggcgattgtttcggggacggccagcggcgactggacgctgtcctgcgtgcgcgggcaggttaacagcgtcacctttgttttttccgacggtacggtgcgcaccctccccagacccgacaccagtaacaacgccggcgggcaaaataataacgctcaggctaaacaggataccggcaccagtggcggtatcggttggatttcggatgaaaacgggatcccgtgcattggcggcgaacgtaagtccaacgcctccacctacctgcccaccatctttggcctgtcggctgccggtgcggcgggtgaagcgatgagccaggggcagtacacgacgcagaacaacgtgaatggcatttccgccaccatgaccggcgacgccggacaggcggcgctggggaaagccatttccggcggcatgtctgaaaccaccgactggatcaaacagcgttacgggatgacgtttgatgccatttatgtgccgcccggtgcccgtctcgccgtgcatatcacccgtcagctggccattgattatgaagataagggccgtaaggtgcgctacgacttcaccctgccgggtggcgtcagtgacaatggcggactggactga

SEQ ID NO: 100918 - DNA, 951 bp, Enterobacter aerogenes
atgagtaaaaacccccactaccgcgccgggctgatggcgctgtccttcgccctgctgcccctggcaatgctggtatcacgtcctgccggcgcagatgagctgatgaaatgggagcgtattccgctgcagatccccctgaaggtggggcaggagcgggtggtctttgtggacaaaaacgtccgcgtcggttttccgccggcgcttaacggtaaactccgggtgcagagcaccgggggagccgtctacctgaaagccgacagcgcctttccgcagacgcgggtgcagctgcaggatgtggaaagcggcgaggttctgctgtttgatatcgccgccggtgaaaaagggccgactgagccggtgcggctggtctacagcggtgatgtcagcacgctgagtcacgccggcgatgcggccggtcagccaggtggtgcagaccgggctgcttccggatcaggctcatctgctcccaccggcagcgatgatggtactcaggcaaagcgtaaaaaaatccgctacagcgcccccatcccggtgctgctgacccgatatgccgctcagagcctttatgctccggcacgtacggtcgaggcggtcccgggtattcatccggtcaatcctcatctgccccgacgtgtcagcacgctgtatccctctgaaccattaacggtcacgccgctggctggctggggtgtggcaaaccgcagcgtggtggcactcaggctcacgaacaccggcagccgtaaggtcgttctggatccacgctcgctgcagggacagtttgtgtccgccaccttccagcaccgctgggtcggtccggccggcacgcctgaagacaccaccacggtgtatgtggtgaccgccggtcgtccggagagcgcattcattgctgagccgtctgcactgcgtaaagcgacccgcacggtaaaacaggaggcccgccatgcagattaa

SEQ ID NO: 100919 - DNA, 660 bp, Enterobacter aerogenes
atgagccgttttcgccatgcggtaaaagaccgcgaccagcatattcagacgctgcgcatcgcctgcgccgtgcttgcctttttccttttattcacctgtgcaggctggatgctggcacccagcaagctgaccgtgcataacccgccggatttacgtaccggcagcacgcggccctggtgggaagtgccgcccccgacggtctactcctttgcgttctacatttttcagcagctcaatgcctggccgaaaaacggcgaggtggattattccgccaaaatcaatgcgctgtcgccgtatctgacgccgtcctgtcaggatttcctgaaagcggatgcaaagaaacgcggtgacgccggggagctcaccgaccgcgtgcgcgtggtgtatgaagtgcctggtcgcggttaccagtcacagagcgtgaccgtacaggatcgcgatcactggattgcccgcctggacgtggtggccgacgaatatttccatgccgagccggtcaaacgcgccctggtacgttacccgcttaaagtggtgcgctgggaaggtgatgcggagcgcaacccgttcgggctggcgctggactgttatgccggtgtgccccagcgtctggaggcggcaccgcctgcacctaaaccggagaagtcaggagtgtttcagtga

SEQ ID NO: 100920 - DNA, 357 bp, Enterobacter aerogenes
atgcagaccattcgttttttacctgaccgtctcaacagtgagcccgtggtatttcgcgggtttaccacccatgagatggggctggcagcccttgccggcgcgggtgcgggtctgctcctgtcactgccgtttatcccgcttgccggctgggttgtcgttcccaccggcctgctggtcatgccgctgctgctcgtctggttcggcggccgctggatggccaggctcaagcgcggtaagcccgagaactggctctggcagcgactggagacgaaaaaacgccggctggggatgggcaatccgaaactgattgtggatgcccggggctggtcagtgaaacgtaacaggagagcctcatga

SEQ ID NO: 100921 - DNA, 387 bp, Enterobacter aerogenes
atgcaccattctgagtctgttgttgcccgcctgcgccgtctcgccagtcgtacgctgacccgcgccggtacgcttgccctcctgggctggctcacctgcaaaccggcctttgcggacttgccaagcgttgaagcgcctgaatccggaggcggaagcgggctgtccggacaaatcaagggctacctgcaggacggcattgttatcggggggctggtcgtggcggccgttgcctttatcaacgttgccattgccgccctgcacaccttcaccgaagtccgcaatgagaaagccacctggaccaaattcggggccattgtggtggtgggtgtggtgctgctggttgccgttatctggctgctcggcaagtctgccgacattctgttgtag

SEQ ID NO: 100922 - DNA, 243 bp, Enterobacter aerogenes
atgcccatgacatccgaacaaacgaacgcgtttaaagccggctccggcagtcttgatgtgaacatccttcatctgctctgcatcggggcactgctggcatttctttttttatgggccgcgtgggcgctgtcggatgtctggaccggctggagtaacaccaaagtgcgggacgcggccctggggcgttttgccgtccgcaccgtgctgctgttgcttgtgtgtatctggatgtttgccagttaa

SEQ ID NO: 100923 - DNA, 348 bp, Enterobacter aerogenes
atgaactcaaatcgtccggccatgcggcgcaaccgtcgtgtcccgggcatcactggcctggtattgctgacctttctggcatcagctgctgcacaggcatccgagaaagacgagcttgcgtctgttcagcgtcagctggaccaggttcaggcgtcgcttgaacgggcccgcgtggcggctgcacaggccgacccggctgaccgtggccgctttttctttgattaccgtcaggccacatccgatctcaacaccatccgcagcggcattgaccgctatctggagccctcccgcgcgcaaccgcgtgacccgtcttatgtggccggtaattaccggcgggagcggccctga

SEQ ID NO: 100924 - DNA, 348 bp, Enterobacter aerogenes
atgatgaagactgttctgaaggccacgttaatcactgcactgattaccggccctgttcttgcggccgacggtactggcaaagtccaactttcagacctgcatttcgccacagcagcaaatggtttgcagcaaattgaaggcacgggaacaaacgtgtcaggtgggcctgtgaagactgtaattgtcaaattcaacttgcttcagaatggggcagtaataggaaatacggcagcgatggctgaaaatctggagccgggtcagcaatggaagctacaggcaccctacgacagcataaccaacaagccagacagcttcaaagtgacagaactgacggtatttaataactga

SEQ ID NO: 100925 - DNA, 759 bp, Enterobacter aerogenes
atggctgaggtaaaacgtcccccacagcagcagacgctgccggaacgcaagcacggcattctgtataatctgctctggggctggccatgggccctggtgggcgtggtgctgtcctcgctgctgctgagcctgctgattgaatatatcggcatcgccttcttctggccggaagccggggcggcgcacagtgaagcggtcatgaacaccgagctggggtggctgtccacagagttcacccgcagcctgctgctgtctgagccatcggtgacggttgtgcgctgggttagcaccgcgtatcagtgggcctttgtggacagtggcttccttgactgggtccggcagcagtatgcgcaccagatgcacagtgacaatgcagtcacgcgggaaatcaacagctggagcggctggcttgccggctacctgcgtgaatacctgctggccacggtatggataagcattatcacactggtacgcgtcaccatcctggtgctgtccgtcccgctgtttgtgctggtcgtggtggtggccctggttgaggggctggggcggcgtgatctgcggcgttacggggcggggtatgaaagttcttttgtctatcaccatgccaagaaactggtcaaaccggcagccgtggtgcccgccatgctgtacctttcctggcccactgcagtctaccccaatctgctgttgttgccggcggctgtcctgttgggtatcgccgtgaccgtgaccactgcctcattcaagaagtatctttaa

SEQ ID NO: 100926 - DNA, 2100 bp, Enterobacter aerogenes
atgagtaaccgttacgtcattgaggccctgctgcgtccggccgttgagctgaataccgccgtggtatcgggcatggcggcgtatgtctgtgtgcaggcaccctgggctgtcgctctggctccgtctgtcagctatgtcaccgcagccgggtttgcggcgctggccgtcacccgcacgcatcaggggatgaagattattcgctaccgccggaatctccgccgcctgccgcgctatgtcatgagtactaaacagatccccgtcagtcatcgtcgcctgtttctaggccgggggttccgctggacgcagaaacacacccagcggctgcaggatacgttgcgccctgaagtggcccgttacctgcagccaaaccgcttttacctgggggcgcgtcagctcgaaatgatgacagagcaccgtctgccctggctgggtaagctgctgagtgccgatacgccgctgaacccggtgcggccattaccaccggtgggcggcaatccggcgctgcacggcatcgagcccgacgaaaaagacgtcaccctggctctgggggagcgcgttggccatacggtggtgtacggcaccacgcgcgtcgggaagacccggctggcagagctgctggtcacccaggatatccggcggggtgaagtcaccatcgtgtttgatccgaaaggcgacgcagacctgatgaaacgcgtctgggcagaggcccaccgggccggacgcggggacaagctgtatatttttcatcttggctggcctgaaatttcagcccgttataatgccgtcgggcgttttggtcgcgtgtcagaggtggcgtcccgcgtggccggtcagctgtcgggtgaggggaacagcgcggcatttcgcgaatttgcctggcggttcgtcaacatcatcgcccgtgcgctggtcgccctgggtgagcgccctgactacacgctgatcatgcgctacgtgaacaatatcgccgatctctatatccgctatgcggaaaaaatcatccaggcgcagctgccggctctgcagacgcagattgagaataatcagcaggtgctgggagaggacgacgtgccccgtaacatgcagggtcagccggatgccttacgtatctgggccattgaggttgccctgagttcagaagagggtaaaaaactctatgatcccatccttgacgggctgcggtcagcggtacgttatgaccgtacttactttgacaaaatcgtggcgtcgctgctgccgctgctggaaaaactgaccaccggcaagaccgccgagctgctgtcgccggattatcaggacattgacgacacgcggccgatttttgactgggaacagatcatccgtaaaaaagccgtggtgtatgtggggctcgatgcgctcagtgacagtgaagtggcgagcgcggtcggtaactccatgttcgccgatctggtgagtgtggccgggcacatttataaacacggtatcaatgcgggcctgccgggcgggaaagaagggaagtccctgattaacctgcactgcgatgagtttaacgagctgatggggtatgagtttattcctctcatcaacaaagggggcggtgccggcatgcaggtgacggcctatacccagacgtcttctgatattgaggcacgcatcgggaatgcggccaagacggcccaggtacagggtaactttaacaacctgattatgctgcgcgtcagggagaaccgcaccgccgagttgctgaccacgcagctgccgcaggtggagatttacaccaaaacgctggtctccgggcaccaggacacggcggatgtcaatgcagaccaggacttcacctcaagcacccaggaccgcgtcgggacggtaaaagtcccactactggagccggccgatatcgtgacgctaccaaaagggcaggcgtttgccctgctggaaggagggcaactgtggaaaatccgcatgccgctgcctgccggggatgctgatgatgtgctgatgccggaaagtattgagaaaatagcggaggagatgcggcgcagctatcacagcggcgaatcctggtggcgggacggcccggccctgaacgtgccggtcacaggaggggcgaatggctga

SEQ ID NO: 100927 - DNA, 489 bp, Enterobacter aerogenes
atgcacatcttcctgaacagcctgcgttacgcgttgtggcttgtgttctgtttattccgtcatgccgttttcgtgcctgccgctttcggcggtgtctacctgctcgcctggcttgttttcggccatccggtcagtgacctgaacgaccagttgcagaaggaggcaacggcatggcgcaccgcgccgcccggacattacatgtgggaggaatgcccggcgcctgataatgcggctccgcctgatgcaaagccggcagcctgtaccgtcactgccgtctccacagaaaccgcggcgaacaattacctgctgtcattgcgggctgtatggatcatttttttcatcctgtcgaatgttctgtatgtgctctggcgcttactggcggatgccctgcgttaccactccctttcctgcagggaagccggtgccgggaggggaacgtatatccgtatagccgacggtaaaattataaaggaggcagacgatgagtaa

SEQ ID NO: 100928 - DNA, 573 bp, Enterobacter aerogenes
atgagcgcgccagatatcaacggtctgctgatggcgcacccttacggggcggtcatactggttgtccttttcctggtggtgatggcctttctgaacctgcgtcggcgggagaaagccagcacccgccgtcaccggcgataccgggcaacggcggggcgggtactggataaactgacccgcctgccgggagacgggcagcgtctgagctatctgcgcaaagtcagtccctatgtctttgaagagctgttgctctctgcctttgaacgccaggggctgaccgtggtgcgcaatgcctcctacagcggtgacggcggccttgatggtcaggtcatcattgacggtgagcactggcttatccaggccaaacggtacagtcgtgctgtttcccccgcacatgttgaggacttcgaccggcttctcctgcagtccggccgccgggggctgtttatccacacgggccgtaccggaaaaatgagccgcaccattcgcacggcgtcaccgcgtctgcgcatcatcagcgggcaacgcctgctggccattctcgccggtcaggacgtccggcagtatctctga

SEQ ID NO: 100929 - DNA, 534 bp, Enterobacter aerogenes
atgaaaacgctgtccttactgctgtttaccctccttcccctgaccggccatgctgaactgaatgtgattgctgatctgggcggtgaagatgctgcgccgtattttgaggccgttaataaacagcccggcatgcccggcgtcagtgacgtacagccttcacgccagccggaccacggtgttccgctggctgacgggatggcgggtatgttacccgttaacacacctgaactgagcccggggaatacagcagaccggccgctgcagttgcccggcattggggcgttgtttctgatcggggatgatgctctgtcccgtgaatggctgaaagccaatgccggcgcgctggctgaacagcatgcggccgggatgatagtcaacgtcacagacatggataccgtgcgcgagctgcgcgagctggcacccggtgtcagcctggccccggcttccggcagcgaactggcccgtcgcctgcagattgcgcattatccggtactcatcaccgataccggcctgacgcagcaggttaagccgtga

SEQ ID NO: 100930 - DNA, 636 bp, Enterobacter aerogenes
atgggcaatcgcagcattctgaccggcgcgctggcgctgggcttactgatggcggccgtccctgacggccatgctgaccagacggtgccggagggttacgtccgcgtggccatggcgcacggcgtgccccccgaagcgctttactcggtatcactgagcgagtcttcgcgcaaacttccccgcggaatacggccatggccctggaccatcaatgtggcaggcaaagggtatcgctatgagacgcgcctgcaggcctggcaggcgctgcaggtctttatgaagcgtcacccgcttaagcgcatcgatgtcggtattgcccaggtcaatctgggctggaacggtcatcattttgcctcgacgtgggatgcgtttgacccttacaccaacctgaacgccgccgccaccattctgcgtgagtgctgggcgcgtaagccaggcagctggctggatgcggccggctgctaccaccatcccgcaggtggtcagcctgctgcacgttaccgcgccattgtgagagggcatctggcaaaaatcagccctgcaccccgcatttctgcgccggcagctgaagcgccccgctcggttgctgcgctcacccccgatccaggcttcgtctggactgaacccgggagataa

SEQ ID NO: 100931 - DNA, 723 bp, Enterobacter aerogenes
atgaaactgaaacacacctttttagccgccatgctgctgagtcccctgaccctggccgcgaccacatcaggacagacggatgtcagccgacaggaatcaacacaacgggcggactccgcacagcaaaacctgcagcagcaggccggtcagtggggactcagtgccgacgattatcagcgttatcagcagctgatgaagggaccccggggtacccagtcgccgggtctcgatccgctttccaccctcggtatcgaggcgcagacgccggcagagcgccgtaagtttgctgaaaagtgggtgaaggaagagtttgcccgcacccagaaagagcttgatttccagcgtgaggtgaacgcggcctggcagcgcctgtatccgggcacactgccggtcaatatggggaacgcctccggcgtggcgcacgacagtggcggccggctggcactgttcgtcaggtcaaaagactgcgcaacctgcgacgcgaaactgtctgccgtgctggctgacaaccggccggtggacatctatctggtcgacagccagggcagtgatgatgcgcttcgcagctgggcgcgggaccatcacattcccgtggaaaaggtccgcaagcgccagatcacgcttaaccacgacggcggccggtggatgcgctttggtaacggcctgatgccggttttactgcagcaggcgggagacggtaaatgggcaatcgcagcattctga

SEQ ID NO: 100932 - DNA, 759 bp, Enterobacter aerogenes
atgagcgaacagcaaccattccatactgaccccgctccggctcgtaaaagattcagctggcgtccccgctgccgcctcatctggggcgctgccagcggtgtggcgctggccggcattctggcgctgggctacaccgccttcagtctgggcatatcgaaccttgatgaacgccttgcacgccttgaatctcagggcagtacagcggccactgttgagacagtcgcggccctgcagtcagatgtgaccacgctcaaaaccggcctgcaggatacccggaaaaaacttggtgagatgcagcaggagctgagcgctgctgcgaaacaggccggcagcgacgacgccgtgcgtcagtcattgcgaacccttcaggacgcccagcaggggctggaaacccgcctgagtgcgctgactgagcagctgacagcgctgaaatcacagccggcacccgcacccgccgcacctgtcgccgcaccggtcaaaaaaaacgcgcctgctgcaaaaaagccccgtcccgctgacacacgtcgtgctgctccgtcccttcgcgtggcccgcaatgcgccttttgtgctgacgggcgtggagaagcggggggcagagtcctgggctgccatcgcgccccggggctacagcagcctgtcgcaggtggccctggtcggagagggcgaaaccgttgccggctggacgctggtcagtgccggttatggtgaggcgacgtttcgggttaacggccgcctgaccgtgctcagagcagaataa

SEQ ID NO: 100933 - DNA, 666 bp, Enterobacter aerogenes
atgaaacgtaacacctctcacaacgtattttcaccaggcaggcttgccactgttcttcccctgctgctccttgcgggctgtgtttcccagccgcaaaagttgcaacagcgtgcgcctgccgacccgacacccggcaccaccgtcacccgcaacgttcagccggtctctccggacgagtatgcgcggacgccggaagtggtgcgctacgatcgttatctgctggtcagcaccgatccgcaggcggcccagcgtgaccctctctcccagattattgatatccgtatcccgtcatccctgcatcctaccgtggcggatgcgctgcgttacgccctgcgccagtccggttattccctgtgcgcgacaggctccgccaacggcgtgctttaccgccaggcattgccggcggttcagtaccagctgggcccgatgcgcctgcgtactgccctgcaggtcctggccggtccggcctggcagcttgaggtggatgatgtacagcgtgtggtctgccacagcctgcgcgacggctaccagctgccggtctcccagcttccgccgccggtcagcagctggtccacgcctgcgccgtccgccgtgtcacaaccggccatcagcgcccctcagtcagtacccgttaaacctgtcagcggagggtttctgagaaaatga

SEQ ID NO: 100934 - DNA, 438 bp, Enterobacter aerogenes
atgggagcacgttacgattcagacgttgttgcctgggccagtgaacaggcagctttactgcgtgccggaaagctcagtcagattgatattgagaacatcgccgaggagattgaagacgtgggcaaaagtgaaaagcgtgagctggccagccgtatggctgtcttactggcccaccttcttaaatggaagtttcagccaacccatcgaggtaaaagctgggagttaaccattaaaggtcagcgtgatttgattgtacgacgtctgaacaagacgccgagcctgaaaagcgcgttttctgatcctgaatggcttgcggatgtgtggtttgacgcccgcgccgatgcttccaaagaaaccggcataggtctggatatctttcctgaagacagcatctggacaacagatactattctcagtaacgagttttacccggactga

SEQ ID NO: 100935 - DNA, 537 bp, Enterobacter aerogenes
atgtcctcacgcggcgttaacaaggttatccttgtcggaaacctcggccaggatcctgaagttcgttatattcccaacggcagtgcagttgccaccctttctctggccacgtctgagagctggcgcgataagcagtccggcgaacagaaagaagtgaccgaatggcacagggtggttattttcggcaagctggcagaaattgcgggtgaatatctgcgcaaaggctcccaggtttacatcgagggtcagctgcgcacacgcaaatggaccgatcaggccggccaggagaaatacaccacagaggtggtggtcaatattggtggcaccatgcagatgcttggcggccgccagtccggcagcggacagaatacgtcttcccggaatgactgggggcagcctcagcaaccttcaggaccgactcacagtggccaggcctccggcagcagtgccggtgcgccaccgatggacttcgatgacgatataccgttcattggattcgggtatgactgttccagagtggcaattcacgccctctga

SEQ ID NO: 100936 - DNA, 471 bp, Enterobacter aerogenes
atgtctgcaaacaatacttctgcatctgcaaaatctgagtacttcaacctgactatcaaaggcatcgggtatctcagcaacatccgccaggttaaccatcagaatggctcgttcctcagctgcgtaataaatgcactgagtggtccgactgataatccggcctacgtccgttttgacatttctgtcgcaggtaaagaggcaaccagccttatcgcccgctgccagaaagccgtcgatgaagacaagaaagtcctgttgggctttaacctgagtaacccgtccacggacatatttacgctgaacaaaggcgaccatgccggcgaacagcgcgtcagtctgaaagcccgcctgataaaggtggactggatcaaaataggccaggaaatggtttacaagactgaaaaatctgactccgtgccgccgcagaatggctctgccgcacaacaaaactacgcagaaaactcattctga

SEQ ID NO: 100937 - DNA, 2022 bp, Enterobacter aerogenes
atgcaactctttctgtgtgaaaaaccctcccaggcaaaggatattgcccgcgtgctgggtatcagcaagcgtgagcagggatttatcagcggcggtaacatcgttgtgacctgggcggtcggccatttactcgaaactgccagccctgaagcctatggcgagcagtatggcaggccatggcgtgccgatgttctgcctgtgctgcctgaggcctggaaaatggtcgttaaagagcagacaaaatcgcagttcaccgttatcagtaagctgctcaaaaaggcgtctgaagtggtcatcgcaaccgatgccgaccgcgagggcgaggtgatcgctcgtgagctgatggaatactgccgctacagtggcgcggtacgccggctctggttgtcagccctggatgaggccagtgtgaaggaagcacttagcagtattcttccgggggaaaaaacagccctgctgtatgatgccggcaagggcaggagccaggcggactggctcattggcatgaacctgacgcgtctttatacccttaaggcccgtgactcaggggtgtcagaagtgctgtccgtcgggcgggtacagacgccgacgcttgctatggtggttaacagggataatgaaatcacatccttcgtgccaaagccctggtggcaggtacatgcgcttattgaaaaagagggcgtccggttccgggcagtctgggtgcccgttgagcagtactgtgatgaggaaaagcgttgcatcaatccccaggccgcccgggcggtggggcagttgtgtcagcagcagggcagggctgtggtactggaggtaacacagaagcgggaaaaaacggcggcccccctctgttttgacctgggcacccttcagcaggtctgctcccgaaagttcggcatgggcgcaaatgatgtgctcgccattgcccaatccctctacgaaacccacaaagcgaccacctacccccggacagattgcggtttccttccaacttcgatgcagcaggaaatacccgacgttctggcggcagtggcaaaatccgatcccgctgtggccccggtactgaatcagctggacaggaagtttgtctcgcgtgtctggaatgacaagaaaatcaccgcgcaccatgccatcattcccacccgacaggcatttgatttgtcgcgcctcagcgccgatgagctgaaggtctaccatctgattcgccagcattatttcgcccagttccttccgctgcaggaatctgacgtgacggaggcgtctttcaatatcggtggtcagctgttccgtacacgcgggaaagtcggtgtggtgacgggctggaagtcattgttccaggctgaaaaagatgacgatgaagaggacgtcgacggtgacagtatggcgctgccggcgctggcaaaaggggatatttgcgctgtcaccggttctgaggttaaagatatgaaaaccagtccgcctaaaccgttcacggaggggacgttgattgctgccatgaagaacgcggccagtttcgtcagtgacccgaagctcaagaaagtgctgcgtgataacgcaggtctgggcacagaggcgacgcgtgcggcagtactcgaaaccctcttcaaacgacactatctggagaaaaaagggaagcacatccactcaacgcagatggcccgggagctgattgcggccctgccggaaacgctgacgagcccgggcatgaccgcattatgggagcaggcactggatgatatttcgcaggggaaaatgtcgcttgcggtctttatgcaaaagcagctgcagtggacccgtcaccttgtcgaaaaaggccgccaggacagtgtgaaaatcaccgctcccgtcacgcccccttgtccgttatgcaaagggcccacacgtaaacgcaaaggtaagaaaggagatttttggggttgcgtgcgttacccagactgcaaaggtattattaacaccaacgggaaaaagaccacaaagcgcaaaaaagcagcatcagggacaaaaacagaatcatccgcacagtga

SEQ ID NO: 100938 - DNA, 555 bp, Enterobacter aerogenes
atgattcgccctgtgttcctcctcacctccttctttttactgagcggatgcgcaacaacggactgggctgcgattaataaacaggtcagcgataccgctgcgaacctgacaaaaacgttaggcggcaacgacagcggagaaagtggcgggatgccgctgatgagcccggcggggcaacaggccatgcagtccgtcgataaaacgttctccgtgccggtcgatgtggataccgcggcggcccgcctgaagcgccattacaaatttatctccacacaggagcttgaggcactgcggcaggccgcaaatgacggggactggaaagcggcggcagaagatgatgcgcatcccgtctgggacgccatgccgggcagctactacaaaatgggctccgactggaacggacgtgatcacctggatatcgaaatcgagaaaaacgggtccggcagcaggctctatgttgtctatcgctcatcatcatcacagcgtctggccgggtccggcgtcacgaagctgatgaatgatgtccgcgctgttgcggcgggtgaaaaacgctga

SEQ ID NO: 100939 - DNA, 714 bp, Enterobacter aerogenes
atgaccactgaaaatgaaacgcgaagcgataaaccgggcggactcacatcctccctgaaaatcgagatccactcaaactatgctatccgtctctgggaaggccgcccgcaggctcaggcgaaggagggtgtaaagaaagttaagcatgccatcatgagtatgccccaggctattaagcgctcaggaattatttatcaggattccctggcagataacccatgggcagatgaggcgatgttcagggttgaaacgcttttgaatgaagctggagaacatatcaaaagccgggtagaagaacttgaggtcatattgaaatcagttccccctgctgtttcattttctgacattgcctcctcgtctccacttaatataggcgtatacagtcgttctccgctgggttacagatgtgtatgggtactcgtcggatatgaccagatggcccttaaagcattccaggcggctcattacggtctcatatcccgcaaccgtcgcgatgaactactgagccattgcgctcacttaatcagaaaagtatatggtgtgctacgcctttatcgaaccgtcaaggttaaccgtgctgacatagcaatccagactaaagaagcacaacaggcaatagaaaaactgggcatgcccgatactgacattcttactggtaagaaacgctcttccttttctccacctctgagaaaagccgttcaggaggagaaataa

SEQ ID NO: 100940 - DNA, 1239 bp, Enterobacter aerogenes
atgagtctgcctgcagaaagcctgattgcttatacgctggataaaatgaatgcccgccttgcggccagaccccggcgggatgatggcaggatacgtaacggcctgctgtttaccggaaatgtgcatgattccattccccgccggctgttgctcgacacgcggttgtcaccactggacaagatgggctggatgatgatccggctgtatgcacaaaataatgagggggcagttttccccagctatgacgaactgcaactgcagcttgcctcacccggaaaggggaaagcctcaagggaaacggtaagccgcgtcctgcttatgctacgaataaccggctggctcagcctctgtaaacgcgtgcgggatgataaagggcgggtgcgggggaatatctatgctcagcacgatgagcccctgacgttcagcgatgcggaaacgctcgacccccgcttccttgatacggtggcggatgcctgcctgagtaaaaaccggactatcagccagaccgcccgcgaagtgctcgacgatataaaaaacgaccccaccatgcgccattatcgcagccatcttgcgctgatcgaatcgcgtctggaccgcccacagacgcccagccagatggcgaaacatcatcaccgaataccccgtcccgcaccgggttcggaaaccgaactcagtcataaacggccaggaatcatcgctaaaaaacagggttcggataccgaactcagcccagaaagatacaacaattcactgagttcggaatccgtactgccagtaaaaacaggcagttatgaccgggttcggaaaccgaaccattacgtacgtagtatcacacacagtgtgaataaaaatacgtacgtaccgggtaaacctgtgcttcccgacagtttgcatgaacttgtgccggcagaagatattgccatgctgaccgcccagctgcaggcgctgcctgaagaacaggcacaacttgtgctgctcagcctgcaaaaggtgatggcacgccagcagctcagcaacccggttggctggttgctggccgtaatgaaaaaggcccgtgagggcaggttatacgcgccccgtcaggctgatgattcgcctgagagtgccgtgcaaaaaaatgctcagcgtcctgaacaacagctgtggaagccagaaccacgttcttctgtccatcctgtatcggaagagaacatacgaaatttggttagagatattcgtagaaagctaaacgatagatag

SEQ ID NO: 100941 - DNA, 249 bp, Enterobacter aerogenes
atgaaatacaggatggttgcgccgggcctgcgggctccccatggtacgccgccgcaatgctgtcagaaggcgttacgtcaggttcgccgtttccggcagggggcgcgtaattacacccggctcgatgagaaaggctgcggttactacaaaatcgatctcggcccgttctggcgtttgctgagtcgcaacgaaggccggacatggcttcttctcagccacgaacgctataacagcgccatacggaaatag

SEQ ID NO: 100942 - DNA, 591 bp, Enterobacter aerogenes
atgatgaacagtttatctcaggctgccaacggattgctgatgcagctggttatggatctcagaagtggctatctgcgccgctgcgaatcgctgggactgaaccgcgaggaaatgcagatgctgcaggggctctcgctcgaagagcttcactacctttccggcagtgaggtgtcgatcatcagtgtgggcatcaatcacggcaatctggtgcgcatgctgcagcaggcccggacggaacagaaacgactccagcgtatcgatcgggcgctggcgctgggcggctccattgaactgatggccaattacttcgggctctccagtacggacgtggcggcccgccgtcgtattgccggtatcgatgtccggccggggcgcggtaacgcactgggtgatgaggaaaacgccgccctgtggcgtcagtggcaaaagtccggcgttgaagatgcggaaagtgctgacgggctggacgtaatgatgctggctgcagaacagatgaacgtctcgctgacgtccgtctggcatgccgtccgcggctggcacaaaacccggcagccttctccggcacgaatgccggtaaggaagacggcatga

SEQ ID NO: 100943 - DNA, 711 bp, Enterobacter aerogenes
atgaataactcacagcgacagttgcgactgctgaatcttgtcaggaaactgctgaagctgggccgcagcaacagtaatgcccatgaggcaggactggccctgcagcgtgcccagaagctgatggccagatacggtatcagcgagcttgacgccagtcttacatctgtgcgcgaggcgtcttcccgcacggccccttcggatgctgaaaaagttccggaatggatggtgacccttgtccggggcgtctgtcatgcctttggctgccgcgcttattactcatggcgtcagacctctgccgggtatcgccgttcggtaaccttttacggattcagtgaaaaacctgagatagcagcctatgcctttgatgtgctgacgcgccagctgaaagatgccacaaattcttatctcaaaacccagagtaagcggctgaaactggccacacgccgggcgagagcggagcagttccgtgacggctgggtatgtggggtgcgtgaggtgatatcggcaactgacatcagcagcgaggaggagcaggtgatgagccactggctggaaagccgcagtatgaaaacagtcacaacccgtgaactgaaagcctgccgcggggcggatacagcacgttatcaggggtatgaagccggacaaaatgcccgtattcatcatggtgtcagcggccggggtccggcagccattggttaccgtcaggattaa

SEQ ID NO: 100944 - DNA, 1695 bp, Enterobacter aerogenes
atgagccgtaaaagttctaatgtgggggctgccatgctgcagcccggacgccagtcgcaggcggccggcaatatcagcgtcatgccggcggctgaaatgcccatggtcctgacgctcgaccagttaagcccgaatcctgataatccgcgaacatcacgcaatccgcgttatgacgatatcaaggcttccatccgttcgcgcgggctggacaccgtacccaaagtcacccgtgacccggatggtgagcccgatatgtacatcttcagcgacggtggtaatacacgttatcagatcctgtcagaactgtggcaggagaccggagaagaccgttttttccgtgtccatgtgttgttcaagccgtggccgggacggctgcagtgtgttatcggccatctggcagagaatgaagtgcgcggggaactgagttttattgaaaaagcgcaggggatccacaaagcccgctctatatatgaagagcagttaggaaagccagtctctttacgacagttgtcagagcttctgacccgtgaaggtctgccggtacataattcaactatcagccgtatggaagatgcactgaaatatctttttccgtggatcccagacctgcttgagtccgggctcggcaggcctcagataacggcgctgctggcgctccggcatgatgctgaacgcgtgtgggatgagttttgcctgatttcagacacaggcgacaaatccttcagcgacgtttttggccagtgttgtggccgtttcaactcaccggaactgtggtctcttgagatgtttcgcgatgaattaattggtgatttactgcatgcgctgccccatccggagctggattatgaccgctggatgatggaactggatcctaaagaacgtaaccgcagacatcacttcggcgatccagaaccggtgtccatccctcccgtaaacagcctcgtcaccgctgactctgcaggtcaggccacaccggcgcagaagtctgttgaggtcgcgcagcctttctccagtccacgtcgtgaaatctcaggagagccggtaacgcccgccccggataataccccacctgaaaaactggataaacagcccccccggcatgaggttcagccagatatgtacggtgccgcgccggtcatttcaggtgagagcggggatgttagcgggctggttaccctctccgatgggtacggagaagagaatggtggagaagaggacaatggggaggatggcctgctttctcttttaacaccagaacctgaagttgtcctgcaggatgacgcgccagtgactaatgacagcatctggcatgtgccggcccatcaggacgatatcgaacacctgcagaataccgcttttcgtctggcctgggagctgggtgaggtccttggctgcgaagatgaaattcttccgcaacgcgacaatgacatgtctgccggttacgtcggggcaggtgaggtgtgttctgaagccgccgcatttctgctgggcctgaccggcgaagcgcctgcgctgcatcctgcggcaggagtgtgtggtctgccggagcttttcaccggcggcccgggtgagggggaagcacctgcactgacagatgaagatgctctgaaactgctgcgcctgatgcgcgttatgcgccgtcttcgggagctgcaacgcggtctgacgtacggggaggataacagtgatgaataa

SEQ ID NO: 100945 - DNA, 1371 bp, Enterobacter aerogenes
atgtctgagatgatgatgccctgctcttatgaggctgagcaggccgtactgggcggactgatgcttgataacgaccggtgggatgaggtgatactgcaaatctccccggaagatttgttttcccggccgcaccgtatggtcttccgcgtcatggccgagctggccggagaagggctaccgctcgatctcatcactattacggaacggctggagaacaaaggcgaccttgaacagtgtggcggctttgcttatctggctgaaatgagtaaaaacacgccgtctgcagccaatatccttgcttacgccggcgtggtggcggagaaaagccgcctgcggcagctgatgacagtgggtaacagtcttctttccgatgtgcaggccccgaaagccagctcggccggcatccttgagtcggccgaaggtaagctgtttaacattgccgaacagggagccatgcagctcaacagtgagaccggcgttaacgaggcgctggataaactgctgacgcatctggaaagtatgtccgccagtgacggcctcaccggcacaccgaccggtttcagtgaactggacgcgatgacctgtggtctccagcccggcgatctggccctgctggccgcccgtccttccatgggaaaaacgtcgctggccatggccgcctgcaccgcggccgtgggcgcaaaacctgacgatcacgtctttgtgttcagtcttgaaatgccctcagagcagctgatgatgcgcctgctggcgatggaaggccgggtggaactgtcccggcttcgcagcggcaacatggatgatgaagactgggctcgcgtgtcagcggctaccggtcgcattattgaatggaaaaaccgtctgatcattgatgataccagctaccagaccccggctacactgcgcgcccgcgcccgtcgctatgtccgcaaatacggcagaccctctctcatcatgctggactatctgcagcttgtccgctcccccgagcaggaaaaccgcacgcaggaaatagcggaaatttcccgctcgcttaaggcgctcggtaaagagctgggctgtccggtactggcgctttcccagctcaaccgcctggtggagcagcgggccgataaacgccctaataatggtgacctgcgtgactctggtgcgcttgagcaggatgcagacctcatcatgtttatttaccgggatgaggtttataaccccggcactcctgatgccggggtggctgagatcattgtcggcaagcagcggcaggggccaaccggcacggtgaaagtcaaatttgacgggcgttataccctcttttcggagtttcaggaaggcagctatgacttcggttaccgcagcgggaggaaacaggcatga

SEQ ID NO: 100946 - DNA, 876 bp, Enterobacter aerogenes
atgacaatacttcccgttatctctcccaaaggtggagaaggcaaatccacgtttgctgcttaccttgccggttttcttgccgatgctggcctgaatacccttcttgtggatgcagactattcccagcccacagccagcagtatcttcgcgctggagcatgaatccccattcggtctctatgaattgttgatgcagatggtcagtgaccatacgcaatgcatttcgcagaccgccataaaaaatctcgatgtcatctactcaaacgacccggacgaactgttgccgaccgcgatgctccacgctgcagatggccgtcttcgcctgcgtaacatacttcagcatcctttctttaaccgttatgacgccattattgtggattctaaaggcgcaacaggcgttatgactgagctttccctcctgtcctctaccggtaatgtgatgggcgttgttaaacccatccttccggatgtccgtgaatttatccgcggctcccttcacatgcttacccgcctgaaaacctatgaaaattacggtatccgccttcctgatatttccattctcgtcaactgtatcgaaaacactctgcttgaccgtgaagcaatggacggtcttgccgccatcattaacgaaaaacattacgacgcctctgcgctgggcaaccgtgacgtttatcgtttactcaatacccgtatcgaggcgctggatattttcaaactggggcacgtcaagcagcagcccgtgcatcgtctggaatacaaaacacgccgcaaaggtccggccgcagccgtcaccatgcacgacctcgcgtgtgaactgttccctgagtggcagagccatttcagtgacgttctgacccgggaggtgcgtcatgtctga

SEQ ID NO: 100947 - DNA, 546 bp, Enterobacter aerogenes
atgaataaaatctgggttggatgtcttatctcgtctttatttattcccgccgccgacgcgcagcaaacgctttctcttgaggagcgtctggcgcagatggagcagcgcttaaaagccaccgagcagcgggcgcaaaacgccgaggcggaaatccgcgaactgaagcagcaggagcgcgccacggctaaaagcagtgcacctgcgcccgcgacggttgccgcgcccgcgctggcggtgaataaagatgtcgatttaaaattttacggtgatgttgaatttaatatggatggcgccagccgaaccggcagcctgacctcggtaaaaaccagcgcgaataagaactgggcgccgggggataaagagcgctgggatattaatgggcgtattttgttaggattcgatggtttacgtaaaggcgctaatgggaaatactccggctttagcgtacaaccgctggcggatatgaccggaaaaatgaatcttgatgatgccgtatttttctttggtcaggaaaatgactggaaaataaaaaatcgggcgctttga

SEQ ID NO: 100948 - DNA, 459 bp, Enterobacter aerogenes
atgtcaaaagataattcattaccctacttgtcacctgagctttgcgggctagcagcggcggcggaactacttggagatcaatgggtgttgttgatcctaagggaggttttttacggggttactcgctttgaaacgatgcgttctcatacaaaaatgacgaagcagacattggcaaaccgattaaaaaaaatgactgagctcgatttactttgcaaaatcccctatcaagaagaaggctcacgtgagcgctatgagtatgtactcacgccaaaaagccgcagtttggcgccgatccttttttccataatggaatgggggcataaaaacctattgcacgatgagccgcatatttctttagttgataaggagaaaggggaattagtatacagcgcttttatctcagcaacgggggcagttgttgatgctaaaaatatccagatagttccttttagacgttaa

SEQ ID NO: 100949 - DNA, 237 bp, Enterobacter aerogenes
atgcctttcgtaaatgtgcaaaccattaaaggaattatgagttcggaacaaaaaaatgagctgttacgtcgtatgactgacctcattgttgaaattgaggggaaaggtgatccggagtttcggcgttcggtatggatccggattgatgagcatgagcctgagcagtggagtctgggaggaatgcaacccacatctcaaatgattgctgcaaaatttgcaccgccacagcagtcctga

SEQ ID NO: 100950 - DNA, 2193 bp, Enterobacter aerogenes
atgtctgattataatgaaaaaagtgcgatttcagcactgctcgcaggtcattgttccgatccattctctgtgcttggcatgcactcaaccgctgctggtctggaagtgcgcgcattattacccgatgccaccgaggtatgggtgattgagccgaaaaccgggcgtaaagctggcaagctcgaatgcctcgattcacgcggattctttagcggcgttctgccgcggcgaaaaaatgcttttcgttaccagctggcggtcacctggcacggccagcaaaacctgattgacgacccttatcgctttggcccgctgctgcaggagcttgatgcctggctgctcgccgaaggaacccatctacggccctacgaaaccctgggcgcccatgccgacatcatggacggggtgaccgggacgcgcttttccgtctgggcgccgaacgcccgtcgggtgtcggtggtcggtcagttcaactactgggatggccgtcgccacccgatgcgcctgcgcaaagagtctggcatctgggagctgtttgttcccggcgcgcacaacggccagctgtataagttcgagctgattgacgcccacgggcacctgcgggtgaaatccgacccttatgcttttgaagcgcagatgcgcccggaaaccgcctcgctgatctgcggcctgccggagaaagttgagcaaccgccggcccgtaagcaggccaaccagtttgatgcaccgatttcgatttatgaagtccacctcggctcctggcgtcgtcataccgataaccatttctggctgagctaccgcgaactggccgatcggctggtgccctacgtgaagtggatgggcttcacccatctcgagctgctgccggttaacgaacatccgttcgacggcagctggggctatcagcccaccgggctgtacgcgccgacccgtcgctttggtacccgggaagatttccgctacttcctccacgccgcgcacgccgcgggcctgaacgtgatcctcgactgggtgccgggccacttcccggccgatgacttcgccctggcgttgtttgacggcaccgcgctgtatgaacacagcgacccgcgcgaaggctatcaccaggactggaacacgctgatctataactacggccgccgtgaagtcagtaacttcctggtgggtaacgcgctgtactggatcgagcgcttcggcatcgatgcgctgcgggtggatgcggtggcgtcgatgatctaccgcgactacagccgcaagcagggtgagtgggtgcccaacgagtacggcggccgggaaaatctcgaagcgatcgagttcctgcgcaataccaaccgggtgctgggcgagcagacgccgggggcagtgacgatggcggaggagtccaccgattttgccggtgtctcgcgccctgcgtcgacgggcggcctcggcttctggttcaaatggaacctcggctggatgcacgacaccctcgactatatgcaactcgacccggtccatcgtcggcatcatcacgacaagatgaccttcgggatactctacaactacaccgaaaacttcgtcctgccgctgtcgcatgatgaagtggtccacggtaaaaaatcgcttcttgaccgcatgcccggcgatgcctggcagaagttcgccaacctgcgcgcctactacggctggatgttcgccttcccggggaaaaaactgctgtttatgggcaatgaattcgcccagggacgggagtggaaccacgacgccagcctcgactggcatctgctggaaggggacgacaactggcatcacggggtgcagcgtctggtgcgcgatctgaaccatacctatcgtcatcataaggcgctgcacgaactggattttgacccgtacggctttgagtggctggttgtcgatgatcacgaacggtcggtatttatctttgtccgtcgcgataaagccgggaacgagataatcgttgccagcaacttcacgccggtgccgcgtcacggctatcgcttcggggttaatcagccggggcgctggcgtgaagagctgaacaccgactcgatgcactaccacgggagcaataccggcaacggcggcggcgtggcaagcgaggcgatcgccagccacggtcgggagcattcgctgtcggtgacgctgccgccgctggcgacaatctggctggtgcgggagtctgctggtcaataa

SEQ ID NO: 100951 - DNA, 1284 bp, Enterobacter aerogenes
atgagtaaaattgaatatactgacaacgtaatgctgtcgcgccagttaccgcttaaatccgtggccctgatcctcgccggcgggcgcggaacccgattaaaagacctgaccactattcgcgcaaaacctgcggtgcattttggcggtaaattcagaattattgattttgccttatcaaattgtattaactcaggaataagacgtattggggttattacacaatatcagtcgcattcactggtgcagcatattcaacgcggttgggcattctttaacgaagaaatgaatgagttcgtggatttattaccggcacagcagcgggtgcatggggagaactggtatcgggggacggcggatgctgtgacccagaacctggatattatccgccgctatgatgcggaatatgtcgttattctggccggggaccatatctataaacaagattattcgcggatgctgcttgatcacgttgaaaaaggggcgcgctgcaccgtggcctgcatgccggtcccggttgaagaggcaaacgcgtttggcgtcatggccgtggatgagaatgaaaaaatcattgaatttgttgaaaaaccggctaatccacccaccatgcctggcgatgaaacccgctcgcttgccagtatgggcatttatgtgtttgatgcggaatatctctaccagctgctggcagaagacgatcgggatgaaggctccagccatgattttggcaaagatattattcccaaaataacggcggcaggtgaagcgtatgcgcatccgttcccgcgctcctgcgtacagtccgataataatgccgagccatactggcgcgatgtcgggacactggaggcgtactggaaagcgaatctggatttagcctctgtggtacctgaactggatgtttatgatcgtaactggcctatccggacttatgtcgagtcgctacccagcgctaaatttgttcaggaccgttccggcagtcatggcatgaccatgaattctctggtatccggcggctgtattatttccggctcggtggtggtgcagtcggttttattctccaaagttcgcattaactcgttttgtaatattgattcgtcggttttattaccgggcgtctgggtcggtcgctcctgccggataagacgctgcgtgatcgacaggggatgtgttattccggagggaatggtgattggcgaaaatgccgttgaggatgcgcagcgtttttatcgttcggaagaggggatcatcctcgttacccaggaaatgctgaaccgacttgaactatga

SEQ ID NO: 100952 - DNA, 1407 bp, Enterobacter aerogenes
atgttccctctgttgaaaacgggggggctggctgatgtgaccggtgctctcccggcggcgcaaatagccgagggcgtggatacccgcgtgctgctgccggggtttcccgcgatccgcgacggagtaggggaaccgcaggtggtggccagcagggagaccttcgccgggccgatgacgctgttgtttggcgactttaacggcgtgggcatctatctgattgatgccccgcatctctatgaccgaccgggtaatccttatcatgacccgcagatgcaggattatcccgataacgtcctgcgtttcgcgctgttgagttgggtcgcggctgagcttgctggcggtctggatccgttctggcggcctgaaatcgtccacgcccatgactggcatgcgggcctcacgccggcttatctggccgcccgcggcaaccccgccaggtcagtgtttacggtgcacaacattgcctatcagggcttgttcctcgcccggcatatggcggagatcgctttaccgtggtcattcttccagatgcatggggtggagtttaaaggacagatctccttccttaaggcgggcctctatttcgctgaccatatcaccaccgtcagcccgacgtatgcccgtgaaattaccgaaccgcagtacgcgttcggtctggaagagttgctgcggcaacgtcagcgggaagggcgactgtcggggatccttaacggcgtcgacgaaagcatctgggatccgcgccgcgatccgctgctggctgcgccttacgaccggaactcgctggctgagaaagcgaagaacaagcagcagctgcagacgacgctggggctgaaggaggacggccgggcgctgttgttcaccgtcgtgagccggctcaccagccagaaggggctggatctgctccttggcgcactgccgggaatcattgcgcagggagggcagctggcgctactgggatccggcgacccggatttgcaggcccgttttcttgccgctgcggcgcaatactccgggcaggtgagtatccggatcggttacgacgaggcgctgtcgcatcagatgattggcggcgccgacgtcatcctggtgcccagccgttttgaaccctgcggtctgacccagctctatggccttcgctacggcacattgccgctggttcgtcgcaccggcggactggcggataccgtcgccgactgttcgctcgaaaaccttgctgacgggatcgcgagcggatttgtgtttaccgacagcgagactgaatcactattacatgccatccaccgggcctttgtcctgtggtcccgtccatcgctgtggcggtacgtgcaacgtcaggcaatgagcatggattttagctggcaaattgccgctaagtctttccaccagttgtatcagcgtattatttaa

SEQ ID NO: 100953 - DNA, 2448 bp, Enterobacter aerogenes
atggaaccacgcttaagttatatttcacccagtctgaatgaagaagcgctacagcatgctatcgcttataagctcatgtttattcttggtaaagatccctcacttgccaataaacatgaatggctcaacgccacgctgttcgccgttcgcgatcggctggtagaacgttggctgcgggcgcatcgggcgcggatctcgcagcaggcccggcaggtttattatctgtcgatggagtttctcatcggccgaaccctctctaatgccttactgtcgctgggcatctatgaggatgtgaaaacggctctggcagggatggggctggatctggaagagctgattgatgaggagaacgatccggggctgggcaacggcggtctcggtcgtctggcggcctgttttctcgattccctggccacactggggctgccaggccgcggctatggtatccgctacgactacggtatgttcaagcaaaacatcatcgacggccggcagatggagtcaccggactactggctggagtacggtaacccgtgggaattcgagcgccataaaacccgctataccgtgcgctttggcggacgtgttcaacatgagggcaaaaactcacgctggctggaaaccgaagaaattattgccgtggcctacgatcagattatcccgggttatgacaccgatgccaccaacaccctgcgtttgtggagtgcccaggccagcagtgaaattaatctcggtaaatttaaccagggggactatttcgccgccgtggaggataagaaccactctgagaacgtttcccgcgtgctttacccggacgactcgacctattccgggcgtgaactgcgcctgcgtcaggagtatttccttgtttcggcgacggtacaggacatcctcacccgtcattaccagctgtatcaaacctatgacaacctggcggataaaattgctatccacctcaatgacacccatccggtgctgtcgatcccggagctgatgcgtctgctgattgacgaacaccgcttcagctgggatgacgcgtttgaggtgacctgtcgggtcttctcctacaccaaccataccctgatgagcgaagcgctggagacctggcctgtcgatatgctggggaaaatcctgccgcgccatttgcagattatcttcgagattaatgactattttctgaaaacgatgcaggagcactatcccgatgatatggcgttgctgagccggacctcgattattgatgagtccaatggtcgccgcgtgcggatggcctggctggcggtagtggtcagtcacaaggttaacggcgtgtcggaactgcactcccggctgatggtggagtcgctatttgccgatttcgccaaaatctttccgcgacgcttcaccaacgtcaccaacggtgtcacgccgcgccgctggctggcggccgctaatccgtccctttccggggttctggaccgttatattggccagacctggcgcacagatttaagtcagctgagtgaactgggggaatatcaggattatccgctggttaaccaggccgtcagcgaagccaaactggcgaataaacagcggctggccgattatattgcccgccagctgggggtggtggttaatccgaaggcgctgtttgatgtgcaaattaagcgcattcacgaatacaaacgccagctgatgaatgtgctgcacgtgatcacccgctataaccgtatcaaggctgacccgcaggccgactgggtgccgcgagtggtgattttcgccggcaaagccgcatccgcttaccacacggcaaaacagataatccatctgattaacgatgtagccaaagtcatcaacagcgatccgcagatcggcgacaagttaaaggtggtgttcattcccaactacagcgtcagtctggcgcagaccatcattccggccgcggatctttctgagcagatttcgctggcagggaccgaagcctccgggaccagtaacatgaaattcgccctcaacggcgcgctgaccattggcacgctggacggcgccaacgttgaaatgctggagcacgtgggggaggagaatatctttatcttcggtaataccgccgaacaggttgaggcgctgcgcagcaacggctaccagccgcatgattactacgaccatgatgaagagttgcgccaggcgctgacccagatggggaccggggtgttcagcccacaggagccggaccgctatcgcggtctgctggattcgctgattaactttggcgaccactatcaggttctggccgattaccgcagctatgttgactgtcaggacagggtggatgcgctctaccgaaccccggaagagtggactgccaaaacaatgcacaacattaccaacatgggctatttctcatcggaccgtacggtgcgggagtatgcgcaaaagatctggtatatcgacaaaacgcagctctag

SEQ ID NO: 100954 - DNA, 1644 bp, Enterobacter aerogenes
atgacggacagtaaacgcgcaggggagcctgcgcaacaaagtgatttgattaacgtcgctcagctgaccgcgcagtactacgtactgaagccggaagcgggcaacgcggagcatgcggtgaagtttggcacctctggccatcgtggcagcgcagggcgccataacttcaatgagcagcatattctggcgatcgctcaggcgattgcggaagaccgcgcgaagaacgggattaccggtccctgctacgtaggtaaagatacccacgcgctctccgaaccggcctttatttcggttcttgaagtgctggcagccaacggcgttgatgttatcgtgcaggaaaacaacggttttaccccgacgccggccatttccaatgccatcttggtgcacaacaaaaaaggcggtccgctggcggacggcatcgtgattacgccgtcgcataacccgccggaagatggcggtatcaagtacaacccgccgaacggcggcccggcggataccaacgtcaccaaagtggtcgagaatcgcgctaacgaactgctggcctcgggtctgcagggcgtcaggcgcctctccctcgacgcggcactggcatccggtcatgtcaaagagcaggatctggtgcagccgtttattgaaggactggcggatatcgtcgacatggcggcgattcagaaagccggcctcaggctcggggtcgatccgctgggcgggtccggtatcgaatactggaagcgtatcgccgggcactacaagctcgatctgaccatcgtcaacgatcacgtcgatcaaaccttccgctttatgcaccttgataaagacggcgccattcgcatggactgctcttcggagtgcgcgatggcagggctgctggcgctgcgcgataagttcgatctggcgttcgctaacgatccggattatgaccgtcacggcatcgtcacgccggcaggtctgatgaacccgaaccactatctggcggtggcgattaactacctgttccggcatcgtccgcagtggggccaggatgtcgccgtcggtaagacgctggtctcctcggcgatgatcgatcgcgtggtgaacgacctcggccgtaagctggtggaagtgccggtgggctttaaatggtttgttgacggtctgttcgacggcagcttcggcttcggcggcgaagagagcgcgggcgcctcgttcctgcgttttgacggaaccccgtggtcgaccgacaaagacgggatcatcatgtgcctgctggcggcagaaatcaccgccgtcaccggtaaaaacccgcaggagcactacgacgagctggccgcccgcttcggcgcgccaagctataaccgtctgcaggcttcggccacttccgcacagaaagcggcgctgtcgaagctgtcgccggaaatggtcagcgccagccagctggccggcgacccgatcaccgcacgtctgaccgccgcgccgggcaacggcgcatcgattggtggtctgaaagtgatgaccgacaacggctggttcgccgcacgtccgtcaggtacggaagacgcttacaagatctactgcgagagcttcctcggtgaagcacatcgtaagcagatcgagaaagaagcggtggaaatcgtaaatagcgtgctagcagcgcaccattag

SEQ ID NO: 100955 - DNA, 570 bp, Enterobacter aerogenes
atgaatatctatgttgttaccaataataatttcatgcttgaaggtctgaaatgtatgtttagcgacaacagcctctccgtcaacagggttttattttcccggatcaccgaaattgctttcagcaacagcgatgtggtgattgtggagtcagagctgaaaacctgcgatgccgggcgtctcaaacacctgcacatttcaccagtcaatatcatctttttattaaaaccgcggtcaggaatgaggggggcagatcgcgaagcggtattcattgataccgaattaacaggtaatgaatatctcatgataaggcaggtttttaaaaaaatgcggattcatctgaagagggaaaagttggcgtttaccaaaagagaagcgcatatcatccatctgattttaaatggctactcgctggtggaaatttcccgccgcctgctaatctccataaaaacggttcagtcttatgtcaatattattttgcataaactgaatgccacaaaaataagtgaaatataccgttgtaaaagcctcatcattgacagctttgtcaggaaaaatttgcatcttcaatga

SEQ ID NO: 100956 - DNA, 432 bp, Enterobacter aerogenes
atggccgtcatccccttctttgtaaacaaggtgggagcgaaaaaagcgctgattgcaggaggcatgatcatgatctgtcgcattctggtgtcagcaacctcagaaagcccttacatcatctcgctgattaagctatttcatgcgattgaagtaccgctgtttgtgatctcggtattcaaatacagcgtgtccaactttgattctcgcttatcttccaccatctttcttgtaggatttcagatcgccagctcgctgggtatcgtgttgttatcgatcccggtggggatgttgtttgatgcgtttggctaccattttgtattctatctgttctccgccatcgtctcggtgattctgctgtttggcgtggtcttcctgagcaatggacgtaatacaggcccacgcagtggtgtggtgcaaaacgaaaccttataa

SEQ ID NO: 100957 - DNA, 204 bp, Enterobacter aerogenes
atgacgaaacaggaatggatttttcgactacggcgctgtacatcaaaggaaaccctggaaaggataatagaaaaaaataaatattctctgtcagatgatgagcttgagcatttcaatgccgcggttgatcaccggctggcggaaatggcaatggggaagttttatgataaaatacctgcaggcgtctggaaatatgttaaataa

SEQ ID NO: 100958 - DNA, 351 bp, Enterobacter aerogenes
atgtttactgcattcaatgagagaaatgatttcagttatgcttttgaaaaaacccgtaacgcgatttcttcacctggtgaaagtaatacttatgctgctacaaatctcggcctcgacattctggtccgcaagtatgaactgttccgcaaggaactggatgcggccggcgaactgggcgactgggaatatgatctcgatacctacagccactgtattacggtgctgaagcgctacttcaccggtaattcatccgggctgacagaacgtgatgcccggatttacagtcattacctgcagactgagcacaaagggtttgtgaagcttgctgaagagctggctgccggccgctga

SEQ ID NO: 100959 - DNA, 768 bp, Enterobacter aerogenes
atgtcagatgtcatgacagattcagaacaagttaaagcagttgtgcaggggttttctgcatggatgccggtgatatcaaccctagccggtggtgtactggctggcggcgtggctttactggtgagcagggtgaatcaccgttacgcccgggaacgagaagcgactgcggcagcggagcgactgcgccatgagcagcaactgtctgaggataaacagcagaaagaacttctttacatcaccacggagctggtcttccaccttgaacgtttcgctgagcactgtgcaagagttgccacggatgccggttatgaagatcgtgacggtattacccggttttcagtggtaccggaagacctcagtcttagtgctatctcaggtgactggcgagtcctgccccgccatcttatgtaccgtatccgcgagttgcccgtattgcagaacggtgctgacagggctgtcagttcagcagctgaacatgatgatccacctgactattctgatacgttttatgagcgtcgctatcagtatgcctggcttggactgaaaacaattattctttcccggcggctgagaaacctcgcacaactccctgcaacccgcctcgatgcaacgccctggtcggcacagcctgctctctggtcgatctggcggcaggagcgtaaacgtcgggccaagataactatccttaatcagcgcgcgatagcagcgtttcatatccggaaacagtccggtaataatgattcagcccctgcaggaacaccatcatga

SEQ ID NO: 100960 - DNA, 990 bp, Enterobacter aerogenes
atgaaaaagaaaaccaccacgcccacaccccacgatgcgacattcaggcagttcctgacgcagccggaaatagcccgggattttatggagctgcacctcccggcagaactgcgtgccatctgtgacctcacgacgctgaagctggaatccggctcgtttgttgaggatgacctccgccagtatttcagcgacgttctctatagcctgaaaaccgccggcggcgacggctacgttcacgtgcttattgagcaccagtcgtcgccggacaggcacatggcgtttcgccttatacgttacgcagtagccgccatgcagcgccatctggaagcgggccataagaagttgcccctggtgataccggtccttttctatacaggtaaacgcagcccctatccgtactccacccgctggctggatgagtttgacgaccccgtgctggcaggcaacctctacagcaacgctttcccgctggttgatgtgaccgttattccggatgatgacatcgccggccaccgcagtatggccgccctgactttactgcagaaacatattcatcagcgcgacctcgctgaactggttgaccgtctggcgcccattttgctggccggatacctgtcttcatcccaggtcatatcactggtacactatatcgtgcaggcaggcgaaacagccgacgccgaagcctttgtacgcgaactggcactgcgtgtgccgcaacacggggacgcacttatgaccatcgcacagcagcttgagcagaaaggtattgagaagggtatccagcagggaatcgagcaggggctcgagcagggcatccaactaggtgaacaacgtggtattgaaaaaggccgcaatgaaggaaaactggaaggcaaactggaaggcaagctggaagttgcccgtaccatgctcaggagcggcattgaccgcagtaccgtgatgaaaatgaccggtctgactgaagacgacctggcgcagatccgccactga

SEQ ID NO: 100961 - DNA, 627 bp, Enterobacter aerogenes
atgagtatgaaggttgtttctttccttaatccgaagggtggctcaggtaaaaccaccgcagttattaacgttagtacagcaatggctcgtgcaggatacaacatcgccgttgtggatacagatccacagatgagtctgactaactggagtaaatcaggcaaagccgcatttgatgtgttcacggctgcgtctgagaaagatgtttatggcatcaggaaagatcttgctgaatacgacttcgccatagttgatggcgccggttcgctttctgtaattacttctgctgcagtaatggtcagcgatttagttatcattccggttactcccagcccacttgatttttccgcagcgggaagcgttgtcacagtccttgaagctcaggcatatagccggaaagtagaagctcgttttctcataactcgaaaaatcgagcaggcaaccatgctaaatgttttaaaagaaagcattaaagacactggtgtcaaaccattccgaacggcaattactcaacgccaaatttatgttaagtcaattctggatggtgacagtgtatttgaatctaatgatggggccgctaaaggtgaagtggaaatccttacaaaagaaatagttaaagtttttgagtaa

SEQ ID NO: 100962 - DNA, 231 bp, Enterobacter aerogenes
atggctcttgaaaaggcccatagtggtagtaaaaaaatgacctttggtgagaatagagatcttgaaagagtggtcgctactccagcttcatcaggtaagagcaagcgtgttaacgtcaattttgatgaggtgaaacataccagatttaaagctgcttgcgcgagaaatggaacttcaataacggatgtgattagcaagcttgtagatgactggcttaaagaaaatgaataa

SEQ ID NO: 100963 - DNA, 1002 bp, Enterobacter aerogenes
atgtttgccctggccgacgtcaattcgttctatgccagctgcgagaaggtgtttcgccctgacctgcggggtaaaccggttgtcgtactgagcaacaacgacggctgcgttatcgcccgctcaaaagaagcgaaacgtcttggtattcaaatgggggtgccgtggttccggctgaaggacgcgcagttccctgagaagctgcacgtgttctccagtaactatgagctgtacgcctcgatgtccgccagggtgatgactcatctggaagagctggcgccacgcgtggaacagtattcaatcgatgaaatgtttctggatatccggggcatcaacagctgcattgactttgaagacttcggccagcagctgcgtgtccatgttggcaacggtacgggactcaccatcggtgtcggtatgggccctaccaaaacgcaggcgaagtcagcccagtgggcttcaaaagaatggccgcaatttggtggcgtgctggccctgaccccgggcaatccccgccggacggagaaactgctctcactgcagccggtggaagaaatctggggcgtgggccggagaatttcgaagacgctggggacaatgggtatcaccaacgcgctgcagctggcgcgcgcgaatccgaccttcatccggaaaaacttcaatgtggtactggagagaacggttcgtgaactgaacggagagccgtgcatctcgctggaagaagcgcccccgcccaaacagcagattgtctgcagtcgttctttcggagaacgcgtcacaacgtatgaagccatgcgtcaggccgtctgccagcatgcagaacgcgcagcagagaagctgcgcggagagcaccagtactgccggcatatctcggctttcattaaaacgtcgccgttcgccatcaacgagccttattacggcaatctggcaacagagaaactgatgacacccactggacacgctttactgcccgaacaagacgtcagcggcatcacccggcattga

SEQ ID NO: 100964 - DNA, 426 bp, Enterobacter aerogenes
atgaagtttattgctgcctccctggaacccggggtcatgaccctccccctttttaccgagcgttgcgccgccggttttccttcaccggcggcagattacacggaagcggagctggacctgaacgagtactgcatccggcaccgggcctccacctattttgtccgggctatcggcaactcgatgaccgatattggcctgaactcaggcgacctgatggtcgtcgacaaggcagagaagccggtgcacggggacattgtcatcgccgaaatggagggagaatttaccgtcaaacggcttctgctgacgccccgtcctgtactgcagcccatgaacccggcctaccctgcccttcaccctgacccggagacgctgcagatttttggtgtggtgaccgcgtttatccataagacgcgcggcgcggactga

SEQ ID NO: 100965 - DNA, 231 bp, Enterobacter aerogenes
atgtcgcctggattcagaaaggctctccgctttgccggcgtccccgtcgacagcagcgaaccggtacgcaggcagtacggcagtcgcatgattggtatcgtgacggtatgcctgcttccgctcctggtgttcgacgtcccgctgtgggttttcgtgctctcccaggttatctggggcgcgggcgtgtatatcggcctctccgtggccggagacaaatcccggaaccgctga

SEQ ID NO: 100966 - DNA, 222 bp, Enterobacter aerogenes
atgaactacagcggacacgaagccctgcgccgcgatatagccgggctggccaacaacatctgcgacctgaaaaccaccctcaaagtgctggaagaaacgtatcactaccggcacgacggactggcggagcggcttgccggtatcagcctgcggcgtctcagcgtcctgatggatgaggcgttcagtatagccctgttactcgatgaatctttcagagactga

SEQ ID NO: 100967 - DNA, 411 bp, Enterobacter aerogenes
atgctgtatggcacccgtaaagaactgaacaagaaactcaaacgcatgtttggaaacgaagaacgctacgccctgctggtctggacgaaagaagacgtgatggcccaggcctggaacatgacggaggccgaggctcacaccctgcttgagcttatcggccgcacgggaaccggggagcacaccgaagaaggcgtgtcattccgcaccgtgcaggcgctgtacgccgggattcgcccgggcattccccgcgtgagcgtccccgtcgatacgctgcatcgcatcacggacattgccgcacaggcgattaacggagaagacgagcattcgccgtccctgacggtcgatcactacccgagtgtcgctgacgctcaggcagaaatcgcctggctgaaacgcgaaatcgccgcttaa

SEQ ID NO: 100968 - DNA, 768 bp, Enterobacter aerogenes
atgatgaaaaatgaaacccttaacgcccttatcctgcgccacggagaccggatgctgcgtcagtctggctggcccgacgccattgatatggcgcccgtcgcacccggaaccgtacccggctggctcgccgcctgcggctctctcagcggtacgcaaatcctcacgctgacagaacagctttgccagccgctgacgtatggccgggcagcgttgttgctcgccagcgcccggcggctggcgggaaccccggcgcgtctgcatctctttccggtgcaggcatatccgcatccggagcggctggctgactgtcaggttatccgcctgccttacgctcaggagtggctgacggcagcggaatgtgacgatctgctggccttcctgaaagcctccctcacgcagataacggaaatcgtgcgccgggatacgaaacgtattgctgccgcgctggtgccgtccgccgtcccgcgcctgatggacaggcgtttcggggactggcggttgctggccgacgagtatgaccatgaaaactggctggacgcaggcgagaccgacaggctggatcaggtccttgatgccattctggttcgcagtgcgcgattctgcccggtcctgctcaccctggtaaatgagcgggaggaaaacatggagggcgcaggggttattacagacctgctgcgttttccgggcgatccggttcgccgctggcttgatcgccgcgtattgcgggacgtggtgagagaggcccgcggcgtcagcgctctggtgtga

SEQ ID NO: 100969 - DNA, 429 bp, Enterobacter aerogenes
atgcagtctgtgaaagcacgccccgtcctgaatgttgaagagtgtgaccgcctgtcttttatgccctacatgttcggcaatgattttatgctcgctgaattgcaggtgtatgcactggcaaaaaaatggatgcccgaatatgaagtcgaattctggcactttatccggctgcctgagggcggcggttacatgatgcccgattgtggccgcgtccatatggtcagcacggaaagctggtttgaccgcattgtgagcgccgacgcggcgggcattattctgacatccctggccgttaaccgtcgtctggcggcaaatcatgacagcggcaacccggccctgactcacgtttacatgctgcgtgatgcccagctctggaatcacatcacccttcacccggaatgcaacgccatttacgccgcgctggactga

SEQ ID NO: 100970 - DNA, 507 bp, Enterobacter aerogenes
atgcattcatcaattacggttccggcggtctatgtgggtacgtatcaccagtacaactgcggcagcattttcggcaaatggtttgatttaaccgatttcgacgacgaagacgcattctatgacgcctgccggacgctgcacgccggcgaggaagaccccgagctgatgtttcaggatatcgagggcattccgtcacagtttgcctctgaatcctctgttaagtgggcgtttattgaggccttccggcaggcgcaggacgacgggcgccccgccgcgtttgtggcctgggcagagtataccggcgagtgcgactatgacgcctttgatgacgcgtactacggcgaagcggaaagtgaggaagattttgcttatggctttgtggaggacaacggcctgttaaacgaggtgcccgaatcattgcgcatgtatttcgattatgaggcatacgcgcgggatttattcagcagcgggtatgtgctccatgacggttatgtcttcagaaactga

SEQ ID NO: 100971 - DNA, 321 bp, Enterobacter aerogenes
gtgcgtatgtctgctttatttgctctgacgtctgtgttcagcgcgttgaatcttgtatttatgccattccatcccgtcatgatgttatgggctttcggcctctctgtcgccttcattattgtcaatataattgccgacagactgcgtctgtggtccggtattgcatggggaatggctgccgccgtaatagtcgcttttatgcttaacggcgcacagcccgatgaagaaaaccgggtactcatcagttcattcgcatgtattgtctcagcatggtatgccgtgattcagttcagaaaagagaagaaagagtctctgtcctga

SEQ ID NO: 100972 - DNA, 558 bp, Enterobacter aerogenes
atggcagcacgtggcgttaataaagtcattctggtcggacatctgggacaggacccggacgtgcgttatatgcccaacggcggcgcagtggcaagcctgacgctggccacgtccgaaacatggcgtgacaagcagacgggagagatgcgcgaaaacaccgaatggcaccgtgtcgtcatgttcggcaagctcgcggaagtggcaggtgagtacctgcgtaaaggcgcgcaggtctacatcgagggccagcttcgcacccgcaactggcaggacgataccggaaccacacgctatgtcaccgaggtactggtcggccagaacggcaccatgcagatgctcggcggtcgtcgtggaaccggtgagcctgagagcgccgcaccgcagcagcccgcgcagccgcagagtcctgccgccccggctcaacctgctcaggccccggctaaatccccgaaagcgaagggcggtaaaaaaggccgtcagagcgccgccccgtctcagcttcctccccagactttcccggacgattacccgctgaccgatgacgatgtgcccttttaa

SEQ ID NO: 100973 - DNA, 1080 bp, Enterobacter aerogenes
atgtcagtgaccgagtctaaaacaaaaacccccgcgaaaaccagcaaaaaagcggtgaaacctgccgaatccgccgccctgaaagccgcgcttgaggccgcacagattgagatggtgccgctgtcggcgctggtcaaatccccgcttaacgtccgcactatcccgtatccgccggagagtgtccgggaaatggctgactccattctcgcggtcggcctcattcagaatctggtggttcacacgctgccggacggcctgtcgggcgtcgcagcgggcggtcgtcgtctggcggccctgcagcttttacaacgcgagcagcgcatcgatgccgggcatcaggtcatcgtgaagcgtgtcagcgacgaactggcagtagtggcttcgatggtcgagaacaacaaccgggtggcgatgcacccggcagagcaaatcagcggtttccgcacgctgtctgagcagggcaagaccccggcgcaaatcggggaccagctggggtacagttcgcgccacgtccagcgcatgctgaagctcgccagccttgccccggaactgattgccctgctggcagagaacacgctcgatgtggagcagtgtcaggcgctcagtctggaaagtgacccggcgcgtcaggtggagatttaccagcgcgtgaaggcgcagcacagctacgctccggctcacatgctgaaacgcgccatcacggacaccgaaatatcggttcgcgacacccgatttatgtttgtcgggcgcgaagcgtatgaggccgcagggggcgaagtgcgcgaggacctgttcagcgcgcaggagggcgacggaacggcagacggggtactggtcgggcgtctggtgcaggagaagctggagtcgccgcgctggctgttgaaatgcaggagggctggtcatggtcactggcacgggaaggggcggtgcggaattacggtgacgaccgcgagcattatctggtcctgccggagccggagggtgaactcagcgctgacgagcagcggcgtctcgatgaactgtacgccacgcaggaagccacggcgacgtatgaagatgaagccgccattcaggtgctga

SEQ ID NO: 100974 - DNA, 549 bp, Enterobacter aerogenes
atgaatctcggggttcaccacagcagtctgaccagtgaagccccgaccggagaaaacggtcaggcatggcagtcgctgatgcaggagaaagcccgtctggaagccatgctgccggagggctggaagaacgatttcaccaccttttttgccctcgacggacagaccctgatgtcgctgatggtcttctgtactgcctgttccgtggatggcgtccagacccgcgaacacggacataccagccgcagtgacctcgacggtgtcgaggcagcgctcgggttccatctccgtaactggtggcagccaacagcggataacttcctcgggttactcagcaagaatcagattgtggcggcgctgaaagatgccggactgaccggggccgcctcggatgctgaaaaaatgaagaaaggcgatgccgccagtcacgccgaacagtggctctccgggacccgatgggtgccgggatggatgcagtccccggatgccgcaacgccggaagaagcagacaccacgcctgacactgacgaacccacctcacacgctgcctga

SEQ ID NO: 100975 - DNA, 432 bp, Enterobacter aerogenes
atgcgcaatattattacccccgatgtcctgaaaaccatgatcccacaggaatacgaagactggcgcgaaggaggagaggatttgcgccgcgaactgacccatgccgtaatgcgtgacctgagctgcccggacaactgggacatgaacggggagtaccgcagcgagttcgggggctttttcccggtacaggtccgcttcacgccttcacacggtaactatcatctcgccgtgtgcagtcccggcgatatctctccggcctggatggtggtgtttatccccgccagcggtcgtccgttctcggttatcagcacgctgtcggactggtcgccggaagccatcagccacacgctgagtctggttgcccggctcgatgctgatggctacagtcaggccagcatcatcagcatgctggtcatggagggcgcacagtga

SEQ ID NO: 100976 - DNA, 735 bp, Enterobacter aerogenes
gtgaacgcatcaacaacgtctctggtgaccctgaagccagcccgacaggcagcgctgcaggcggtcctgtcggtggaggaatcccgccgtctcggtgcgcgtctgcccgccatgccacacgtgcgcaccttcctgcgtctgctgaccgggaacagccgcatgaacacgaccgtggcgcagcgcattcccggcctcaactgggacccgaagcatcgcctgagcagcctcaaacaggtggaggaggcgcttgatgaactgattgccagccacggggagtgctgcccgctgccgctgccgctgccggtggatgttcaggctgaactgttcccggaagtgctgcacacccgcacagaacgccggttgcagcgcagaaacatcgcgttcacccgcagcatgcgccgggaagaacggacgctggcacatcactggcggctgcggcagaacctgctggggcaggccgtcacggagctgaactttcaatccccggagacggtcagcagctggtaccgccggtgggccgaagagtttgacgcgcgtgagctggagccggctttctggcactggcggtcgcggtttgcctcgctggcttccctggactggctacgtgacgcgaaggaaccgctgtacggggtcattcatgaaatcggcttcattgtacgtgacaccccggaggctgtgcgtcaggcagagcgctggcaggtgccgaacaagctgacggatcggaggcggggatga

SEQ ID NO: 100977 - DNA, 324 bp, Enterobacter aerogenes
atgaggtggcgttactccctgcgctggaaattaccctcaccgtgtcccggtccgcatgaactggcatccgaagtggtggaggcgggacagcctgcgcccggatccattatgtcgctctgggtggcgggcgccgggtatgcggtgtgcgtggattttcccgatgagcggcagattaagcgctggagcgatgagcgcaaagccgctgcgcgccgccggaatctggcgcggcgggttaaccgaatagcgcctctgtttgctgaggaactgattgagagggagcttgaggggcgaccagactatttccggggaaaatctcagacctga

SEQ ID NO: 100978 - DNA, 228 bp, Enterobacter aerogenes
atgcagacacaggcgatgcgtgtttatcagatcacctttaccggacgcgacgcaaaaggcgttattccgatgtttacccgcgtgaaagccatgaccggaaagggcgcgattaaggcgtttattgagcgttacaaacctgttcagggctggtttctgggcgatcccgaagacattaccgacaacgtgaaaaaggaggcagaagaagcagagagcaaagcgcagagatga

SEQ ID NO: 100979 - DNA, 876 bp, Enterobacter aerogenes
atgagtcacaccaccacacaggctgtcagcgtcgacattaacccccacagcggcgcgggagaggtcatcccgtctttgcccgttgagcgcattgtggcgcagcgaaacagcggcgtgacggcgtttctggaggcgataaggctgctacgtgacgcgcagaaactcatttttgaagcatccgggcgcgggtggatctcaggcatgaccgacatcatcgaacgcagcctgtcagctgaccgcagcaccacgcgggaagccgccttaaaacgcagcgtctgccgttatgccgatcgcgacatctggacgcgcctgatgaatgacacgggcatgtttacgctgatgagcgaggcgcagcgcaaggcgtgggatacgcagctctacagcgatgactgccccgaaatcaccctcgacaacgtgatcgccacgttccgggcgcttaacgccagcaagggggctacgtttgagcagggcgtgattgacgtgttccgcaacctttcatgggactataaaacgcataatccgtgcctgctgggaaagaaaattatcattgatggtgtcctggacaatcatcgcgggctgtatttttccgtgcgcacgtatgcacagaaccgcatcgatgaccttgcccgcccgttctggttactcgacggaaagaccattcccgacaaccgcgtctccgagggggcaaacctgagcgcgtttatcagccagggcggcgcggcgagtgtgggcgaggtgttcgcgtgtgagtatttcacggtacgcacatacaaaaaaggctccgcgcacgtcacctttacccggcccgacctggtggagaaggtgaacgacattatcgcgcggcactatccgggggcgctgccgccggtggtctga

SEQ ID NO: 100980 - DNA, 339 bp, Enterobacter aerogenes
atgaatacccgcatcgttcattccatatcgtccgttctgcgtactgatggctttgtgcgcaatatccacgccgctaacccgttcgatgttatccgcgccgatgtggtgcttgcgcgcatcgagaaagaagcagggcgctgctgcgggatgcactacgagctgtatcaggcgcgcgtgctgggcgatgcgctggattatctggatgcgctgccgctgaaagaccgcccggcgctcatgggcgcggcggcaaaacgcggttacatcctgacgctggctgaagaagggtacgcgcaggaagcccgcgatgtgcttatgagtgaactggcggaaaacgaatag

SEQ ID NO: 100981 - DNA, 348 bp, Enterobacter aerogenes
atgcacttacacctgactgaatcctcagcccgtccgggaatgcaggtcactgccgaagccgagcgcgagtactggatgagtcgccagaaagcggcggtgaaagcgcccgctgaaatcgacgttcacgccttccacgacgcgctgggcctgatgtacccgctcaactggtcaacgagtgataacggcgtctgggagacgttcatgctgcaggagatggtctgcggtgacgtgacagagatttatgcccgctgcggagccagatatttccggctgcgggatgtgtgcaacctgagccatgcgcagattaaaacgcgcattaaggagggatttaacttgttccagaaatga

SEQ ID NO: 100982 - DNA, 543 bp, Enterobacter aerogenes
atgcacacaatgaacgtcaacaccaaagtcaacaccgccactcgtgaatcagacgaacaatttaaaacagacagatatctgcgttatgccgtcaccgatggcgatgagcgtctggattttatcccggccctcttttttacgccgtcagccgataatatggcggcgagctggttacgccagcattcggattacaatggcggattctggtcttactggattattccgcagggtgtcggcgggaatattaccccgggccgcattcagttcatcaccacgcagaccgggtatatcgcaccggaaggaaaacgatcttacaggatgcgcatccccggcaattattttgacggtgacgtcagcgccgatgcagcagggattattgccacgctgacgataatgaactggctgtcatggcaggtggcggatatggggccggaatatgcccgcgtctgtaaacatctggtttcccgtcaggatgctctgaaagactatatcagcattattcatcatcccgaacagcatttaatctggcgggcgattgattaa

SEQ ID NO: 100983 - DNA, 495 bp, Enterobacter aerogenes
ttgagaaaaaaactggcgtttgctgccctgttattaatatccacgcctgcatgggccacggattgttttgatatggcgggacgggattaccggattgatccggatctgctccgggctatttcgtggcaggaatcgaagtgggtggtgaatgccatcggtaaaaatccgggaacaggatacggtgccggactgatgcagatcgattcgcagcaccatgcccggttatcggagttcggtattaaaccggaacaacttctgacggatgcctgcctgaatatttataccggtgcgtattatctggcgctggcgtttaagaagtggggcgtcagctgggaggcggtcggtgcctacaacgccggattccgcagaacggacaggcaggacatgcgacgactggcatatgcgagaaagattgaggctgtctaccgggccatcaaggcaaataaaaacaccggacaatcccgggctgttaaaaacgaaagacctcatgaatga

SEQ ID NO: 100984 - DNA, 393 bp, Enterobacter aerogenes
atggctaagatccaggtttatgtaaatgacaatgttgctgaaaaaattaatgcgatagcagttcagcgtcgtgctgaaggtgcgaaagagaaagatataagctattcaagtattgcatctatgttgcttgagcttggtttgcgtgtctatgaagcccagatggaacgtaaagaatccggatttaatcagatggcattcaatagagcactgctagaaagcatggttaaaactcagtttactgtaaataaggtgctggggatcgagtgtctaagtcctcatgttaatggcaatccaaagtgggaatggtcagggttaatagagaacatacgggacgatgttagtgcggtgatggagaagttctttccgaatgaaagtgagattgaggatgaatag

SEQ ID NO: 100985 - DNA, 702 bp, Enterobacter aerogenes
atgtgtgcgatggatcgtagtagtgatgacagcttaagtcaatcggttagggatgctcttcttcacataaaggggttgtataacatctcacctgtctctgtttgcgtaagaaaccaacaacgtgatgtactatattccaacacatcatttgaacaaatgtatgacttttttaaaacagaatgtgtagcaggtagtttctctggaacgttttatgaattggagttgatgttttcccaattagaacttgattgcatggtgctaggtaaaggctgtgttttaagtaaaattttttcgtgtggaaaatcgaattttcaaattcggattgagtgtatcagtcttttggatgatgatttttattttttttggcaaataaatcttctgataacggttccattacccagccggaaaatggaggttatcaaatcaaatggtaattcagattttgatgaggctatttcaaagataagtgatttgaatataattcctctttcattttatgttcttggctttagctatttggatatatcaagttatatctgtgtgtctgaaaaaattgtgaaaaaaagaatcgatcgttcgaaagagaaagtactggagatctatccttcttttaactcatttatatcggattgttacaagaccaggaaaatatattttttcattgagaatgtttacgaatatataatgttaatgaagtgttaa

SEQ ID NO: 100986 - DNA, 567 bp, Enterobacter aerogenes
atggaacatggagccaggctcaataccacgcgcgttattgcgctgggttatatctgtctggggacagtcctgggcctcagtctgaccacgaatattattcagggtattaataattaccgcctgcagaccgaacagaaagtggctgtgactcccatgctgttcaatgcacctttcgctgtttctcagaatcaggcggacgcatcctatcttgaacagttaggactgagttttattgcgctgcgtctgaatgtcaccccggaaacggtcgacgcccagcatgcccagctgctccggtatgtttttcccggggcgcagaacagcctcaaaatccagctggcagaagatgctaagcggataaaagacaacaatgtgaatgcctctttttatatgacgtctgtccgtacgtacccggctgaaaatcgggtggatatccgcggagaactgaaaacgtggataggggattctgccccctacagtgaaattaaaagttacgtcctgcagtttaatcgtgtggatggtgtcagctggctggcgcgttttggagaaataaataatgaaaaaaattaa

SEQ ID NO: 100987 - DNA, 735 bp, Enterobacter aerogenes
atgaaaaaaattaacccgttatttctctccggttgcctgttcttttcgctacctgcgatatcggccaccctcagcggtacgctggcgccgaccgttgttcccctggcgaacggcggacaggcaaacatcgccgtgagtaacacggaccccaacctcttcaccgttcccggtgaccgtatcaccgcgattaacagtctggacggcggtctgacaaaccaggagcagaccgacagcggtggcgccattctggccacggtcagcaaaaaaccgttcacgtttattgtggaaaccgagcgcggactgaacttttccatccgggcggtaccacgcgccggggttggccggactatccagctggtctccgagctcgtggggacaccgggtcccgctaaatcatgggaagaatccagtccgtatgaaggcattctggtttccctgaaccgtgctgttcgccagggccagatccctgatgaataccaggctgttcctgtcacatcggaatcactgcaggtgcccgctggtcttcgtgcgacagcggaaaaagtctggaccgggcatcacctgaaagtggtgcgttacagcctcgaaaatatcagtttttcgccccgaatgatccgcgaaagcgatttctggcaacccggcacccgcgccatcatgctcagcagtcctgctggtcagctgaccggtggtggccggatgcaggtctggatcaccacctctgaaggggggcgctga

SEQ ID NO: 100988 - DNA, 435 bp, Enterobacter aerogenes
atggttaagtctctcatcactctcgttctgtcaacgctgcgctggactcactggctggttcagtatgcggtggtgtatccgctcggtatgatgatgttgctggttgtcgttgtgttctggactgggcataacacgcccgggcagatgctggtgaagaccattgaatcggtgcaacgcgaaggatatgtcattcacgactgcacggggccagcttcgcgtgaagcacttaatggtgatgcggtgaagccactgctgtctccggttttacaggaagcctgcacgactgtcagtacggatgcgacagggtacgcagcacatatcgaccagggttacacaaaaaatattctctggctctggctgctgatggcgatggtatttacggggggctcgatagttatcgggagtactccccggaccggagtgacgggatattaa

SEQ ID NO: 100989 - DNA, 279 bp, Enterobacter aerogenes
atgtgggatgacaggattataaattgcttttgtttggttatggttgtgttggtgggtgtaatgtttttttttaaattaacacaacccagcaatgacgatttaattaaggacggtaaatactggtcagctgactgcattctgaaggaggttgatattcctaccggttttttaactggtaacattaatcgactggattgttccggggtcgttgttaatgtggtgaagggaaaatacgaccaggcagtatctgcgtataacaaatctaaaaatcagaggtga

SEQ ID NO: 100990 - DNA, 189 bp, Enterobacter aerogenes
atgattaactttaaagatttcactggtcttaaagagagtacattctttatctctcaggatgaaaagcaagcgactattgatatgaatgaatggattgaaaacaatacggtttcaataatgtcgattgaaacgatagtgaaagaatatcgatttgtttgtgtcaggctctggtacaaagaggaacgttga

SEQ ID NO: 100991 - DNA, 402 bp, Enterobacter aerogenes
atgaacgcattttactatggtatcaatctgggatggatagcgggaatatttctggcgctctttattgtggggggcatcctggcagcatcaatgtgtgcaatcccacagaagtatcaaagccgttttaacgctgggaacacctttatctggagctcactggccgccgtggtgggactggctgggatactccccatcctgattatgacggtatcaatggatgacctggaagcaggtaaacactggcacacagaatgcaaactgatggaagtcaacattcgggatggtgccttttcagagcctgtgaatagactggattgcgccggggttatcatcaatgtaccgtccgaaaaatattatcgttatatctctgaatggcaattgtataaggctaaaaataaatga

SEQ ID NO: 100992 - DNA, 300 bp, Enterobacter aerogenes
atgaaatcagatgagatgagctggtttaaacatgttcttagtttgtctgtaataatcatttttgcaggttttttgttttatctttatgactcggaatacagaggtgacaaaatagcgaccgaagaacagttgctggatatttctcatgaaataccctgtgcgggagaggctttttggatggtgcttcgtaataacccgaagccgttaacccttcgctcagcgaataaaatagcctcagagtgtaacgagaggaataagcaacttcaggtattaagtaaaacccgctccgatgaggggtga

SEQ ID NO: 100993 - DNA, 384 bp, Enterobacter aerogenes
atggctttgattaaaaagtatggttttttgcttattcctgcgttgtactggctcatctatctgggtgtcagattgacttacaacggactggctggagagtacacaccagatttcattcagagtatacgccatgacggtgtgtttattatctgcagcttactggtgttttatattgcctgtttaagagttgatgtcagtgacggagagctttcaggggtgctctttttggctgttattctttttcatgttgctgcattaattatctcgcttcttatctgtttatggcagggggcactgttgtcggatgttatttttatctggcaactgggcacctcgatgatgatgttagtgttcatccctgtactcacttttagatatgcttag

SEQ ID NO: 100994 - DNA, 393 bp, Enterobacter aerogenes
atggaaaacagtacagaaaaacagacaagcacgacgtcctcaaccttccgccgggtttccgtcatcgttgccctggtgctcttcacgctggcgaccaacgtcttcctcacgcgggtggtactggagtacaccacgccgcgggtggtggcctttgatatgaagaaaacgctcgacagttttatggacagtgtcagtcagaaacagctgtcagaggcgcagtccaaagcgctgtcggagcggtttaacagtgcgctggagcagagcctggcggattaccagctacaacatcatgtcctcatcctggtctcgccggcggtggttcagggcgctcccgatgtgacccggacaatccagacggacatcgcccgccggatgaaaggaggccgcgaatga

SEQ ID NO: 100995 - DNA, 627 bp, Enterobacter aerogenes
atgatacgtcttcgtcgttacctcctagccagttgtctgttgtcgccattgacctatgccgccgacctcggaacctggggggatttatggcccgtccgtgagcaggacatgctggaacttatcacgcagcggctgcagggactgcaacaatccggccagtgggataagacaatgggcgagtttaagcagcgggtgatcgagaacagccagcgcccggccccggtggaggggctgcacagagcggagaaatatgcgcaacgctggtttgaccccagcattcgcctgacggaagacctgaaggataacgaagggcgggtgtttgctcaccagggcgagctcatcaatcccctgaaaaccgtgccctttatgcagaccctgtactttatcaacggcgacgatcctgaccagatagcctggatgaaacgccaggtgccggaaacgctgatgagcaagattatcctggtccggggcagcgtccctgacacctcggctgcgctggacagccggatttattttgaccagaacggtgtgctttcaaaacggttcggcctgaccagtgtgccggcgcgtattacgccggcgccctccggtgagcggctgaatatcgaaacctttcctgttaaataa

SEQ ID NO: 100996 - DNA, 648 bp, Enterobacter aerogenes
atgaagttaaagaatgtattaatgacgctggttgtattgtcaggcccagtcgtcgctgccggtagcccaggcagtccgactacggcagacagggagtggctgaaacagcaggaaaacctcagtgaacagttacgtcagcatccggacaaacagctgcagcaggaactggaagcgcagattaaccgcaatcccctggcacagtccgatcgtcagtttattgacaacctggccagtcaacaaaaggaggctaaccaggaaaaaccgactgaaggggcgctgtactttgtctccttctcgataccggaagaaggtctgaagcgaatgcttcacgaaacaaagcagtacagcattcctgccacgttgcgagggctggttaacaacgatatgaaagcgacgaccgatgcggtgatgaacctggtgaacgacggggtgactgacggtgtgcaaatcgacccgacgctgtatacgcagtacaacatccgtagcgtgccggccctggtggtgcgctgtcaggccggcttcgacgtggtgcatggcaatatcaggctgaagcaggcgctggagaaggtcgcagagaaaggggactgcgcgcagacggcccgacagatgctcgacctgtcctcaggtgccatcaggagccagccatga

SEQ ID NO: 100997 - DNA, 384 bp, Enterobacter aerogenes
atgaatggaaaaccgtaccattatatcgacaaggatatccggtacctggtggcctgtatgaacgcccatgagttcaggacctacgcatcctgtcaggggtacgggttaccggttgattccattatgccttatatcgctttcacctcgtctgttgcgaaggcctcacggctcagccagtgtctgcgtgaagatgctgaatcaggagatcctgtactgaactggggatgggatatcaccggcagttttgattcaacgtattccctctgttttcggctaagcccgacgaagccacataaccacttaagccgctggcgtcggggctctctgcgaggcgatttcaatgtcattgcgtgctatgtgaaaaaacaaggagagttctcatga

SEQ ID NO: 100998 - DNA, 1956 bp, Enterobacter aerogenes
atgaaagaggttcccctcattattactctgcacgctgctgtgctcgggacatttatctggtttatgacgccggtctgtgccgacagcagtacggattacaaagccggttcggatttcgcaaaacaggttcagggaggggggctcgatgctctgaaaaactttaatggtgagcagaccttacccggttatacctcccgacccgaccagacgaaatactacggtggcgtgacagccagcggtgacagttccctgaaaagtgactctgcttcggagttcagccagaacgaggccggacaaagtatcacggagtcgttcaccaaccggccccctgacagtatttcagcggatgccccctttattcaggcggcacaggacaccgaatcccgggcggacagcattgtcggcgataccggtcaggcctgtacggcacaggtggttaatcgtagcgagttcacgaaccatacgtgcgagcgggatttgcaggtggagaacttctgcacgcgggaggcgacgctgaaagacaacgccacgacgcaaaaggtcagtcgtacctaccagcaggctgtcccgatgaatttcacccgaaacagcacccgatggagcgggacgctgaccatcccgtcgacagggcggctgctcagcgtgtctgttgacggtgaacctctgccggttccctggatttatgaatgtgacaacgaaggaaaggtcagagacagttgcaagcttgcagtcagtgaaaacatcagcctctttgataaaacattccctgtcgatgtgatgacctggccgaatacggtgacgacgtgctccgggggccagaacacacactgtacaagtcattactacgatggcaccgggaaaattcatcagtctttcagcatggaccggaacgttgtcgccgggcagagctttccggtaacgaaaacgtcgaaaacccagccatcagtgaatgttaaatccattcaggtgacggtcatactggtcatggaggagacggaaaccgtatttgcaccagaggtggtctgggttgaaagttgtccgttcagcaaggacgaaggcacgaaaacaggtgaagaatgtatcagcccgggcgggacaaaaaccctcaacctgggcgggaaggcgtattccttcacagaagcatgctggaaatacaaggacacctggctcacacagcctgcggatcatggctcctgtgagagcctgatgaacaatacagcctgcacgctctcttcacgtcagtgtgccttcaccggtgaagacgggacctgtctgcatgagtatgccacgtactcctgcgaaacccggaccagcggtaagcagatgatctgcggcggggatgtattctgccttgatggtgaatgcgataaagcggtcagcggcacgaacaacggctttggacaggcagtttcagagctcgcggcgctggccgctgcgggtaaagatgttgcggcgctgaacggggtggacgtcagggcattcaccggcaaggcaaaattctgtaagaagttcgctgcaggcttcagcaactgctgcaaggacagcggatggggccaggatgtgggcctggcacgctgcagcagcgaagagaaggcgctggccaaagcgaaaaccaacaagctgacagtcagtattggtgagttctgctcgaagaaggtactggggatctgtctggagaaaaaacgcagttactgccagtttgactcaaaactggctcagatagtccaggagcaaggccgtaacggacagctgcatattgggttcggtggtgccagcagtccggactgccgggggatcacggtagcagaactgcagggcattaactttaatcagctggacttcacgaacttcatggaggacctgataaataaccagaaaataccggataacagtgagctgactgataaaacaaaacaacgcataaaagaacttctcacgcagtcttcagcaaaatga

SEQ ID NO: 100999 - DNA, 261 bp, Enterobacter aerogenes
atgacagcgtcatttatgatgatatttcagctgctgaccttgtttttaattccattcatccttgctgtgttcatgtcaggccgcagcctgatcctgatatttttcggtgctctgacatcacaggcaacagttgctgtcgcgttttctctgctctccagtcgggacggggctgagtgtatggggatgggggcactgtcgcttgttttttatgtcatcacgttgtcccgtattgaaaataataaggatggtttaaatgaatag

SEQ ID NO: 101000 - DNA, 612 bp, Enterobacter aerogenes
atgaatagactggtcaggtccgccacggttttgttttttattctaataatgccattttcaaatgccgcaagcagagaggaactcgagaagctgtattcaatgcagatgcccggcactgtcattcagtgtaagagaacagatgaaacgttttttacaaaaataagaatgatttcccggtatacggttacggagcaaagtgaaaataaaacaaaaatggatgggcgggttgccatgtacgccaccggtctgaaaacgttacgatttgaagctgaatttaaagctacccggacaatgctggatactcgtgatatgtgggaggtcgaccccgactcgctggttatgaaagtatcaggtgaggatgcaaaacgctttaaaaataagggaggggttgattttttcagggataatagcaggttaaactatgacgatcactctgatattcgatttactacctaccccgattatattatcggggaggatgaccccggattctttacatcaaaaggcgcagaggaatgtaccactcgctttgctgacagttttcccgcggggaaagccgggctgaaggtgaaggaggataacagtaataaggaacacaaccatgaaaattaa

SEQ ID NO: 101001 - DNA, 243 bp, Enterobacter aerogenes
atgaaaattaactttcataaatatcctgccgtcgattttctggtgagattactgctgacaataatcattatctcccctgtgctgtatttctcatgggatgccgtcaaagggacgtcaggtagtgattatattgagagtgtggtttttattctcatggtcggttttttctggctggtgagttacctgtttttttctgctctggcgggactgataaaaaccagtcgtaaggagaaaaaaagatga

SEQ ID NO: 101002 - DNA, 327 bp, Enterobacter aerogenes
atggaagagaaaaaatcatacggggtggtgatgctgtttgtcggcgtgtttgtcgtcttcctggtctgtgtcatgtcgtacagcctgtggcgcgataagcagattaatgcgtttatgaccaccaaccgggcctggggtattcagtgtgaccgggtttctcaggccgcgtgggtggttaaaggaggggagcgggtgaacctggaaatgaattcgcttcccctgtactgcagcgggtatcgctttgaagcccgcaatgacgcaggaaaaacacggcgtcttcttgataagtacagcgtctatcagcatctgtcacgccagccgcgttaa

SEQ ID NO: 101003 - DNA, 561 bp, Enterobacter aerogenes
gtgaaaagccatctgaagataattagtacgggcgctctgctgctggcactttctcccgtgatttacgccggtacactcgatgaagtgaaatccctctgggatccgcagggcataactggcgccgctccggcggcatccactggcgtacctgcgtctgagaagccggtctctcaggtccgcttgtaccggctcagcaacggcagacaggtcaacctcagcgactggaaagtggtgttgtttatgcaggggcactgcccgtactgccacaagtttgacccggtcctgaagcagttatcaggccagtatggtttctccgtgttctcttacaccattgacgggcagggggatgaagcgtttcccgaagcgctgccggcaccgcctgacgtgatgcagacctttttcccgaatatcccggtggccacgccgaccacgtttctggtcaacgtgaacaccctggcggcatacccgatattgcagggagccacggatgcgcaggggtttatggccagaatggataccgtatttcagatgatgggggcgacagggaatgagcaacattaa

SEQ ID NO: 101004 - DNA, 2844 bp, Enterobacter aerogenes
atgctggaaatctacacgatagccggcggcgactggttcaggggcaacctgaatgccatttccgccttcatgagtaccggtacctggtcctctattgagaaaatgtgcattgccttttccgtgctgatcgtcgccggcagctgggtgaaaaaacacaacatcatggacctggtcggctgggtgtttgccctgacactggtctcgatgctggtcgtcatccgcaaaccggtgcagattatcgactacagcaatgtgtctcaggtctatcaggttgacaacgtgccaattgggctggctattcccgcctccctgactacacgcatcgggaatgcactggtacaaagttatgagatgattttcgccctgccggacagtgtgacttacagcaaaacggggatgttatttggcgggaacctggttgccaaaagcacagactttatctcgcagaacccggaaatcaccaccctgttctcagactatgtccagaactgcgtgatgggcgatatttttctcaatcataagtattcccttgaggaactgctgaactcggaagacccctacacgattattttttctaaccccagcccgcttcgcggcgtttttgacaaaaacaatcagtttaaaacctgccaggaagcctcccgtgatttgaaatcagccctggcgctggatacccagaccggcgggaagacctggagctactatgtgcgccagttgtttgggggtaaacctaacccggacctgctgttcagccagatgatcggtgacagctacagcttcttctacagttcggggcagaatgcggggcagattatccgccagaacgtgacgatgaatgccctgcgcagcggtatccagagctacgcagcccgcagtggcgatacggccagcctggtgaacatcgccaatacttcgtcgctggaaaaacaacgtctggcccaggcgacaatgggacatcaggcgctgcgttctctgcccatgatgcagacggtgatactgggtattatgtttggcctgttcccgataatggtcatggcggcgatgttcaacatgatgaccatgcaggtgctgaagggctacgtctttgccctgatgtggctgcagtcgtggcctctgctgtacgctatcctgaacagcgcgatggcttactatgcgaagcaaaatggggtgccggtggtcctctctgagctctctcagctgcagctgaaaaactcggatattgccaccaccgcgggctatatctcgatgatgatccccccgctcagctgggcgatgattaaaagtatgggggcaggtttctccagcgcctacagccactttgcttcgtccggcctcagctccacgtcgcaggcctcctccagcgtggtggacgggaattattcgttctcaaatatgcagacggacaatgtcagcgggaacagctggagcaccaacagttccaccgcgtttgggcagatgtcccggcagctggcgaatgggggcatgcagacacagacaggtgacgggacgacgatctgggattcgcgctcctctaagctgccagtagaaattaacgtcagccggcaactggccagcgccaatcaacagatggcccgggaatccgatgttcaggcggaaagcgcactgcatggctataacagcagtgtgacgagtgcctggaacagcctgaaacagtttggcacaaatatgggtaccagtgcatcgacgacgagtggggccgacaatactgagtcttcacaggattcaatggccagaagtaaaatgtggagtgctgttgtttctaatgcaaaagccaacaacatcagcaatgaagagtcattccagcagttgatggatgactcctctaaaagaactcaatcctttgatatgcatgcatctggtaaatggagttccggggaccagttgtttggcaagcttggtaagtggggcacgggattatctgctgaagttggtggtaaaggaagcgctggatggggtcacagctcaggtaatactgataatgttagctcttccggtcgggaatcacatgacagccggcatgacacgagcagtcaggcggcgaaagacttcaaggaagcttccgattactttaccagccgtaaaacgaccaactctggcaatattaccgataacaatgccagctctcgcgtggatcagtttgccgcatcactttccagtgcgaaaaacagctacgaccagtatacaaacagccgtacacgcagccatgaatacagtgaaatggcttcacgtactgaaagtatgagcggtcagatgaacgagaatctgacgcaacagtttgcgacttttgttcagcaacgtgcgccacaggatgctgaagccattttgaccaacaccagttctccggaagtcgctgcgcaacgtgaagccctggcacgtgaattcgtcaaagagcaggttgagccaaagattgatggtgcataccaacaggggcgagaggccattggccagaatatgtctggtgtatcaggcggtggcgatcgtgccacggtgatggcggattacgggcataattctggaaatattgagacgatgacccaggatgcggcaattaataataatgtgaaacagacagtaggttcgatgatacacaataacaatcaggctcatcaacaaactcaacatgaaattcaggggcagggaggtgaagttaaaaagcagcattctgatcttgaaaaaagccataatttggaaggaaataaattcgaaaatgaatataatgaaagaaagagtgaagtcaaatcgctggcaggggctgactctccacgcgagttagaggaaaaggcagttaaccttcaaaaggattatcttgacgggaaaaggtga

SEQ ID NO: 101005 - DNA, 516 bp, Enterobacter aerogenes
atgataactaataagatcattatagaggaagtagatgagctgagacatatgcttttacaggggaaggctgaagttccgtccttttggtcatgtatgtggcctggattagttatagtttcctggaatatactttgtgcaatgattagtgtgaatcaaaactaccttgcagtaaaatatattttttgggtcgtaatattcccaggaggggtggggctgatacttcttcttggtatcgcaagtgcgcgctctttatttttttcagtgccaaaatcctttagggtacgttcaaatatatatcggttttttttcagaaaaattattgtttatgcatttgtttatatgtcgttggtttttattcttgcttttttgaatcgttttttctatgactcaccatttccttttggatttatggttttttttacggcaatttttatggggattgttatgaatctggattttgggagatatcaactatcgttactcacatctgccataacctctttcaaggctagttag

SEQ ID NO: 101006 - DNA, 747 bp, Enterobacter aerogenes
atgaaacttaataaattattggttgttatgatttgtagttctgggttagctctctctggttgtggcgtcaatagcgtgaaggacatagatccatcaggctatagcatggcatctgattatgcatttgccgtgatagagaaatctgggtgtataggtaagattgatggtctctttgttaagtcaggtgagaaaagagcaaccaaagatgggctggaatatatcttttctggaaataatcttcattgtacacaaacttcctttaaagaacagatggccaattactgtcgtagcaaaggtggggaacctgttcaaggggagacctggtgtcgtaaagacgacactccacttttttatgttggagaactatcgacactagaaaaaaatgctaatcaaagccaggaacactggtttagcactgcactcaaaagagggttcatcagtgagcgagtacaggaaaaagaggctttaatagcaaaagagaatgaaaagttggctgaaaaagaaagaacgcgcattagaaatatgaaagtaaacgtcaatgttggagattcaatatgtcgtgaggactatgatgttcctctgtaccaatattcatcaagaattttttatcaagggtatgtggaatctaagtcagggaataagataaaagtaaggattgttagacacggtggtgaaaaggatataattaatgatgtaactccaaatcctgttgtctgggttgaaaataaaggttggtttcactgttag

SEQ ID NO: 101007 - DNA, 2295 bp, Enterobacter aerogenes
atgagttttaatgccaaagatatgacgcagggcggtcagattgcgaatatgcgttttcgcatgtttggtcagattgccaatattatattttatgtgctgtttattttattctgggtgttgtgcggactgatgctgatgtaccggctcagctggcagacctttgtgaacggctgcgtttactggtggtgtaccacgctggcacccatgcgcgatattattcgctcccagccggtctatacgattagctattacggaaagtctctggaatataatgcggaacaaatcctggccgataaatatactatctggtgcggtgagcagctgtggacggcatttgtttttgccgccattgtatcgctgacagtctgcgtggtgacgttctttgtcgccagctgggtgctgggtcgtcagggcaagcagcagagcgaggatgagaataccggcgggcgccagctatccgataagcccaaagaggtggcccgccagatgaaacgcgacggtatggcctcggatattaaaatcggtgacttacccatattactcaactccgaaatccagaacttctgcctccacggcaccgtcggctccggtaaatccgaagtcatccgccggctgctgaactacgtccgcgcccgcggcgatatggcgattatttacgaccgttcctgcgaattcgtgaaaagttattacgacccgtccttagataagatactcaacccgctggattcccgctgtgcggcctgggatttgtggaaagagtgcctgacgctgccggattttgacaatatctccaatacccttatcccgatgggcaccaaagaagatccgttctggcaggggtccggtcgcaccatctttgccgaaggcgcctacctgatgcgcgaggacaaggaccgcagttacgaaaagctggttgataccatgctgtccatcaaaatagacaagctgcgtgcgtacctgcagaacaccccggccgccaacctggtcgaggagaaaattgagaagacagccatctccatccgtgccgtgctgaccaattatgtcaaggccatccgctacctgcaggggattgaaaagaacggcgagccgttcaccatccgggactggatgcgcggtgtccgtgaggaccagcctaatggctggctgtttatctcctcgaatgccgatacgcatgcctccctgaagccggttatctcgatgtggttgtcgattgccatccgcggtctgctggcgatgggggagaaccgtaaccggcgtgtatggattttcgctgacgaactgcccacgctgcacaagctgccagacctggttgaaattctgccggaagcccgaaaatttggtggctgttatgtgttcggaatccagtcctatgcccagctggaagatatttacggcgtgaagcctgccgccacgctgtttgacgtgatgaacacccgtgcctttttccgttccccgagtaaggagattgccgagtttgccgccggcgaaatcggtgagaaagaaatcctcaaggccagcgagcagtattcctacggggcagacccggtgcgtgacggtgtgtcgaccgggaaggaaaaagagcgggaaacgctggtcagctactccgatattcagacgctgcctgacctgtcctgctacgtcaccctgccggggccgtatccggcggtgaaactggccctgaaatacaagccccgaccgaaaatcaccgagggctttattcagcgccgtctcgatgcgcgcgtggatggaagactcagtgcgctgctggaagcgcgggaggccgaaggcagtctggcgagggcgcttttcactccggatgagcctgtgtctgagtcagccgaagagaaagccggtgttcagcctgagcagactaaacctgctgaagacagcgtactgcctgtgccggtaaaaacctcgtcgaaggcagcagagggtgccggtaagacgccagacgtcccgttatctggcgctcccgtcacgagagtgaaaaccgttccattaatccggcctgaacctgctgcttcggtgaccggcactgctgcagcggcatccactgccgcggtgagtgcgactgcgggcgggacggagcaggaactggcgcagcagcctgtcgaggcggaccaggatatgttgccggccggaatgaacgaggatggcgtaattgaagacatgcaggcttatgacgcctggctggcgggtgaacagacgcagcgggatatgcagcgacgcgaagaggtcaatatcaaccacagccgcagtgagcaggatgatatcgaaatcggagggaacttctga

SEQ ID NO: 101008 - DNA, 5259 bp, Enterobacter aerogenes
atgctcagtttcagccaggttaaatcggcgggcagtgccggtaactactacacagagaaagacaattactacgtcaccggcagcatggaggaacgctggcagggcaaaggggcggaaacgctggagctggagggaaaggtggacaagcaggtcttcacggcgctgctgcagggaaaactccctgatggcagcgacctgacccggatgcaggatggcgtcaataagcaccggcctggttacgatcttacgttctcggcaccgaagagtgtatcgatgctggccatgttggggggagataagcgtcttattgatgcgcataaccgtgcggtgactgtagcactggagcaggtggagtcactggcttctacgcgggtacagaaagacggtgtttctgaaactgttctgaccggcaatctgattatcgccaggtttaatcacgacacatcgcgcgcgcaggaaccacagatacacacgcacagcgtggtcatcaacgcgacgcagaacggggataaatggcagacgctgggcagcgataccgtcggcaaaaccgggttttccgaaaacatcctcgctaaccgcatcgctttcggaaaaatataccagagcactctcagggccgacgtcgagtctatgggttacaagacagtggatgcgggtaagcatggcatgtgggagatggagggcgtgccggttgagtcattttccacgcgcagtcaggagctcagggaggcagccgggcctgatgcgtccctgaagtcccgggatgtggccgcactcgatacccgcaagtcgaaggaaactatcgacccggcagagaagatggtggagtggatgaacacgctgaaggagaccgggttcgacatccggggctatcgtgaagccgccgatgcacgggcgaaggagctggccagcgcgcctgctgcgccggtaaaaaccgacggtccggatatcggtgatgtcgtgacaaacgctatcgccggtctcagcgaccgtaaagtacagttcacttatgccgacctgctggcccgcacggtcggccagctggaggcgaagccgggggtctttgaacgggccagagggggcatcgatgcggctatcgaacgtgagcagttgatcccgctcgatcgtgagaaaggtctgttcacctcaaacatccacgtcctcgacgaattgtccgtgaaagccctgagccaggaggtgcagcgccagaatcacgtcaccgtcacgccggatgcgaccgtcgttcgcctggcccccttcagcgatgcggtcagcgtgctggcgcaggaccggccagcgatggggattgtctccggacaggggggagcagccggtcagcgggagcgggtagctgagctgacactgatggcccgggagcaggggcgtgacgtgcatatccttgccgccgataaccggtcccgtgattttctcgccggcgatgtccgtctggcgggggagacggtcaccggtaaatcggccctgcagaacggaaccgcgtttatcccgggcgggacgctcattgtggaccaggcggagaagctgagcctgaaagagaccatttccctgctcgatggtgccatgcgtcataacgtgcaggtcctgctctccgacagcgggaaacgcagcgggacaggcagcgcgctgaccgtgctgaaagagagcggggtgaatacttatcgctggcagggcggaaggcagacgacggcagacatcatcagtgagccggacaaaggtgcgcgttacaatcgtctggcgcaggagtttgccgtcagtgtacgcgaagggcaggaaagcgtggcgcaaatcagcgggacgcgtgagcagggcgtactcaacggcatcatccgcgacaccctgaaaaacgagggtgcgctggggacgaaggagatggccatcaccgccctgacgccggtctggctggacagtaaaagccggggcgtgcgggactattaccgggaggggatggtgatggagcggtgggacccggagacccggaagcatgaccgctttgtgattgatcgggtgactgccagcagcaatatgctgacgctcagggacaaagagggggagcgtctggacctgaaagtctccgccgtcgacagtcagtggtcgttgttccgggccgataagctaccggtagcaaacggtgaacgtctgtcggtgctgggaaaaatccctgagacgcggctgaaaggcggcgagagcatcacggtgctgaacgcggaggccggccagctgacagtgcagcgtcccgggcagaaaaccacccaggcgctttctgtcggcagcagcccgttcgacggtatcaaggtcgggcacggatgggtggaaagtcctggccgctcggtcagcgaaacggcgacggtctttgcctcggtgacgcaacgtgagctggataacgccacgctgaaccagctggcgcagagcgggagccacatccggctgtactcggcgcaggatgcgacccgcacgacggagaagctggcgcgacataccgccttcagcgtggtgtctgagcagttgaaggcccgttcaggcgagacagacctggatgcagccatcgcaacccagaaagccgggctgcacacccccgcagagcaggtcattcacctttccattcctttactggaaagtgaggcgctgaccttcacgcgtccgcaactgttggccaccgcgctggaaaccggcggaggtaaggttccgatgacggagatagacgcgaccattcaggcgcagattaaggcgggcagtctgctgaatgtgccggtggcacccggtcagggcaatgacctgctgatttcccgtcagacctgggatgcagagaaaagcattctgacaaaggtgctggaaggaaaagacgcggtcccgcccctgatggacagcgtaccgggtagcctgatggcagacctgacgtccgggcagcgtgcggccacccggatgatactggagaccacggaccggttcacggtggttcagggctatgccggggtagggaaaacgacccagttccgggccgtgacgggggccatcagcctgctgccggaagcaacccggccgcgcgttatcggtctcggtccgacacaccgcgccgtgggggaaatgcagagcgccggcgtggatgcgcagactaccgcctcgttcctgcatgacacgcagctcctgcagcgtaacggccaggcaccggatttcagcaacacgctgtttctgctcgatgagagttcgatggtggggctgtcagacacggcgaaagccctgagcctgattgcggccgggggaggacgggcggtactcagcggcgataccgaccagctgcagtccattgcaccgggccagccgttccggctgatgcaacagcgcagcgccgccgacgtcgccattatgaaagagattgtgcgccaggtacctgagttgcgaccggcggtctacagcctgattgaccgggatgtgcaccgcgccctgaccaccattgagcaggtcacgccggagcaggtgccgagaaaagaaggcgcctgggcaccgggcagttcagtggtggaattcacgccggcgcaggaaaaggcgatacaaaaggcgctgagcgagggggaaatcctgccggcaggccagcccgcgacgctctatgaggcactggtgaaggactatgccgaccgtaccccggaggcgcagttacagacgctgattatcacccatctgaatgatgaccggcgggtgctgaacagtctgattcatgacgcgaggcgggacaatggtgaagtgggcagagaggaagtcaccctgccggtactggtgacgagtaacatccgtgacggagagctgcgcagactgtcgacctggacggctcataagggggccgtggccctggtcgataatgtctaccaccgtatcgggagcgtggataaggagaaccagcttattacgctgatggatggtgaagggaaagaacggcttatttcaccccgggaggcgttggctgaaggtgtcacgctctaccgtgagcaagagattacagtgtctcagggggacaaaatgcgcttcagcaagagtgacacagaacgcggctatgtggccaacagtgtgtgggaggtgaaagctgtttcgggtgacagtgtcacgctgtctgacggcaaaaccacccgcacactgaacccgaaggctgatgaggcacagcggcacatcgacctcgcgtatgccatcaccgcccacggcgcccagggggccagtgaaccgtatgccatcgcactggaaggggtgaccggcggccgcaaacagatggccagttttgaatccgcctatgtcgggttatcacgtatgaaactgcacgtccaggtctacaccgacagccgggaaggctgggtcaacgccattcaggcatcaccctcgaaagccacggcacacgatattctggcaccccgtaacgaacgggccgtgaaaacagctgatctgctgttcgggcgggcgcagccactgaacgagacagctgcaggccgggctgcgttgcaacagtccggtctggcgcgcggacagtcgccgggaaaattcatttctccggggaaaaagtacccgcagccgcatgtggcgttgccggcgttcgataaaaacgggaaaaacgccggcatctggctcagcccgctgacggacaaggacggccgcctggaggccatcggtggcgacggtcgtgtgatgggcaatgaagaagcccggtttgtggcgctgcagaacagtcgcaacggcgaaagtctgctggccgggaatatgggtgaaggcgtcaggattgcacgtgataaccccgacagcggggtggtggtccggcttgccggagatgaccgcccctggaacccggaggccatcaccggcggtcgcatctgggctgatcccctgccgaatcctccgatcaatgataccggtactgacatcccgctcccgccagaggttctggcacagcgggccgcagaagaggcacagcgccgggagatgggaagacagacggagcaggcgacccgggaagtgtccggagaggagaagaaagcgggcgagccgggcgagcggataaaagaggttatcggggacgtcattcggggtctcgaacgcgaccggccaggagaggagaaaacggtgctgccggacgatccgcagacccggcgtcaggaagcggccgttcagcaggtggtatcagagagcctgcagcgggaccgtctgcaacagatggagcgggatatggttcgtgatctcagtcgtgagaaaacgctcgggggcgactga

SEQ ID NO: 101009 - DNA, 720 bp, Enterobacter aerogenes
atgtacgaaacccgcctcaatgccgtcgatcgctggctgcaggggctgctgacctggacgcctggacagacggatatcatcaaaacggtggcgctggtgctgatgattgtcgatcacaccggtttgctgctggccgggaataatgaactcatgcgtctgctggggagaggctgctttcccctgtttggtctggtctggggaatgaacctggcgcgccacggggccatccgccagacacagctgaacagcctgtggtgctgggcgctgatcgcccagggctcctttattctcatcgggtacccgtggtacatggggaatatcctgtttagctttgcggtcaccggccaggcgctgcgctggttcagtctgcagacccgcaatgatattctgctggcgatcgccattgtcgtggcctggctccccttatctgccgacagctacggtctggccggggtcttcatgctgatcaacagctggcggctttgtcgggcgaaagagcctgtagaacggatcgggtatgccgtgctgtgggctgtcatggtactactgatgaatgcccatgatattacccaggccattgccggcctgatggtcgctttgctggccctggcggtctgttctgacctcggtcgttctgttccgcgcttctggccgcggcacttttttgtgatgttttatgccgtgcatctggcggtgttggggatcgttgcctcgatgtaa

SEQ ID NO: 101010 - DNA, 591 bp, Enterobacter aerogenes
atgactgaagaaaaacgccctgtactgagtctgaaaagaaagccggcagcggataccgcagcggccgggtccgttgacacgcctggtgtggtacggcggaaaaaagtggtggtggtcacgacgcctccggcctggaagctgaagaaagaaaagctggcacaggctaaacaggctgctgaagccgccgccagccagccagcaccggaggctgtgaaagcggtcaaaacgcccggtccggttcgctatcttcgtttactgccgccggagcaggccatcatgaccctgaaggcattctggccacagctgtttgacggtgactcgccgcgtctgctggcgactgggatgcgtgaacagctgtttgccgatatcgcggggcgcgacctgccgctgtcgcataaacaggtgattaagtgcctgaaaagcctgacccggtcggcgggttatctgtcccggatgcgggaaggtgcctcccgctatgacctgcaggggaatgtggtggctacggtcactgctgatgaagcgcactacgccagtgagcgcatgatgaaagagctgttacgcgctgaacgaaagatgagtcagaccgtttaa

SEQ ID NO: 101011 - DNA, 414 bp, Enterobacter aerogenes
atgaaaacctgggttaacagtgatgatatttgtgaagatacacgaaatatcataaagtcgttatccacgccagaattcggagaatttggtgatgtaagagaaagcattatatccctgaaggaatgcattgatgaggaagaatacgatttctatgtattttcagacgctgcatttacactcctgaagacgttactcaaaatcagaattaaactcagaaaggctgaccctggccatcactcaatccctgcgctcactctggctgttgatgacatcagaaagcagcttaagttgaacgagaggtacgttcatgagttaattcaggtggatagtttctccagtcgagcccgcgttttcttttggtttgcctgctctgcggcggcgatgcttttattgttcgcaatattttatatctga

SEQ ID NO: 101012 - DNA, 792 bp, Enterobacter aerogenes
atgaaaatcaaattcggattgtattttctgctcccgcttatttcggttgtcacttttaataacagctttgctcaggagcatgaaccgggaaaaactttctctgccagccaggaaaagagaatcggggaaatagcggcagattatctacgtgctcatcctgaaatactgattcagatgagtgagaaacttcagcacgagcaggaggcgaaacagacccgcggttttaaatccgctgcactggaacagcaggctaacattctgggtaataaaaatatcccctcctggggtcccggggacggaaaggtgatggtggttgaattctttgactaccagtgcatctggtgcagccggttcgcacccgaactggagaaggtcatcgggagcaacacggacgtgcgttacttctttatggagtggccggtgtttggtagccggtggcctgcatcattgctggcggcgaaaaccggcctgcaggtctggaaagaaaagggctctgaggcttacaggagctatcacaatgcggtttatggtacaggactgaatgaagggaaactgacgcaggagattatcgaaaaggtttctggtcatattaaatttaagcagaatacgattgatgagataaataccacgttgaaaaatattaatgatatcgccacggcgacgggattaaccggaacgccaggtattattgtgatgccggtgaagggcgcgacggaagaaaacgtcacggtcttttccggaatgactgaagcacagaatgttcaggcggctataaataaatcccgacaataa

SEQ ID NO: 101013 - DNA, 597 bp, Enterobacter aerogenes
atgtctgagaatatcatcgcgctggttgattatgaaaatatcggaacgcttgaaaatgtaatgttgtcgcgttatgaacgtcttattttgtttaccgggtctcagcaggagtttattcgttttccgtccgtaacacatgccggtaatatatcgatcagtgtgtttcaggcaccctgcgtgtcgaaaaataatgtcgatttccacctggtacttgagctgggacgactcagcgtcaccgctccggaagatacgatgtttcatgttatatcgaatgataaagggtatgacagcgtgattgcattgctctgcaggacagggcgacgatgttgtcgtataccctcaccacgttcagcagagaaggcgaaaacggtgtctgcgctcatcagcaacgatgaggtgctacgcctgaccgataaaatacagtcattgagtaaaaagtctgcggtaaaccgacctgtaagcacctcgtcactgatgaattatattaaatgtcattccggtaacatcaggaatacagcgattttaaatcaggtcagggacgaattaatcaggcgaggcgtgattgccgtatatgaaaaaacggtggtctggcgctaa

SEQ ID NO: 101014 - DNA, 645 bp, Enterobacter aerogenes
atgttcagctatttcatgctgcgcactgagcagcagttattttgttatttatacgggggcgcgctggcactgtctctgcaactcttattttctccctcttttccgggaaatggatttatcctggtatcactgcccgttgcactattctgggccgggctggccctgtatacgcggcacatcgaccagatgaggaagcctgatgtctcgccgctcgtcagtatccgtgacggcatccaggtggtggccatgctgccgcggcatgagaaagcgcggcttgaatggaagattctgcaggatgatgaggtgtaccgccgtcagatgcacgctcttttaaacctgatgcaacgggttatcagtcggggatttctgtatgcgccggcagtgatactggcgggcgctggcgtgcttgtctggggggttccgcaggacggtgtccggctggtgaccgccctgcggaatatgtcccccggagagcttatgcatcagaccggcttcatccttcgctatgtgctgatgatttcctccatatcggtcctgatagctgacattgtgtccggtcagggtctgccaaatgccttccggcgcgcgttgctcgacaggctgccggctgatgcctggtgtatcagaagagggacagagcgttga

SEQ ID NO: 101015 - DNA, 627 bp, Enterobacter aerogenes
atggcaaagatattaatgatggcaggcagtgccgttgttgtgctgagtctgctggggttcctggtgctgtttctgaaggaacgtgcaacagggaagacatccccggtcctgcaggcgctgaaagcggcgggcattcgtgccggagaggcagaacagagactgtgtcgccagcgggtctggatgggtaatgacacgctgatgacgccccgggaacaacattttttccgggcattgctgaaacataccgaccggaaacactggctgctgtgcccgcaggtgcgagtggcggatatcgccagcctggcaccccatatcaggccccgctcccggacctggtggcagctgttccggatggtgtcacagtggcactgcgatgtggtggtggtggatatcaggacctttgccattgtggccgccatcgagctggatgatgcgtcgcatctgaaaaaacaccgggttcgccgggatatcctgctggaagaagtactcaggcaggcgggcattccgctgctgagagaccgggatgctgaaaagctggtcagacagatcagggcgtttttaatacgtcgggaaactgaaactatcaccacaccattgacggtggtcaggggagaatacaaaggatga

SEQ ID NO: 101016 - DNA, 567 bp, Enterobacter aerogenes
atgaacaggaaaatagcagtaataaacagaacccgtgtccgcacaggatttgtggccggagtcctcagcctgagcctgttagcgctggcgccggcagtcgacgccgcgaccatcgagacaggtttttctccggaaggcacagccctgcagttggtcctgaagaccctcgattccgcgcagcaggaaatccggctgatggggtattccttcacctccccggaggtggttcgctcactcatcgcggcgaaacgacgtggggtggatgtccgcgtggtgctggaccagaaggcaaatagcggaaaagccagcatggccgccctgaacctgctggccagcgcgggcattccggttcgtacggtcagcgcctacaaaattttgcacgacaaagtgatcgtcgcggacaggcgcaatacagaggccggctcgttcaatttcagccgtgccgctgaccgttcgaattcagagaatgtgctggttgtatgggatgacccggctcttgcccagcgctacctgcagcactggtcgtctcgctggtcacagggaacggactggaaacagacatactga

SEQ ID NO: 101017 - DNA, 261 bp, Enterobacter aerogenes
atgtcgcagattgataatgcagtaacttcctcttctaaagataagcgggtctatcgtaaaggtagtccaatgtcagcctctgaaaaacagatggccgcagttgcaagaaagcgtgtcacacataaagaaatcaaagtctttgtacgcaacccattgaaagatatccttattgatctctgtagccgtgatggaataacgcaagcccaacttgttgaaaaattgctcgaaaaggaattcaaagctcaggggttactcaagtaa

SEQ ID NO: 101018 - DNA, 1020 bp, Enterobacter aerogenes
gtgactgaacagcacaatccgcaacactggagtcagctggatacggaagaacagatccgtttctggcagggcgttgaagatggccacgttgaatcttttctggtttccccggagaagaagcgtacccgtcgccgtcgtggtgagcactccaccaaacccaaatgcgaaaacccgtcctggttccggccgtctcactataaggcgctcggtggccagcttggccacgcctataaccgtctggtgaagaaagatccggtcacggggcaattcagcctgcgcatgcatatgtccctgcacccgttctatgtccgggaacggcagcgcgccgggcgaaaatatgctttccgtcctgaaaaacaacgtctccttgatgcgctgtggccggtgctggtcagcttctgtgatgccggtaaacacacggtagggatgtgcgtgtccaggctggccagagagctcagtccgaaagacgccaaaggtaaagtcattccggaaaccgaagtgaccattcgccgggtttcggcgctgatagctgagcaggtccgctttggtgtcctgggggtgtcagaagaaaccgcctgggatcgggagtcccgtaaacgtctgccaaagtacgtgtggatcaccgccgccggctttaagatgctgggcgttgatttaatgaagctgcaggagcagcagctgaagaaactgtgcgaaagcgaggaacgtcaggcgctcattaaagagggcctgttaggcgagcatgaggagatttctgtccataaggcgcgcaagcgctggtatcagcagcgcagccttgaagccctgaaataccgccgggcaaaaggagcggcacgtaagcgtgccaaccgtctggccagaatgccccaggatcgccaggtctatgaaatggcctgctggctgaagaagacgctgccggcagacgaactctatggctattccgcagacaaacttgagcagctggcggtacagcacctgtaccagctggaattgtcgctgagtcactcaccgccgcattag

SEQ ID NO: 101019 - DNA, 1479 bp, Enterobacter aerogenes
atgtttgcggatgttccgggcggcgcattcaccggcgtattccagaattgcacggcactgacggcaattcccgccaacctgtttaaaacatgttctgaagcgaatcattttggcggtgcattcactggctgttcgcagcttctttctgttcctgccggtctgtttgctggtctgtcgaaagtgacctatttcggcacggtcttttctggttgcagttcgctgaaaacggtcggcgcgggtttatttgccgggtgcagccaggcgcggacattcgcctctgcattttacagctgccgctctcttgaaactgtagcgaaagatattttcagcggctgcgtagaggtgacgacctttgccagtacgttttatgggtgcagcagcctgacggcgctcccgtcttttactgactgcgcgaaagtcaccactttctcatacgcttttgctaactgtggatcgctcacgaaaattgatgatgatgcttttgctgagaaagcgctggtaacgacattcacatacgcttttgtaaactgtacttcgctggtttctgtgggggacggcgcatttcggggatgtagcgcgttaaccagcctgggctatacgttttcaggttgccgctctctggtttctctcgcgggagatatgtttgccggttgcgccaaagtgacagccgtcgatttcttgttcgacaagtgctccgcgttggctggactgccaaaagaactgtttagtgacatggtatctctgaaaggtatgggatcgacattccgtgattgcagcgcactgatcgcgctaccgtccggcctgcttgatggctgcatcaatctcacttcgttaacgctgacattctcgggttgtacctcactggcggtattgcccggcgatttgctgaaaaacaacattctgctgtccggtgccggatcgacgttctacggttgcacctcactggtaaatattccgccgacgctgttcgcgtcctgctcgcttattacctcgtttggcgccacgttccagaataccggcgtggaggaaataccggaaaacctgttcagcggcaacccgttggtgacctcttacggccagactttcaggggctgtaaaaacctgcgctcagtgccagccggtctttttgccgccagcataagtgccacggtattcacgaatgtcttttcggaatgcagtgcgctggaagtcgtcggggcgggattactcaacaccacggcggtaacgacggtgggttatctgtttgacggctgcgcgtcattacgtagcgacgttaacacgatatttaatcttgcgagttacccggagattgtcaccacaacggcaatattcaggagctgcgcattactggccggtaaaggcctggtatttatggacaaggtgccgaacgtcaccgcgcactattacgcgttttatgcctgcgtgggcctggacgattacgacgatttacccggcaattggataacgaataaatcatga

SEQ ID NO: 101020 - DNA, 267 bp, Enterobacter aerogenes
atgttaagccccctgctccgccgttatacatggaatagcgcctggctatataacgccaggatatttattgcgctttgtggcaccacggttgcgccgtggtggattggcgaagtcaaactcaccatcccgttaacgcttggggtggttgccgcggcgttgaccgacctcgacgatcgccttaccgggcggttacgtaatctcgctattacgctggtctgcttctttattgcctccgcgtcggtggagttactgtttccatggccgtag

SEQ ID NO: 101021 - DNA, 939 bp, Enterobacter aerogenes
atgcgggaagaactggatttcaaatcactacgctttttctccgcgctctaccgtttggggaatgtttctccggcggcggaagcactcgatatcagtcagccaaccggtagcctgctgctaaaaaagctacgcgagcactttgacgacccgctgtttgtgcgcgttggacaacgcatggcgccaacgccgcgcgcggacgctatcgcccccaccatttttactcttttgcaactggccgataccgatctggcggctaagccggaatttatcccgcaggagagcaaccgtaacttcaccatcggcatgaccgatatcagccagatgacgcttcttcctttgctgcaaagccagctccagcggctggacgccagcggcatcacctttacggtgctgaatattgacgatcagacgcttagcgcgctggaatcagggaaatgtgatttggcgatcggctatcttacccaactgccggagagcgtctatcagcagcatctgttcgatcagtcgtatgtttgtctggcagcggacaatcacccgcgcattcgtcatcggttcagcgccgaagactggcgtcaggaaaagcaccttgcggttcgcgtcaacggcaccgcccacggcgacattgataaactgctggcggaacacagtatgccgcggcgtatcgcattgacgctgcccagctttttaggcgcgggcgagctggttgccggcagcgagatgatcgcggtggtgccggagcagctggcgcgccacatcaccaggcgttacccctgccgcagctggccgctacctttctcactggctaacatcgcgattcgccaggtctggcaccagcgtctgcaccgcgatcctgggcatatctggctgcgcaagcagattgtagatcttgccgcctcaggcggttctattagggaaggtgcgaacaagttcctgatatga

SEQ ID NO: 101022 - DNA, 1002 bp, Enterobacter aerogenes; identical to SEQ ID NO: 81319

SEQ ID NO: 101023 - DNA, 1644 bp, Enterobacter aerogenes; identical to SEQ ID NO: 81320

SEQ ID NO: 101024 - DNA, 954 bp, Enterobacter aerogenes
ttgggaagaaatgacctgcttattcgcaccttccctaacccggtgaccagtgcgtttgtactgaatcagccctgccgggtcatcctggtcggcgaccgctaccagcagatttaccgctttcgcggggcggataacgcgctcaatgcccctcagctggcgcaggcagacaaattgtggctgacggcgagttttcgttttggccctgaggtcgcgcgtatggccaacatcctgctggaccgtgccggtgaagataaacaggtaacaggcaacgggggggaagacagtgtggtgacccgaattccggagggaactgagcacattgctgtactgagccggacggtatccggtgtgattgggagtgctttaacggcaagtctcatggagaaaaaggtcttctgggtcggcgggattgaaggctacaagaccgaagagcttgaggatctgtactggttctccgccgatatgcctgaaaagatgcagtccccgcgcttcagccgggactaccgggattttgacgagtactgctcgatagccaaagccacgcaggacgtggagatgaaccaggctattcgcctgctcgatgactttttcccgctccctcaaaagctggccattatgcgccgtcaggtcgtcactcatgaaaaagaggctcaggtcacggtttcaaccgcacaccgcagcaaggggctcgaatggccggtggtgatgctgagtgaggattttaccgacattaccgacccgcttctttcgcaggatgagcggcaggatgagaccaacctgctgtacgtggctgtcacccgggccagaagaacgctcgtgcttaacgagttgatgcgctggctgagcgatgaaggcgggaaaaaccgcgagacgacgtacgaaaccgtaccgtccggaaatggagagagtgccgacagccacgaagaaacgggaaaaacttctgagaatgagtaa

SEQ ID NO: 101025 - DNA, 279 bp, Enterobacter aerogenes
gtggatgtggactggctgatcgccgagcgtcccggcagggtaaaaaccttgaagcagcatccgcgcaagaacaaaacggccatcaacatcgaatacatgaaagccagcatccgtgccagggtggagcacccgtttcgcatcatcaagcggcagttcggcttcgtgaaagccagatacaaggggctgctgaaaaacgataaccaactggcgatgttattcaccctggccaacctgtttcgggtggaccaaatgatacgtcagtgggagagatctcagtaa

SEQ ID NO: 101026 - DNA, 1812 bp, Enterobacter aerogenes
ttgtttttcggtaacgatgcagggcaaattacagcttctgatcacgccagatatttccggtgcattgaaataaaggattactttcaggagacggacgccggaatttttgatgcgctgatgtatctccctgttgaatatgtctttacatcgtctttcactacgatggataagcaagcctccatcaaggcgctggacgatcagattgataagcttgagatgactgatgatgcggctaaatcattgctggctgatttgcatgttggtctggatatggtttccagtggttacaactcttttggtaagagtcaccagacgctgattgtttttgctgacacgccggaacgtctggttaaagacaccaatatagtgaccacaacccttgaagaccttgggcttattatcacatattcgaccctgagtcttggggctgcgtattttgctcagttaccgggtaattataacttgcgccctcgcttgtgtacccttagcagtcttaattttgctgaaatggaaagcttccataacttctttacagggaaagaaaaagggaatacctggggtgacagattaattaccttgcgcggttctggtaatgatatttatcacctcaactaccatatgaccacggaaaaccagaatttctttggtaaaaacccaacgctgggacatacggaaattcttgggacatcaaacgtaggtaaaactgtccttttaatgacgaaagcatacgccgtacaacagtacggtgcgccggagtcctttccgtctaaccgaaaggtcaggaaactgaccactgttttttttgataaagacagggcgggtgaagtcggcattcgcgctatgggaggtgaatattaccgggttaagggtggcgcaccgaccgggtggaatccagcggctctgaagccaaccaagcgtaacatcgcttttatgaaggatttgataagactgatttgtacgcttaataacaataccctggatgattaccagaacggcctgatttcagatgcagttgagcgtttaatggcaagggaagatcgttcattccctgtcagtaaacttattccgcttattcttgaaccagatgatgcagaaactaagcgtcatggtatcaaggctcgtcttaaagcgtggaaacagggaggtgaatacggctgggtcattgataatcgcacagatacttttgacgtatccaatctggatgtttttggtgttgatggtacggaatttctggatgataaagttgttgccccggtagcttcgttttatctgatttatcgcgtaacaatgctggccgacggccgacgactcattatttatatggatgagttctggcagtggctgaacaacgatgctttcagggatttcgtttataacaaactcaagactggacgtaagctggatatggtgctcgttgtcgctacgcagtcgccggatgagctgattaaaacgccgatagcagctgctgttcgtgaacagtgtgccacacatatctatcttgcaaatcctaaagccaagcgtggggaatatgtcgacggcctacaggtaaaagagctttattttgacaaaattaaagctattgacccgctttcgcgtcagttcatggtggtcaaaaacccacagcggcagggcgaacgcgatgactttgcagcctttgcaaagttagatctgggtaaagccgcttattatctcccgattttaagtgcttctacggagcagctggagctgttcgatgaaatctggaaagaagggatgaaaccggaagactggattgatatctatcttgaacgtgccaatcgtggaattaattaa

SEQ ID NO: 101027 - DNA, 750 bp, Enterobacter aerogenes
atgatgaaaaaacaatttctggccgcaacgctcatctgttgctcggcaagcgcctttgctataggtagcggggtgattgtgcatgatgcaaagtcagcgttagatacggcggcgcagtgggtaaaagaggccaaacagtgggagaacgagcttacggcctataaggacgagctgttaacgaaaacaggtatccgtgacgttcaggggctggttcaggacgcacagtctgtcagtaaggaactaacacagatttacgaccagggtaatgcatttatcgatgactacattaaaaaccctgatgctgtgctctctgcgcaggctaaatcgctgctttccgactacaaggtaacggatacctgtaaagggctggggtacacaggtaaccaggttcggggatgtgaggcgacattcctgtcccagttggcaggggttgagtacggtaatcagcttgaagaaaagctgcgtagcgacaaccagtcgatgaaagaccttatcgatcaggttaaaaacgcgaaggacactaaagctacacaggacgcgactaatgctgtctctctggagaacctgaagttcgagaagctcaaatttcagtatgaaatgtatcgcgataagcagcgcgatcttgcagaatacaagatgaagatgtcggaggctgcattccaaaagaaacagttggatgcagtcaatgcggatacaccaattgttgattataagtcagcgtttgatcagcagagctatgaaatgaactga

SEQ ID NO: 101028 - DNA, 258 bp, Enterobacter aerogenes
ttgaaaaaatatggagtagttgcagcgttagggcttacattctttcttgccgggtgtgaagaggtaaagtctgtagactggtggcagtctcacgtagacgaagcaactaaaaaagtagctgaatgcaaaaagtctggtagtgatagtgacaattgtaaaaatgctaaagaaggtttgtttagatataagcaattgcatcctaagcacattgacattaaagacgcattcaaagatgttttgggtaaagagggaagttaa

SEQ ID NO: 101029 - DNA, 930 bp, Enterobacter aerogenes
atgaaaataagaaaaggagcgttagtaattgcgcttctgatggctgcgcacatttgtaatgcggcagtacagccatcgggaagccgcttcgatccacgaaaccagattgtcagttataaccctcaaaatacgactgttattaacagtgcagtcggctatacaaccacactggtatttgatgacgacgaaactgttatcagtgccagaacaggcttcccccagggatggtcggtgaataaagaagataatcttgtttatgtcgaagtgaagccagttaaacagacggtgcagaacaacaacacggacgagaacggaaagcagtcatctgaagtcgttaacgtggctcttgaccctgaaaccgatctggaacgctggcgaacaaacctgtttgtccgtaccacaaaacgcaattacagcatggagctgaacgcccggacgtttcgccagccggataaaattgcttttgttgtgaattaccagtacccgcaggaaaggcgtaaagagcaggccgagatcgagaaaaaaaggattgaggcttacaacaagcgacaggaagaaaaaaccatcaacaacgcgcttgaaaatgccaaatctccgcgcaactggcagtactggaagcgagttgctgaaggtagccaggatatcagcccggattatgcatatgacgatggccgttatacctggtttggattcagcccactgaagaaaatcccgagtatttttgtcatgagcggcgatcaggaaaccctgactaatccggtagtgaagaaaagcagcagttttaccgttgtgggtgtgcctgtagaccagcgttttgtgttgcgtatcggaaatcaggttgtcggggttgaaaatcggggctttggcaaagtccggcttccggcaggagacaccgtatctccgaaagttgaaaaagaggtgatccagtga

SEQ ID NO: 101030 - DNA, 1212 bp, Enterobacter aerogenes
gtgagcgaacaggaaaataaaactctcaccgccgttgaaattgagcgggaactgcgcgaacggcgacagaaagagcttgagcaggccgacaaaacagataaagaggaggattcaggacggccagctaacagcctgggcatcgagaagcttaaaaaatcacgtaaggggctaatcatcattgtggccgcctttgttctgctggctgctggggtatccgtctattatgtcccttccatcatccgttcaatgtccagtaatgacgaaaaaccagccagtagtgatgtggctacggggtcggtgaagcgtcagaccgggttaagcgatgacgttgacccttttaattctgaccaaaagacgcagggcgggcaggaagagaaaaaaggggataacaacagcgggaaagctgaagcagcgccagaaagcgtacagcataacttcagccgtgcgcttgatgtgtcttatggtggcagtagctctgcggcatcgggaggttccggcagcgcctcaacacaaacagccagtgaaaccaaaggtggaggtaataccagcacgacacaggaggtcgagcctgttaatgccggagcgcccgtatcgctgtcgaaaattaccagggttccctatgatcccaatctatttattccagaaaatacgggcataccctgttcactggacagaaagtttatctctgatctcgcaggaaaactggtctgcacggttaattctgacatttacagtgccaacggtaatgtaaaactcatcgaaaaaggaactgccgcccatgtgatttataaagccggttcccttcagcacggtcagggcgctgtattccttatggcgaccaaactgagaacacgcactgcaccgtttatcgatattccgctgattgatacacaggcggctgggccattaggtgaggccggagcgtcaggctggattgatacgcatttttgggagcgtttttccggggctatgatggttggcatgatccccgatgtggctcagtgggcgagtggagccgctaaaaacaataaggataaccagacggactataccgcaaacagccgacaggcttttgctgatatcgcccgtgaagccttttctaacagtgtgaatattccaccaacgctttataaaaatcagggggagattattactctgattgtcggtcaggatctggatttctcaggtatctataaactgaaaatgcgataa

SEQ ID NO: 101031 - DNA, 1836 bp, Enterobacter aerogenes
atgtctcttaaactccctgataaagggcagtggctctttatcggttttgttatgtgtctttttacgtattatgcaggttctgttgctgtctacttttttaatggtaaaacgccactgttcatatggaagaacttcgactctatgttactctggcgactcatgacagaaagtaatatacggtcagatatcagaattacggcaatgcccgctcttctttctggtttagctgcctcagttatcgttcccgtttttattatctggcaattgaataaaaaagatttttctctctatggtgatgcgaaatttgccagcgatgatgatttaaaaaaatcaaagctgctaaaatgggagaaagagaatgacgacgatatacttgtcggcgcttacaagggaaaatatctctggtatacggctcctgattttgtttcgctgggtgcaggtacacgcgcgggtaaaggtgctgcaataggaattcctaatcttctggtaagaaagcactctcttattgctttagacccaaaacaggaactgtggaaaatcaccagtaaagttcgcgaggtgattctccagaataaagtttttttgttagacccctttaacagtaaaacgcataagtttaacccgcttttctatattgatttaaaagctgagagtggcgctaaagacttactgaagctgatagaaattctgttcccgtcttatggtatgacgggagccgaagcccactttaacaaccttgccgggcaatactggactggccttgcaaaactgcttcacttttttatcaattacgctcctgactggcttaacgaattcaatcttaaacccattttctcaatcggttctgttgttgacctttacagcaatattgatcgggaaaacgtactggctaaccgtgaagactttgaggggatagcgggattagatgaaacggcattgtttcacttacgggatgcattgacgaaaatccgtgagtaccacgaaactgaagacgaacagcgttcaagtatcgatggttcattccgtaaaaaaatgagtctgttttacctccctaccgtcagaaaatgtactgacggtaatgattttgaccttcgccagctgcgccgggaagatatctctatttatgttggcgtgaatgcggaggatatgtcccttgcctatgacttcctgaacctgttctttaactttgtcgttgaagtcacattgagggaaaacccggattttgacccaacgcttaagcatgactgtttaatgtttctagatgagttcccttcaattggttatatgccgattattaaaaaaggttcggggtacattgcaggctttaaactcaagcttttgacgatttatcagaatatcagccagcttaatgaaatctacggtatagagggagctaagactctgatgagtgcgcacccttgccggattatctatgctgtcagtgaagaggatgatgctaaaaagatttcagagaagcttggttatacaaccgctaagtctactggttccagtaaaacgagcggtcgttcgacatcaaaaagcaattccgaaagtgacgctcaacgcgctctggtacttccacaggagctgggaacgctggagttttcagaggagtttatcatcctgaagggtgagaaccctgttaaagccaaaaaagccctttactaccttgattcgtattttatggacaggcttatgctggtaagtccgaagctggctgctttaacgtccagtcttaacaagacaaaaaatatctttggtgttaaggggcttaaatacccttcaaaagaaaaaatgctttccgtaggtgagcttgaatctgaggttttattatga

SEQ ID NO: 101032 - DNA, 396 bp, Enterobacter aerogenes
atgaaaagaatagtgctggctggttttgtctttctttctgcctgttcatcacctcctgaacccccacaggttgactggaagaaaaacccggaaacaatgaattcacagttaatggactggcaacctacttttacggtaattaaatctgaccgtgttaattcatcctgggtaaaggttataaaaaactttactcctgagaaccgtctttacgatgatgcggttttctatgctgttgctcattcagactcaattattattgaaagtagccggggtgaagacttctttactgcaaaaaactggcttaggtctaacggtgcatatggattaatccagtaccgatataagcgtgatgaatttggtgttaaatccatcaatatctatcttcagaaaggatga

SEQ ID NO: 101033 - DNA, 339 bp, Enterobacter aerogenes
atgaatgttcgcaatgtgcttatagttccgctcgttcttgctgtgttgacaacgcctgctttagccaaaaagcataaccacactgacgggttaaaccagacgggtgatccatgtgaattgttaacctgcatggccggaaaattacagggggatacacagccagcctgtcagacagttaatcagcgctttttcaatgtccgggtttttaccccctactataatcctgaagccacagcaaggcttaggcaaagtatcttaaatacctgtgacggcgctgtaatcaataaagacaatctggaaatgattattcagcgctatggtcgctcattccaggaataa

SEQ ID NO: 101034 - DNA, 204 bp, Enterobacter aerogenes
atggataaaatgattttaaaaatgtcacgtcataatattcaaacagtaacggttactcagaatctaagtgatttgaaaaatacaggtaatgagacagtgaatgcgattatcgaaaactgtaccgcttacatctctctggttaattgcaatgataaaatttttctggatgaatgtgacgttgagaaacaggataaagaggattaa

SEQ ID NO: 101035 - DNA, 336 bp, Enterobacter aerogenes
atggtgaggattatcatgggatcagcagcaggaagagtcagtgatattctgtttattttcataggatactctaaaaaggttgcctcagtgtttactcggctactcttttttatggcttggttccctgtattggtttatgggttttatcgtatcgccgttatcttatggggaagtacatctgaatctgaatactattactttgagcgtttttttaattatacaattaatttgtatagcttgattattcctatgttggtagttgttggtgtttcaatcatcgtgattttctcactgtttaagataggaactatcatgtgggaggaaaagaaacgatga

SEQ ID NO: 101036 - DNA, 471 bp, Enterobacter aerogenes
atgaagtgttttctttatgctttttctctttttgtagtcgtgcttccagctacgttgtgtgcagcagaaattcagggaaaagttatccgtgtgctcgatggtgacaccatcgaagtattgcaggataaaaagcccgtcaggattcgcctggcaaacatcgatgcaccggaaaagaaacaggctttcgggcgctggtcaaccaatcagcttaaaggcctggttgcagcgctgcccgtcacggtgacgtatacgcagacagatcgctacgggcgcattatcgggcgtgtgttcacggcgaacggcacagaggccaaccgctttatggtgcaatctggtgcagcatgggtttacgacaagtacaacagcgataattcattaccggctctgcaaagggcagcacaggaacaaaagcgcggcctgtgggctgacagtcaaccagtgccgccgtgggaatggcggcatagtaaataa

SEQ ID NO: 101037 - DNA, 774 bp, Enterobacter aerogenes
atgatgactgaatccgataaagaacgtttcaataaccgtttatgtgttggtaacttgcttgtaagtgcagatgtttatgttacaccaggcatgacagaaagcgcggctgaggtaaagttaatcgtccctaacgatgattatcaaaaggcaatggatttgtatgatcgtatttgccagtttgctttgcttcatggtgaagatttacaagggttgttccagacagacagatattactatatgtcatgtttcgtgcgtgatattgaagcatttaagaaagaatttgaaaatgaggaggagttaaaccctttattcaatcatgataagggtgaaacggctgagtttcttatcagtttcccggagaaagctaactatgatgataaggaaccagttaaacaatcctttctggaaatcacacaaaaacatgtcgattcattagatgaacttacatggggtaattttgaacacagagcattcactggcggaacggtaggttttggcatcaatccccatacaatggaacgcattaactttgatgatgagcgtgacaaaataacaaaactatctcgtaaggatttcgtaacgtctaatctcactgattctttcgaagatgatttttatgtcaatcctttgttcaataaagcagaacaaattggtgagattgacggttattccgttttcttcaatcccaggggtttttatttttactggaacaaagaaaccgaatacctgcttgaaagctggctgacgtttcctgcttatccgtatggctggtaa

SEQ ID NO: 101038 - DNA, 657 bp, Enterobacter aerogenes
atgaaagtgagttcaataaagacggtttatgattttatgcgttactgccgtatgccgctctggtttcagcgttcaatcagggatatgaaagtcggtgacaccttcattcttggaaaatacacgcagcctgtttctcacgacagtgattcgttttgtgtacctccgcgctattcagcttgtctggatggtagcgaggcttgcttcgttgcggaggcgtggatagaaaaagagcgcggggtatactctttttacgctacatggacattcccgacaaaaccagaacgtgcgcatgttatgacatttggggaattcagaatccacaaaggcggcattatagagttcgataataaaaacgttgaacctgacgataagaaccatacggtaagaagtttcgcgcttgtatctcgttatctcgcgcatatgctcaactgcatgtctgatgaagataaaaaagtctattttaagaataacagttctcctttattcaatggtgtatggctggatagtgattgcaatgaaaggagacagcgtgccgtagaagttgatgggaaaattaaacgagtatggattaattacaaagattatatgccaacgcatcaactttccgcaattgttgaagctgcctttgctactggcgcacttcagctggaggattaa

SEQ ID NO: 101039 - DNA, 657 bp, Enterobacter aerogenes
atggaacatgataagaaaacagcacaagacgccctgaaaaaatcgcaagggcatgttctggttcatgggaggacggggacaggaaaaagtaaactactcgaagaagcaactatccccgattcgcgttactttgacttttcaaaaatgtgcggtgcaacatgttatccagacttgcatttcctttgccgtactaatgaagatatttacttggatcatattctggatgcgaaggaatccactgtcattctcgatagtgtagaatttccacagaacataaatgattcatttctgtatgattttttaaaaatcatgagcgccagagggaagcgagttattgctgttgcatttacttctaacactctggaaaactttaagccagtgtttgagtatgaaatagaaacccggcgattagaagatggttctttcacctgcacaacaacgagtaaaacaggcagcgtggagtcattattgaaaaaccgatatgtctgggaggatgatgacaatgaagatactttttcattagcaagggatgtcagtgaccagctatcaataatagttaacgcctttgacaaagataatgcacaagaaattattgttgcggcagcgggcgaaattcagtccttagtacaaaaagattgtattgacaggagccattaa

SEQ ID NO: 101040 - DNA, 2322 bp, Enterobacter aerogenes
atgagactttttattgctgaaaaaccatcattagcaaaagcgattttcgaaggattaggtggcaaccctaatacggagaagaaaaacggttattttgaacacggcgctgatgctgttacctggtgttatggtcatatgcttgagctttatgacccgcaggattatgacgaaaaatatgctaactggcgattcagcgatttaccgattaaagccgtttatccacccacgtacaaactaaaacctgaatctgaagcacagacccgcattattctgtcgctgatagaaaaagccgatagcattgttcatgctggcgaccccgacgatgaagggtgtttactggttgatgagattttaggttatgccggaaacaagaagcccgtccagcggctgctggttgccgatctcaaccttgcgccagtgcaaaaatcgctggcaaacatgcagcctaacgaaaaatttcgcggcatgacagatagcgctttggcacgttctctgtgcgatcaggactttggttataatatgacgcgaggctgtacgctcaaaggccgtgagaagggatatgacggtgttctgaacgttggtcgtgtacagagtgcggttctcggactggtgaacatgcgcacgctggcaaaccagaatcacactgaaagcttttactacgatgttttcgccagtctgaagatgaacgggaatcatattaaggcgaaatatcagacaacggacggcgatcagatcgacgataaaaaacgcctgatttcagaagcacaggccgcgcatattgccgaacgggtagcgggtaaggacgctttcgtgacgatcgcgacaactaaaccggaaaataccaaaccgccgctgcccttgaacttgtccacgcttcagcaactttgtgcaaaacgatacggttatacggctaaggaaacgctggatgtgatgcaggggctgtatgaaacacacaagctgctgacctatccccgctctgacaaccgctatctttcagatgagcatttttatcaggccggggatattgcagtcgctatcgcggccacaatgccggaactggcgtcggcaaccgcagatatggagaaggaacaaaagcataaagcctttaacgccagtaagatcgaggcacaccatgccattattccgacgacgaaaagcggagccggtattcagctcagtgagaaagagcggaacgtctataacctggtggccgtctatttcattggtctgttttacccggatgccatccgtgacaaaacaaaaattcacttcgatattaaaggtgataccttcacggccacacaaagcgttctgatacaaaagggctgggaagcgctgggtaaagacaatgatgaagaggacgatgccgaagatgccggaacgggcggttttgatttatcgactctgaaatttaatgacagcggcctgtgtgagtcggctgacgtggacaagaaaaagacaactccaccccgctattttacggagtcaacgttactggccgcgatgaccagtgcggcaaaatttatcgatgatccggctctgagaaaagcgcttgaagccaaagacgaggggagcagtgaccggggcagtatcggcacagaagctacccgtgcgggtatccttgaaaaactggctgccaataccgggcttatctcgatagagaaagaaaagggctactctgagttggtatggaaaacaacaaaacaggggcaggagttctgcgctgctcttccgcctgaagtgattaaacccaacatatcggcaatatgggctgaaaaacaggcgcaaatcaaatccggcgaactgaccgttgaggattttatcagagacaacgacgattatattcgcggtttaatcgacgatctggataaaaacgggattaacatttcgtctaatgccacgccctgccctgtctgtagcaaaggttttctgcgcaaacgtaaggggcagaatggctttttctgggggtgctcatgttatcctgagtgtaaaacatcattcccggataaagatggagaacctgttacagagaaacaggcttctgagggggcaagcgcccgtcttggtgtcccctgcccttcctgtaacaaagagattttaatcaggccaaaaggctttttctgtacggggtgtgagtttaaaatctggtctgagttttccggcaagaaactgacacaaaatcaggttgaaacggtgataaaaaaaggtaaaaccagcgagattaaagggtttaccagcaaagccgggaaaaaatttgacgctgtagttaccttgcaggataaatctacaggcaaacttggttttgagttcaggaaaaaataa

SEQ ID NO: 101041 - DNA, 210 bp, Enterobacter aerogenes
atggtgaaaaccagacaagactggcttttccagttaagaaagtgccaacaccgggaaaccttagagaaagttatagaaaaaaatgaacgcagccttaccgctggagagctggtaacattttattctgctgctgatcaccgattggctgagataatcatgaataaactgtttgataaaatccccgcatcagtctggcaacacgtcagataa

SEQ ID NO: 101042 - DNA, 456 bp, Enterobacter aerogenes
atgagcgataatgaaacgtttgatgcagcccgaagacttctgacgaatattcgttctgtccgtgtctttgcgcgtgaaacgagctttgagcaactgctggaaatgcaggaaaagttgaacgctgttatcgaagagcggcgagaagatgctgaacgtgaagccgcagaacgtcaggaacgtgagaaaaaacgtcaggaattgcttcagctcatcgctggggaaggtttttctcctgaagagttgcttggtctgaccgacgatgcgccaaatgcacgtaagagtaaattgccgaaagcaccgccaaagtatcagtttgaagaaaatggcgaagttaaattctggtctggccgtggacgttcgccaaaaccgattgatgaagcgttaaaggctggccgttctctggacgattttcttatcaagaaagagccgtctggttctgctgacgataaacagtaa

SEQ ID NO: 101043 - DNA, 270 bp, Enterobacter aerogenes
gtgagtgacttatcaccctacaaacaaatcatcccggcaacagactggtatttcaggcatgataatgtccccggtgagcatggcgaatcgaccgtataccagcttgctgcatgggcgctaaaagaaaatggggatattgtcggactggtgactgttcgcgatatcgatacagggcatcctaagctggtaacgccgcctccagttcccggagattacttgcataaagaacagctcaccgatgatgaaaaaacgtgggcgaaaaagcgttga

SEQ ID NO: 101044 - DNA, 234 bp, Enterobacter aerogenes
atggatcatgtcggaatagcaaaggtatggcgtcagcggaatcaggaacatgctgattccggtgttgtgcttatatgggatggcgaggcgtatggctggaaaaacgttctccgcgatccacagcatgaacgcccaggagcaattgccgtcgatgccgaaggtaatatgtttattgccgagggcgggaatgactatgacggcgctaaatgctgggtagtctttcaggagtcctga

SEQ ID NO: 101045 - DNA, 261 bp, Enterobacter aerogenes
atggggcattacaccatcagaacaaatgacgatgaagatcaggttatcagaaaggcgcaggaggttaccggaatggcgtcagccagtaaagcctttatgacggccatccttgagcttcagcgtaacagagacgagataacgcagctcaggcgctcactagcgcaagaaaaagcgcggagtcaggagctagtatcatcggtgaatcaattccgttccagcctgaatactatgttcgagctggccgacaacggcaaaagttaa

SEQ ID NO: 101046 - DNA, 330 bp, Enterobacter aerogenes
atgtttagcgttgtttatcacccggaagccagggaagaagccacagcattacccgtaaaaatcagggtgaagtttgaccgtctcatcggcaaactggagtatgacgcccgattactgcgggagccggacacgaagcccctgggcgatggactttttgagatccgcacgatggggacggacatagccaggggaatctgggtataccacaaaggcaataccatcatcatgctccgtgttttcatcaagaagtcacagaaaacgccagcgaaagaaatcgatctcgccaaaaagcggttagcggaggtacttaatgaaactggtaagccataa

SEQ ID NO: 101047 - DNA, 282 bp, Enterobacter aerogenes
atgaaactggtaagccataaagaactgcataacgagtggatgcaggacgatgaatatcgcgctgcatggcaggaagaagaacgtaaggaaaagctcagggagctgcttgctgaatggcgcaagcatgacaacctgacaaaagcgcaggttgctgaacgcatgggggttacacctccggttatttctcgcctggaaaacaacatcaccaaagccagcatcgacacactgacccgctacgctcacgcctgcggcatcaagaaacctgtcattgccctgtactga

SEQ ID NO: 101048 - DNA, 879 bp, Enterobacter aerogenes
atgagtactctttttaaagggctgacacgccccgctttaatccgggggttgggcgttccgctctaccccttccttggaatgtgccttatttctgtattacttggtgtatggattcatgatgcaatgtatgcactcatattgccagggtggtatgccatcaagcgagtaacacagatcgatgagcgtttctttgacctgctttatctacgaactgtaatcaaaggtcatcccttgtcaaacaaacgcttcagtgccgtccattatgcggggagccagtatgatgaagttgatatttccagagtggacaattttatgaagctgaaagaccagtcttctattgaggagctgataccgtactcttctcatatcacagataatctaatcgtcacaaaaagccgtgatttgctggctacctggcatattgacggcgcttactttgaatgtgttgatgaggaggatctgacgttactgacagaccaactcaacacgcttattcgaagctttgagggtaagcctgtgacgttctacacacaccgtgttcgtgtaaagaaagaggttcagtcttcatttaacagtaaaatcccatttgttaaccgggttatgaatgattattaccgttctctttctgagcctgaatattttgaaaacaaactttatctgacagtctgttataagcctttcaatgctgaagataaagtttcacattttctttcaaggaataagcggaataaaaatatttttgatgaacccattaacgacatgaacgaaatttgtggcagacttgatacttatctgtccaggttccactctcgccgtcttggtttgtttgaagaaaatagcaaggtattttctgaccaactttccctttttggggtttga

SEQ ID NO: 101049 - DNA, 291 bp, Enterobacter aerogenes
atgttgaaactgaataaacgttacttaacactcactgtctttatggctgccttaatgctttgtgttgcggaaccagcttttgctgatgatgtatctacaaagactaccggttttttacaaaagatcattgatttccttactgacttgagaaaaccagcaatcaccattatttgcttaggtattgcatatattgcgctgtttgcacgtcaacatatgacatggatttatcctctgattatcgggatgattatctttatcattgctccttacgtaccggactggttgtcataa

SEQ ID NO: 101050 - DNA, 645 bp, Enterobacter aerogenes
atgttatctacctcagcttttatcgcgcttgctatgcaatgcgccgccagcgttcatcctgatactgctcatgaagttgcaagggttgaatctggctttaatccttatgctatagccgagattataccgaaaggtgagcgtaagcccggtgatagtggcgtaatttcttatttcccaagttctaaggaggatgcactaagcataataaaaaaaattgaagctagaaatcaccgttattcaacgggtcttatgcaaataacaagcactaatttttctaaatatggcgtcaatgcagaaaaacttttctcgcagtgtacaaaccttaccgtattcgaaaaaatcatgcttgattgctatcaaaggggagggagtttaaaaaacgctcttagctgttattactctggaaattttgtgacggggcaaaaatctgaatcaaattttaataatacgagctatacgcagcgtattggttatagccgtccagacaacaaaaaggtatgggctgttccatcggttaaggatgaaataggaaaggagactgcaacacaggacattacgcgaaaagaaactactgtttatccaaaatatgccatgcgtggcaccgtatcagatgaaaaggaaacaaacgatgttgaaactgaataa

SEQ ID NO: 101051 - DNA, 228 bp, Enterobacter aerogenes
atgactgttaccagaaaaaagacttcaagcaagcgcaagcctcaacgtaataccctctatctcccttctgacgttcgtgatgaagttgagcgaatcgctgttgagattagctaccgccggggaaggcgtatttctgactctggttttgtgcagtatctcattaaaacatgttcacaaaaggcaatagatgaactcataaacggagccgatatcgactccgaagagtaa

SEQ ID NO: 101052 - DNA, 492 bp, Enterobacter aerogenes
atgaaatggtacgttttgcaatttactacgacgaggtttgctgctgttttctcccatcttgaacagcataacttttcttactactgccctatgatttcagaaaagtatcgccgcccggataaacaaatctcgttcagagaaaggctgttaccacttttcccagggtatcttttcatccaggccgattttgaaaaaattcactcatctactatcaccgcattaccttatgttcagcggtttattgcttttggtggagagccgttacctgtacctgatgaggaaatatttaacgtacaacaaggagaacggaatcaacttagccatactaacgccccccgtttggtggaaataatgctgatggatgatccaaggaagagaagtatagccatgctcaactacatcacagaaaaaagcttaacccacaaaatgaaacggaagaaaaatgactgttaccagaaaaaagacttcaagcaagcgcaagcctcaacgtaa

SEQ ID NO: 101053 - DNA, 549 bp, Enterobacter aerogenes
atgaagcaaattaatttcagactagaagaaaaacagcatgataatctacttgaatgtctgaaggttatttatccagatgagcctggtttaactgttgctaaaggcatgaaattgcttgccagtgcattacttaaaagcaaagtaacagaagatgataatgataactttatgccagatactaatgattttatcaaaactacaatgtatttaacaatgaaacagcggaataaaatagaaaaagccgcaaagcgtcatggatggactttgtccagagagtgccgctaccgtattcagaccaccttagataatgaactggatttctttgatcaagaacttcttatgatgaatcggtgtcgcaatgctatcgataaagtaggccggaattttcactacatcatccttaatgatcaggcaagagttcttgataaagatgggttctatcaggatgcagaaaagcttgaaacagaaatcattaatcttaaaagtgagtttgaaaactacataatgttatgcaaaggtcgaactgtatctaataaggtggaggtgtaa

SEQ ID NO: 101054 - DNA, 258 bp, Enterobacter aerogenes
atgacaaagcaggagtttttaacttttatcagtgatcaacaaaaagaaggtgcggttcgtttttcccttgcattcaacagtaaaggtgaaatagtcattcactggacgaataaagaagggctgagggtttggagagttttaaccggaaacagagggaaaagaccaagccacgcaaacagggaaagaatgagcaacttacgccgctggttgtgtgatgcccgtcagggcatggtaggcgacacaccagaccctgaatag

SEQ ID NO: 101055 - DNA, 342 bp, Enterobacter aerogenes
atgaaaacttatgccatcgattttaaatcagtaaacgttaaaaaagaaaccataaactgcatatccttcatccagtcagaaacactttttcttgccattcatacattcgaagaaaaaaaccggggtcgtggttacattactttgtctgttcgcgaagtagataacaacgaacttagcgcgattaactcacttaaaaagaacgtaacattctggttcaacgaatgtggcctgtcaaaagaaggcgttttaagagagattgaatcatggttcaattttgccttcacaacgaaggagcagaatgaagctaaaagagaggtgattaatcttttgaataaaaactga

SEQ ID NO: 101056 - DNA, 267 bp, Enterobacter aerogenes
atggatgaaatactgagtgacagaaaaaacaaaggtaatgttacatacagaattgttgtttctgaagattcaggacgcatcttcatcgagctggaaaaactgatgaaggttagagcaaaagaatctgaaaagaaaacaacaaaaaagattgtttatcagcagtcttttttcaaagatgaatttgatagggtaaagaatgaaattgaagacccaatattattgcaattttgtgtcgatacattgttgaaggtgaaaaaatatgattga

SEQ ID NO: 101057 - DNA, 543 bp, Enterobacter aerogenes
atgaaatcatttttcttgctctatcggcctgtttttgaaatcgtctgccgtatcctggggaacggctggcgcgtaaacctgctggatgattgtcaatatcgtataaaactaacgtcgccacgatttaaaaattattctgtacacattcgaatggacaaaggaaggttagctatcataggcagcgtggatagccgtaactggcgtagtccatgtcatacatgcactgtatcaccacagcgtaaccccgtagagatagccgcagatattgaaaagaaaatacttataaatgcattacaggatgttgaaacttcgcgagagtatgagaagaaactacagaaagagcgggaagaaaggcaaatactgaaaggcatgttgtcacaacttgttaagcttgaaaactggcacggaacgttaacagggtttaaagctgtaaatggtttgaatgggcatgtgacagagcgtggtgatggttatgaagtcctgattcggggattggacatagatcagctcgtaaagttatccggcttaattaaacaactatga

SEQ ID NO: 101058 - DNA, 516 bp, Enterobacter aerogenes
atgaacattcaggaagcattaaacgtctttggtttatctggtgaattgactgaaaaggatatcaaggctgcatataaaaaagcggctttaaaatatcatccagaccgtaatccgttaggcgctgaactgatgaaagctgtaaacgctgcttttgattttctgatggcaaacatcgataaaattaattcgtttcagagcaccgatgaaaacgcacactataactacggtgacgatatggaaagcgtgttgaacgtactcaccgggttatcaggtttagtttatgaagttataggcaactggatctggattagtggggaaactcgcgaacataaagacacgttgaaagaaataggttgcaaatgggcagcgaagaaaaaacagtggttttaccgtcctgaagaacataagagccgctggaaccgaaaagaacacagtattgatgaaatccgcgagatgtacggcactgccgggaagcgtaaagcagctggcaggcagaaagtagaaaacagagcatag

SEQ ID NO: 101059 - DNA, 903 bp, Enterobacter aerogenes
atgagaataaaagttatgaaaaatgtaactgaaaaaacgaagattcgtcacaggaacgaaataaataaaactctggctcaacttccattggcagccaaaagggttctgtgtctggccttggtttatgttgatccaaaaaaagaaatgagaatggggcagacctttaaaattcgggctgatatgtacgcaaagatagccggaatacatccttctgttgcttataagcaagtcaaggaaggtgctgaattgttaaatgtcagtaaactttcccttacggggaatgatatgaaggaattagcaaaggaacttggtcttccaaattcaaaaaacatcgaccgccttgacttatcgattactgattattgtgcatataaccaaaatgagggatttgtaattctaagatttggatacactatcacgccttatatatcaagattaattggggcggaaaataaattcacaacacaactaattgcgtcctcattaaaattgagaggggagtattcgtggtcattgtatcagttaattaggaagaattactcaacgtttaaagggaaaaattcatttagcctatctctggaagagttgaaggatgaacttattgcttacaatattgatgataatggagatattatatataagtatccagagtaccctatattcaagcgagaggtaataaataaggccatcaaagaaataaaagaaaaaactgaggtgactttcctgtcttgcgttgtcgatgaaaaagaaggaaggaaagttagtaagttacgatttgaatacgctatagatgaagataaatttgccgaatcaggctctgattttcctatagagttatttgacgatgatgattctgcttttcttgaggagtttgatagaaaagtaccacccaaaaagaaatga

SEQ ID NO: 101060 - DNA, 444 bp, Enterobacter aerogenes
atggctaaaatctatgatttcccgctgggcgcagagcgagacaaactaaggcatgaaattgacagggaacgtaaaaagcaacgtagagtaaaaacgggcaatccgtttatccgacacgttaaatggttctgtttttatcttcgccttgtcacagctggcgcactgcatgtagtttctgttattaccctggctgtattgggggctttcagtaaggctattttctggattggcgggatggtttgtgtcgtcacatggtttcaccttgagcgccagttctggacgccacataatttcacgatccctgttatcgtaagcctgtggggattgagtttgtttgccactcccctaatggagatgataaacaaaaaaatgccgtggtatcgtctcctggttcctgatgcgaaagaagcaagcacggagacacctgatgatgagtcgcggtga

SEQ ID NO: 101061 - DNA, 357 bp, Enterobacter aerogenes
atgaagtttgatgtaaaagagtttattgatgataaatacgcaaaagctattaatattttaaaggaaaacctcaaagaaaactatcatgttttttatgggatcagattgagtgaaattctttttcctgccagtgagtatggctctgatgctttctttaaagaatttgaatcaattaacagtgtaatactaccattagtaatctttgatttaacacaacgcaagccaatgatgattatcagcttcgataagatatctgatgccagtttgttggcagggacgggtattgtggttcttgaatgtatggctctgtccgatcttctgacaaatgataatattgctattttatataaaatctaa

SEQ ID NO: 101062 - DNA, 978 bp, Enterobacter aerogenes
atgagatatttaaccgaattaatctgtcaactctacaggttgacagatcaccataagctgaccgctgcaacgtttaaaaatcttgctgatattaagttagttgaacctacagcggatgcagacaccatattgcagcttgaaaatatatttagcgaatactcactgagatatattgacagggatctggctgagattctgagtaacataataactacagataaaaaacactctctggatttcgattttaacaaattacagtctctgactgcctcgaaaagtttcggttgtggatggaacaaggtaataaatggtagttggttcaaaaacctttactcatggggggaggggatgtatcccgccaaaaacctgaaagctgaaaacatttcagactgggaggataatatatggcacattgagcatgaaggtttcaaccctcgcgattctatcaatgttacatattactcctggcttgaccgctatgtagcttcaaacagtggtggttcacatcatgcagcaatggttgtatatcaatctgtcagagacaaattagagtataaacgagaagcggttattgaacaactgagcataaattcaaacaccgttgaaatacttgaccagaactactattcattcatattccagataaaacgccctagtaataagacagaaatttatacatcagaatatgaatttatagatgctttaaaagagtttgtagaaaacagatatactatacttaatcctgtcaattacgtttccagtattaaattagtttttattccaaaacatgcactaaaaacaaatgacaaaactttccgtaactggttctattctgcaattagttgcgggaaaataatatcattccccgattatctgaaaaatccagcgcattaccatacacaccattactcacatgaactaaactcgataacacttggtgaccctagcagaaagtataaactgagagaagattcttag

SEQ ID NO: 101063 - DNA, 282 bp, Enterobacter aerogenes
atggttttaaaattgaaaacgccaaccgttccggcgacagaagaacaggcaacaaacgcagaaacagcacgctttatctctggagccacaaggaagccaacaccaggtaaagcgaagctggttaatttccggctttctgaagcctttgacgatatcctagaggctgaggcgatcagaacaggacagagcaggacaaccgttctaaaggcagcgctggccgcatttgataatctggacgaaaaccagaaaaaccactggttactggaatcagcaaaattctaa

SEQ ID NO: 101064 - DNA, 663 bp, Enterobacter aerogenes
atgggaaaaattttactggtggtttcagataagggcggggtagggaaaagcacctactcagctaacacagcatctatgctggcaaacagagaaaaatcggtaatcatccttaaaaccgataagaacaatgaccttatcagctggaatgaaaaacgcagggagaatagcctcccaacagtaccagtctacgaggcatacggtaatgtaagcaaagagattaaccgcctgagcaagctgtgcgatgttctgatcgttgactgccccggacatgacagccttgagttccgtagcgcactgactgtgtcagatatcatgataactctggttaaagcgtcatctgactttgaaagtgaaacactgacgagcgtaaccgagaaagtccgcatggctcagaaatcaaacgcagccctgcaaccctgggtattacttaccagaataaacccaagcaagccacgccacagaaaagccgctattgagctggataaattattacgctcagacgacgtctggatacagccactaaaaaaccgcatgtcagaattggatgtgtttgaaagcgcctgcaatgaaggggcaggggtacatgatgtaagccgcgcctccagtctgacaacagcaaaagcacagatagaattagtcgcccaggaaatagggataatctaa

SEQ ID NO: 101065 - DNA, 279 bp, Enterobacter aerogenes
gtggatgtggactggctgatcgccgagcgccccggcaaggtaagaaccttgaaacagcatccacgcaagaacaaaacggccatcaacatcgaatacatgaaagccagcatccgggccaaggtggagcacccatttcgcatcatcaagcgacagttcggcttcgtgaaagccagatacaaggggttgctgaaaaacgataaccaactggcgatgttattcacgctggccaacctgtttcgggcggaccaaatgatacgtcagtgggagagatctcactaa

SEQ ID NO: 101066 - DNA, 558 bp, Enterobacter aerogenes
atggcattactgggatatgcaagagtatcaaccagccatcagaagctaactgtgcagatcacggagctgaaatctgtcggtgtcagagatgacagaatttttactgatataatgtcaggagctacggacgaacgtgaaggcttacaacggctgcttgcccgtgcggaaaaagacgacatcatcatttgtacaaagatggaccggcttggtcgcaataccgcagacatgatccacattgtggatgcgtgttataaaaaggggattgccattcgttttctggagaatgggctaagtacggaaggcactatgggaaaaatggtgatccaaattttggccgctgtagcagaagcggaacgtgaacgtattctggaacgtaccaacgatggcagaattgcagctatggctgcgggcgttaaatttggtcgtaaaccacataaaaaatctgaaattgcacgggaattaatccatcagaaccagtctgtaagctttgtcatggaaagaaccggaatttcccgggcgacttattttagactaaaaaaacacacttgccttgcataa

SEQ ID NO: 101067 - DNA, 864 bp, Enterobacter aerogenes
atgaagattgattaccctcatttatatgaaattacaaatgagcgttcagcaaaaaaccaaaaatatttcttaaatggcataagggcagaatatgcattattgatatttatcgctgtaaatagctctctatcttacatggaaaaatacagtgtaaatttagtgttatttgttctgctaataatgttattacttgtcaggaacattataaacttcgaacaaaaatggtacaaatatagagcggttaccgaatcaataaagacaacaacatggaaattcgcaatgaaagcggaaccatttaatggctctgaagagataaatgatgctaagcaatatattggttacataaggaatattattaaagatagcaagtatgctattaagacagaaacgctaaaaaaccttgaaggggatacgtttagtatttgtttaaaaagcattagagaaatgaattatgagcaaagaagagatttatatgtggaacaacggattgaagaacaacgaacatggtatgcaaaaaaatcggtattcaacaaaagattagggagagcatgggctgtagctatactgattttctatattctatctcttactatgacggcactccttgccgaagatctggtccaagccgcatcgctaccaacagaactgattacaaccatcatttctgctctgattggctgggtgcaaattaagaaatacaatgagctttcagcatcatatgcccttacagcacatgaaattgggctggtaaaagaacaatcgtattatatttctggtgaaaaagattttttagatttcattcgagatgctgaaaccgctttctcacgtgaacatacacaatggcaagcaagacgagttgcataa

SEQ ID NO: 101068 - DNA, 1209 bp, Enterobacter aerogenes
atgggtttcgggaaaaaaactgatttccggtcaggtaagctcttaaacctagatgccacgtacaatgagataataaaaccagcggcagaagaactaggcatcaagtgtgtcagggctgacgaaataatgcagtctgggattattgatgtggaaatgtataaattgctactttctgctgatattgttgttgcagatatatcaacaagtaacgcaaatgctatatatgaactaggcgtaaggcacgcactaaaaaaaggaacgaccatcataatgtctgaaaagtcggcagtgctacacttcgacttaaatcacattgcaaccttacagtatgaacatcttggtgatgatatcggttgttccgaagcgagaagaataaaagggcagctgaaatcattaatggagtcggcattaaatgaaacacgtatagatagcccagtctatacttacctgccagatttaaacactccgacactaacggcacaagaaataaaagaaatcgtaaaggattcagatgaagcagaaaaggaatggggatatatttttaatagcgcagaagaaaagttgaagtttggggatttttcaaatgcaaaggaactctatcaaaaagcgctagaaataagacctagagatgaatacttaattcaaagactaacactctgtacatacaaggaaaaaatagaatcaaaaagcagagtgatgagttgtatggatgcaatggttattttatcagacttatctcctgaaaccagtaacgacccagaaacaacaggaatggcgggtgccataaataaatacatatggatggacactaaagatatcacgttcctaaacaaagcaatttcattctataaccgtggatatacaataaaaaaagattactataacggtgaaaatttagcgctttgctactttgagaagtctaaacagctaaagaatacagaaactgcaaatgataaagacatcgtatttaatgagattcttgcagaaaaaacgttcaagtccgtacttgaaatcactgaggggatcatagagtcaactaacttcaatgaacgaagtgatgtaaaatgggtttacgcaacagcagcaaagtcagcatcatatctagagttaaaagaaaaagaggatttatacagtagtaagtttaaatcactctgcgacaactcatgggattttaatacatttgaagaaaacaaaataaagaaggattga

SEQ ID NO: 101069 - DNA, 174 bp, Enterobacter aerogenes
gtgctcgctgccttcagtgtaagtaatgctaagaatttctttcagggatgcagtgtgtccattattagcatcattggttattttaacataaactttattaatatcttttatggcatttttatcgaaaaactcctttatatctgtcatttttatatcatttactttatttgttga

SEQ ID NO: 101070 - DNA, 501 bp, Enterobacter aerogenes
atgatcgctagcggaatagttcaaaaactgaatgcgcaaatgaatcaggagttttatacctcaaatttgtatcttcagctcagccagaggtgcagcgagaatagccttaatggcaccgcactatttttgcgtcatcaggcgcaaaatacggtgacgcaaatgatgcgcatgtacgaatacatcaaacagagcggcgccacgccggtgttacaggagcaacacgcccggtgcggtgaattttccacgctggaagatctgtttgagcagacggtaagcgattaccagaagcgcattaatgcgctgacctctttgacggaagacgcccaggcagcaaacgataagtcagcgattaacttcctgaagcgatacagaaaagaggaaatcgtggacgggacgctgttgcaaatcattctggatgaagtccgcagcgctaaaaaagcgggcatcaacatgcagcaaaccgaccactatctggttggcgtgatcgatcgctatcactaa

SEQ ID NO: 101071 - DNA, 357 bp, Enterobacter aerogenes
atgaagcagattacccagctgattgaggtcatgctcgttggccgcggtggtgaccaggctgtgggtcaggccactcttggcatcgacaccaatgtgggccttcatgccaaagtgccactgattgcctttcttggtctgatgcatctccggatcgcgttgctgctctttgttcttggtagagctgggtgcctcaatgatggtggcatccaccaaagtgccttgggtcatcatgacgcctgcttcggccagccagcgattgatggtcttgaacaattgacgggccagttgatgctgctcgagcaggtggcggaaattcatgatggtggtgcgatccggcagggcgctatccagggataa

SEQ ID NO: 101072 - DNA, 276 bp, Enterobacter aerogenes; identical to SEQ ID NO: 91793

SEQ ID NO: 101073 - DNA, 138 bp, Enterobacter aerogenes
atgagttctaactcgaatttgaacgggaggctggtcgtgcagttgccgatgagcgtgtcggctgctgcctccttgcccaccagcgaactcacgtccgttgcggccatccagaaggtcttgcccgagcgcggctcatag

SEQ ID NO: 101074 - DNA, 207 bp, Enterobacter aerogenes
gtgtccgggtatgtgttcaaccgcaaagctaacggcatcgatgaaatctggtacatctgcccggaccgggcgacgcaggtcagggtgcagcgggcaatcctgtcggtggatgaaatcgtgaacccacagaccggcgaggcccgcaaaacggcagagctggatcgtgaacggttgtttgcgtgctttaaatttatgacaacggagtga

SEQ ID NO: 101075 - DNA, 822 bp, Enterobacter aerogenes
atgcagtcaatggggatgggaaagaacatggtactttctgtccggcactggattcgtgcactgaatttggtgatatgcgttgataacaaagaacaaatttatcaactgacaccgcttgctgaacagttatttactcataaaaacggtagagcagcgtatgatgaataccttgataagatcgggacgatctggttactacattggctattgcaatccattgatacaagaaatgctgaattaaatgcgtctcgttttttatttaattatttcaatgggataaaagtaaagaaagagtttttagcaaatgaaatcaaagatgcactaactaatcacgagaaagagcttactgaagaaactctaaacaaagatatcgactgtctgttgcagatgtatgcacataagtcattgcaatccaaaaaaattaatgaggacagctttgcttcacctttcacagagctaggtttgttgaagcaagaagatgccaggagctacctggcagaactttcacggcgtccttcactgcccgtagaggtctttacctatgccctcattgactatatgcagagaaaacaccaagagagtaaggtaaacacgttgtcttttgaagcattactgaatgacgtaggctctcctggtcgagtatttcgtttatctgctgccgggcttagtgacaaacttgatcaagttgaaacattaaccgaaggcaaaatagcctggacagatacccaaggtttaaggcaagtacagcactgtttcgaagatatcaataatattaaagctgatcagtacctcaagcattactatcaaccagaaggaaaataa

SEQ ID NO: 101076 - DNA, 1086 bp, Enterobacter aerogenes; identical to SEQ ID NO: 95721

SEQ ID NO: 101077 - DNA, 276 bp, Enterobacter aerogenes
atgctaaaagaagaactaccattttatataactgaaattggagttcctagtgttagtggtgcctcctataatcaaatggatatagataattactttcgctatatactagctgagttcaggaaattggattatgttaaaggtatttggtggtatgattttatagacgatggtaacgataaaaaaaataaagagcataattttggcattttgactgatgaatttaatgcgaaaccaattggtgatacaattaaagatattaaatccaaagctaattaa

SEQ ID NO: 101078 - DNA, 276 bp, Enterobacter aerogenes
atgctgcatgcagtgaatacgcagcatggtctccagcggatagggccgtcggccattgcccgccttgggataaaacggctcgatgacagcggtcatattctgccatggcagaatctgctccatgcgggagaggaaaatctcttttcgggtctgacggcgcttagtgctgaattcactatcggcgaaggtgagttgatggctcatgatgtccctctgggatgcgctccggatgaatatgatgatctcatatcaggaacttgttcgcaccttccctaa

SEQ ID NO: 101079 - DNA, 276 bp, Enterobacter aerogenes; identical to SEQ ID NO: 36791

SEQ ID NO: 101080 - DNA, 279 bp, Enterobacter aerogenes; identical to SEQ ID NO: 101065

SEQ ID NO: 101081 - DNA, 276 bp, Enterobacter aerogenes; identical to SEQ ID NO: 101078

SEQ ID NO: 101082 - DNA, 276 bp, Enterobacter aerogenes; identical to SEQ ID NO: 101078

SEQ ID NO: 101083 - DNA, 279 bp, Enterobacter aerogenes; identical to SEQ ID NO: 101025

SEQ ID NO: 101084 - DNA, 279 bp, Enterobacter aerogenes; identical to SEQ ID NO: 101025

SEQ ID NO: 101085 - DNA, 573 bp, Enterobacter aerogenes; identical to SEQ ID NO: 97070

SEQ ID NO: 101086 - DNA, 570 bp, Enterobacter aerogenes; identical to SEQ ID NO: 91932

SEQ ID NO: 101087 - DNA, 279 bp, Enterobacter aerogenes; identical to SEQ ID NO: 101025

SEQ ID NO: 101088 - DNA, 276 bp, Enterobacter aerogenes; identical to SEQ ID NO: 91793

SEQ ID NO: 101089 - DNA, 486 bp, Enterobacter aerogenes
atgcttcttgcaaaatccttagactgctctatatcatctttgataatatcttcaccgttagggtgtaatgcatttaagaccgtcagcgatgtctctagatcaaataaatcctcgaatgcaccatgcgcaatatcaattaatctatatttgtctagtttgtcagttataatcctctggatttcttctttttctttaactgcatcagagtcaagtaagcaaaccattttaagatctggatatttttccttaaatgataaaaagtcactaagtactttttgtttcgatttacaattatatacttttattttttttgctttaaggtttatgtcagctcttaatgctattataggtataaatatttcctcgctctcaccttctacaagaattagacaatctggtctatttgcactatttattgttttttcgaaattgtttatttcttctattacattttccataaacgagctaacatactgctcgaaatag

SEQ ID NO: 101090 - DNA, 150 bp, Enterobacter aerogenes; identical to SEQ ID NO: 97630

SEQ ID NO: 101091 - DNA, 279 bp, Enterobacter aerogenes
gtggatgtggactggctgatcgccgagcgccccggcaaggtaagaaccttgaaacagcatccacgcaagaacaaaacggccatcaacatcgaatacatgaaagccagcatccgggccaaggtggagcacccatttcgcatcatcaagcgacagttcggcttcgtgaaagccagatacaaggggttgctgaaaaacgataaccaactggcgatgttattcacgctggccaacctgtttcgggcggaccaaatgatacgtcagtgggagagatctcagtaa

SEQ ID NO: 101092 - DNA, 774 bp, Enterobacter aerogenes; identical to SEQ ID NO: 88020

SEQ ID NO: 101093 - DNA, 885 bp, Enterobacter aerogenes; identical to SEQ ID NO: 88016

SEQ ID NO: 101094 - DNA, 243 bp, Enterobacter aerogenes
atgaccgatatttcccgtttagacggcatcgacgtcaaacgcagcgttatcgatagcgtattggccggtttatgcgcgctgatagtctttggcccgatcgtgggcatcgtgctgaaggggtacagttttacgctttccccacagcgcgtcatcgtgctggtggcggtggtgatggcggggaggctgttgctcagcctgcttttgcaaacccgcgggggggaagcggtttatcggacgttttga

SEQ ID NO: 101095 - DNA, 675 bp, Enterobacter aerogenes
gtgtggatttacaccaccggcagtggggcggatcgcccgctggcggtcctgcttgacggccagttctgggccgaaagcatgcctgtctttgcgccgctggcggggctgacgcgggaaggccgcctgccgccggcggtctatgtgctgatcgacgttatcgacaatcaacaccgcggcgtggagctgccctgcaatcgtgatttctggctggcggtacaggaagaactgctgccgctggtgcaggccgtggcgccattcagcgatcgcgccgacaggacggtagttgcggggcagagcttcggcggtctggcggcgatgtatgccgcgctccactggccgcagcgttttggctgcgttctgagccagtcggggtcgtactggtggccgcagcgcggcagtagccagccgggagtgatacttgaacaactgcagcgcggcgagcttcgaccgcaggggctgcgtatctggctggaagccggcgtgcgcgagccgattatttttcgcgccaaccaggcgcttttcgcgcaactacggcagaccacgccgtccgttttctggcgccaggttgacggcggtcatgacgcgctatgctggcgcggcgggctgacgtccgggcttatccagctgtggcagcctttgcgccgcgggcaacaacacgcgcttaatgaggagtga

SEQ ID NO: 101096 - DNA, 534 bp, Enterobacter aerogenes
atgtccaatcactacttgcgtatttttcagcagcccaaatcagctattttgctgatccttggctttgcttctggtttacctctcgcgctgacctccggcacgctgcaagcgtggatgaccgttgaaaatatcgatttaaaaactatcggcttcttttctctcgtcggtcaggcctacgtatttaagtttttgtggtcgccattaatggaccgctacacgccgccgtttttaggccgccgccgcggctggctgctgacgactcagcttgcgctgcttatcgccatcgccgcgatgggctttcttgaacccgcaacgcagttgcgctggatggcggcgttggctgtggttattgctttttgctccgcatcgcaggatatcgtctttgacgcctggaaaaccgacgtcctcccggcggaagagcgcggcgccggtgcggcgataagcgtgctcggttatcgtttgggaatgctggtttccggagggttagcgctctggttggccgaccgttggctgggctggcaaggtatgtactga

SEQ ID NO: 101097 - DNA, 543 bp, Enterobacter aerogenes
gtgaagggccatctgggtacattgctatttgctttgtcactaacaccattatggggaatggctaattgtctgtcaggtgaccaaatacgctcgaatggccagattattttgaacgcgcaggcatcttttgcgcacaaaagtgactccatttggcgcatcaatggcgctaatccatacacggccgataacgcgtataatgatatttctattaatctttcaagcgcttgttccttcattgaggatgtgctgggattagatttttcattatatagtttaggatattatgcgataaaagaagtaggattattcgaacaggatgatcatcgcgcaaaaatattaattgatcggctcaagattaactggtcgttgtctgatagcataagttttgaaggtggaaaaataaattcatttccaggtgcctttcatttaaaatcaccagcatcactgttgacttcctattatgccggatttaaaccgacacgaatatacgatccgaagctggagtccgcctatagcgagtcgtattggggggggggcggttag

SEQ ID NO: 101098 - DNA, 891 bp, Enterobacter aerogenes; identical to SEQ ID NO: 88138

SEQ ID NO: 101099 - DNA, 348 bp, Enterobacter aerogenes
atgggcgatatcgtcaatgcggtcacccgcgtgaccgacatcatgggtgaaatcgcctctgcttccgatgaacagagccgcggtatcgaccaggtcggccaggcggtagcggaaatggatcgcgtcacccagcagaacgcctcgctggtggaggagtcggcctcggccgccgccgcgctggaagagcaggccagcctgctgacgcagtcggttgccgtcttccgcctgaagtcggaagggcaggaagagtataaagcgccggtcagcaataaaaccgcgcctgccgccatcgctacgcataaaaaaaccagcgccagcgactaccaggataactgggagacgttctaa

SEQ ID NO: 101100 - DNA, 1050 bp, Enterobacter aerogenes; identical to SEQ ID NO: 88145

SEQ ID NO: 101101 - DNA, 1317 bp, Enterobacter aerogenes; identical to SEQ ID NO: 89302

SEQ ID NO: 101102 - DNA, 177 bp, Enterobacter aerogenes
atgaaattgggtattctttttccggtggtgattttcattgtcgccgtggtctttctgggctggttttttgttggcggctatgcggcgccaggggggggcatgatgaaaaagacaaccatcattatgattattgtcgccatcgtggtggtcgccggcaccgaattgggctggtggtaa

SEQ ID NO: 101103 - DNA, 405 bp, Enterobacter aerogenes
gtgctggcggcggcggtgatgtcatttccgctgatggtgcgggcgatacgcctcgcgcttgaaggggtggacgtgaagcttgaacaggcggcgcgcaccctcggggctaatcgctggcgggtatttttcaccatcacgctgccgttgaccctgccgggcattattgtcggtacggtgctggctttcgcccgttcgctgggagagtttggcgcgacgatcacctttgtctcaaacattcctggcgaaacgcgcaccattccttccgcgatgtataccctgattcaaacgcccggcagcgaaggcgccgccgcgcggttatgcatcatctctattgtcctggcgctggtatcgctgctggtgtctgaatggctggcgcgccttagccgtaagcggatgggaaaataa

SEQ ID NO: 101104 - DNA, 348 bp, Enterobacter aerogenes
atgattttaagcgatcccgaatggcaggcggtactgctgagcctgaaagtttcatccctggcggtggtttgcagcttaccttttgggatctttttcgcctggctgctggtgcgccgccattttcccggcaaagcgttactcgatagcattatacatttaccgctggtgctgccgccggtggtggttggctatctgttgctgatttccatggggcggcgcggctttatcggtagttggttatacgactggtttggtctgaccttcgccttcagctggcgggggggcggtgctggcggcggcggtgatgtcatttccgctgatggtgcgggcgatacgcctcgcgcttga

SEQ ID NO: 101105 - DNA, 792 bp, Enterobacter aerogenes; identical to SEQ ID NO: 97326

SEQ ID NO: 101106 - DNA, 525 bp, Enterobacter aerogenes; identical to SEQ ID NO: 16553

SEQ ID NO: 101107 - DNA, 537 bp, Enterobacter aerogenes; identical to SEQ ID NO: 16554

SEQ ID NO: 101108 - DNA, 327 bp, Enterobacter aerogenes; identical to SEQ ID NO: 16555

SEQ ID NO: 101109 - DNA, 480 bp, Enterobacter aerogenes; identical to SEQ ID NO: 91320

SEQ ID NO: 101110 - DNA, 417 bp, Enterobacter aerogenes
atgcgaatgccgcatatcgtccccctctcagaacatgtcatcgccattctgaaacagattaaagatatcaccggtaataatgaactggtcttccccggcgaccataacccgtataagccaatgtgtgaaaacacggtcaacaaggcattgcgggtgatgggctacgacacaaaaaaggatatctgtggccacggctttcgggcgatggcatgcagtgcgctgatggaatcgggtttatggtcaaaggacgcagtagaacgccagatgagtcatcaggagcgcaataccgtgcgcatggcttatattcacaaggcagaacatctggaagcccgcaaggcgatgatgcagtggtggtccgattatctggatatatgccgtgaagcctacgttccaccatatttccttatcagaaaataa

SEQ ID NO: 101111 - DNA, 3819 bp, Enterobacter aerogenes
atggcagaagctaaagcgaaaaaaccattttatgagattgtggctgaaaacctgatagcccagcttaaagaggggactgctccatggcagaaaccatggaaccccggcgctcctggtgtcgcattgcctatgaaccctacgacgggtaaacgttataaaggcattaacgctattcaccttatggcgcagggttatagcgatcaacgttggatgacctataagcaggcgacggctgcaaatgcgcaggtaaggagaggcgaaaaaggcacgccgatccaatactggaaatttactgaggaacgcatcaaacgcaacgatgatggtagcgttgtgctcgataaagacgataaaccggtaaaagaaactgtccaactggagcgaccgaaggtatttaacgcagttgtgtttaatgcggagcagattgacggtctaccgccgatggccgttcgccaagataagagctggaacagtattgaacgtgctgaatctattctcgaagcctctggcgcgaaaatctctcatgaccaggttgaccgggctttttaccgtatgtctacagacagcattcatttgccgcagcaggcttcctttccaagtgctgatcgttactatgccactgcacttcatgaattgagccactggacaggtcacgcatcgcgtcttgatcgtgacctgtctcatccttttggaagtgaaggttacgccagagaagaactacgcgcagagattgccagtatgatcattggcgatgaactggggataggtcatgacccttcccagcatgttgcctatgtaaaatcttggattaaagccttacaggatgatccgctggaaattttccgtgcagcagctgatgctgaaaaaatccaagggttcgtgttgggccttgaacaacagagaatacaggaacaaccggtaactctggaaagagagcagcgcgaaaaagagcataatgaggtaatggctgaggtacagcggctgactaacccgcagattttcgatgcggaaacagctcaactctatcatttcacattcatgacactggagcagacagctgaggaagctggttacgttacctattacagccgtggcactggtgagcagggcgaagaaactattcgggttaattacgaagacagtaatggaaatactattcctgttcatactgatgtggttgggcgcggaaaagcattgacatatatcggtgatgagcgtgtccccggaacgggattttcatccgataatgaatggcaaagcaatgctcttaaaaccgctttcgccagcatagataacaacctaactttagtcgctaaaaaagttcatagtcagattgaaaatatcagtggagatccgcgagagttaccgcaggatgttaagtttcctaaaaactggtggcctaattccagttttctggcgtcgaccccaagtgtggagaactcaaaagcagctgcagaggctgatatgaccactaaaactgaaacgtctattacatcagcgcagcagcgccagtatcgtgcagagaaatttattctttcgaatctcgatagtggtctttctaagcacgttcagaatatgaaccgtcgccagcttacgttgtcacgaaacgttctctatgatgctcaaaatagcaatcaggatagtgatttttggcagcgtaacaaggaatttcattcttcgttcagtcaaaactggaatgaggctcaggacaagatcaagagcgcataccgtgagattgattttgcattatcacttctaccagagccgaaatataacattgtggaaaatcctggtcagaatgagcatgtgaatataatcatgcagaccaacagtgcagttaaggcgctggccgctgttaacgaaggggataatcgttcaatttatgactcacgtctcatcaataacggtaaggtcgatctgaatgacctgcagaacaatttttatcaaacacttgaagcagaaaaagcagccttaaagcaaggtattatcaagcctgatgatgagattagcgtgctcccaccaagagaagcacaggaatggtatcaagaccgtgttgaaggcttgatggaggacgctgacagcccggatgaactgaaaagcgctctggatgcgcttggcccagaaccgggagataatgaggctgttttccttggtgaagatggagggcgaattcttccagaattcagtctgaacgttaggcaggaaaatactccaatcaatgtcccctacaaagaacgcaatgaagctaaagcgcttggggcaaaatgggatcgaaccgaacagacctggtttgtaccaaaaggtgtatctctggataaatttgcaaaatgggttggtgggccaactgcagaaaacaattcatctgtcgtatctgtgaaagaagtaacgccaaaagtgggtgagcgtcagaatctggctgtcccttataaagaccgcgcagaagctaaagcagctggtgctaaatgggacaaagagaaaaaaacttggtatgccgaagctggggcagatatgcaaaaactggcgaagtggaaaccggaaaatgtggtgatcgaacagtcaccggccatgacgctaaaggaggaagtagaaaccgcgctgaaagatattgggtgcatccttgatgccgatactgacaaaggacagaaacatccaattatggatggtaagaagcatcggatcacggtagagggagacaagaaaggggaaaagtcaggtttttatatcatctatactgacggccatcctgcgggcttcatgcagaacaaccgcaccaaagaagagttacgttggtcttccaagggaaatgtgatgtccgacgaagaaaaagcgctcctgcgggcgcaggctgctcagaaacaggccgaaaaagcggcacagcagcaaaaagaccatgagtcctctgcaaagcgtgttcaaaagcagctcgctaaactcaatgaacctcagcagcaaactgcttacctgaagaagaaagggctgcaggtacataaaggtgtgttcactgataaggacggacagaaaacctttattcctgcttatgatgtccatggtaagcaatggactatgcagtacatcaacgaggacggcacaaaacgttttgccaaaaatgctcgcaaagagggatgtttccatgtcattggcgggctggatgcgcttaaaaaatctccggtgttgattgtggccgaaggttacgcaacggcagggagcatcacagaggctactaatataccaacggtcgccgccttcgattcaggtaatctggaatctgtcgcgaaaacgcttaaagaagcctaccccgataagccaatcatcattgccggtgatgatgatatttctcagtcatgcaaaatgaaggtgaaggataaagccagtgtaaacgtcggcagggaaaaagcgctggaaacagcgaaagctgtcggcggtgtggctgtgtttccagtttttgctaaaggtgaattacctgggaaagacgaactcagccagattaaaccggcggcgtatcttgcacaccagaccgcctcgcgcaaactggaggcccatacgagcggtgataagccactctcggatgccgaagtgaaggttctgcaggcagcacagctatcggaaaagcagcttgatattattcgccgcgctgatcgttacactgactttaacgatctggccgtaaatagttctcttggccgagaaggtgtggcgatgcagttgaaagccatcattgctgaccagctgaataaaaaacagcagcagtcacaggtccagaccgaagagaagaaactcgttcaggaaaaagagaaaaaacggaccattcgccacgctatgtaa

SEQ ID NO: 101112 - DNA, 492 bp, Enterobacter aerogenes
atgaaaaagatatataccgcagcgtttttattaatttttacccctttaacttatgccaccggatttccatgtgctggctgtggaattgttgataatatgataaaaggaaaggctgatgaaacaccaataatggtgatgctagatactccgattgaaaaaaatgacattacgccgaaggaaataaacttaatatcacacgacgataaatgtctttactctggtgtacttacacagactctttcgaaaaataaagacagccgtattattgatgtcaataaaaaggtttgcggctcgaatactgaaaaggtgtcttactccgttttgagcattagttccagcgagcaatacagcaaaggcacaccgctaaagctgtatcatgtcgccgtaatgacttcggcaggtccgttgttcagcgctgatgtaatgagcgaaatgattaaagatattgcagatgcagtagaacaggctaaggcaaaaggactgactaagtga

SEQ ID NO: 101113 - DNA, 987 bp, Enterobacter aerogenes
atgaggtcacacattctcccaaaatggtgcgttatgaaaaaatttcaggtcagaaatttcccggacgatgcatatttcgctctggaacagttagcaaacgaaaatcaacgttcggtcgaaggtgaggcccgctatgctctgttgaaatggatagcacctcctgagcaggtttattctggagaagaactataccggcaggaagtgtctggccgcctcaatacagttctgcggaaaaccaaccaattccgtaactacaaacctcttgtgccgtccaatgtggccgtagagctggggattgaagatcttggccttgtcgccaactggttcagtggtgacgtactcccttccttcactgagctgcagcggttaagcaagttatttggttgtcgcgccgactggttaattcacggtgagggggatgtgtatgaatggaactcaggcgtcagaatgcacggcacaggccggtctgctgttaagcaccttctcagacctgatagtgatggtaataaagtcacagacatcaggctgctaagggaagatagtgatataggagcacttctgatactccgtgagtttgaaaatacacggtatgttgatgcgttctggacaaacctacacgtaagtgaagtcattggagccggtggcgagtctgatttggctgatttttttgtcactcttcgggcgctgtacaagagttttgtcaaacttgatgtaaacgtcaaaggctaccttatgccgcgatctgcttataagcaaatcagagaagaggaacaagcctatccactgatgcttctcaaggattatcgtgtaaatgaaagcatgtggtgggaggatatttgggataaaagtcaaagaggtaaatttaattactggaaaggtgatgaggcgctgattcgtcgcattgaagatgcaataaagcgtaataaaagattgcttgatgaaattgaagctattaaaaactcagctcctttggaccatgatgattaa

SEQ ID NO: 101114 - DNA, 207 bp, Enterobacter aerogenes; identical to SEQ ID NO: 22177

SEQ ID NO: 101115 - DNA, 366 bp, Enterobacter aerogenes
atgaattttattgctttatggcctttattgctggcccaagtgacagtgatgtcactgacagtgatttttcttgctgctgacaggcgttttttttcatgggactgttttgttgtttgcactctgtccatgatgatggcagaaggtattgttattatgaaatatgaactgtggcatatccctcctgccctgctgggtctggcaggagggttgtcatggtcgctgctgctactccatacaggatatttctcaggcatatcagaaggagcgcataagcgtttgtggctcgctgtcgccgcagtgttttctggtgcgggaatgattatattctactggttgctccatgcatcagaaaacataattaaataa

SEQ ID NO: 101116 - DNA, 204 bp, Enterobacter aerogenes
atgagcaaagaaattagagcggaaagaatcaagaatgtaattctggaaaactcgacttatgaagaactggccgagaagactggcattagcgtgagtacgctggtcaggatagcgtccggtaaaactgaacctaagttcagtgatattattaaaattgcgatggtgacaggcgttgatttaaatgaattatgtcttggtttctaa

SEQ ID NO: 101117 - DNA, 774 bp, Enterobacter aerogenes
atgccgtatttagatattccaccggctcaggttgaacgtgtagtttgctcaattactgcagcgataaaatatcaggttccggctaacatcatgttagccatagctgaaaaagagggtggtcgtcccggacttgagaataaaaaccgtaactcaaacggcacatatgatataggccgtatgcagtttaatacggtttatttaaaggatctggaaaaatacggcattacagaagaagatgtagcacagccaggctgttattcgtatgatttggctgcgtggcgtatacgcggccatatcaaaaatgataagggagatatctggacaaaagcagcaaattatcattcaaaaacgcctcaatttaacaaggtatatcgtgctgacctgatcagaaaagcagctaaatggcagacctggattgaagctcgctttaatacgtttgacacaacgaaatctgcaggaacgactactccacagccccaactggcgactgtaggggttacgccagaagaaagagcagggaaaaacattacactggttactaaccttgcacaaagcgacacactcgctacagaaccgcccaaaaatgacggaacaacagtaacaccgactacaccgaatcaacttattggtttttccgcttctgtaaaacaaataccggttgaaagcgtcgtaaaagctgactatcagcagcccacacagcaactaccgggtcgttataacaaggccgcagctgatgcactggctgcagtatatggaaatatcaaactacgttga

SEQ ID NO: 101118 - DNA, 1596 bp, Enterobacter aerogenes; identical to SEQ ID NO: 22183

SEQ ID NO: 101119 - DNA, 195 bp, Enterobacter aerogenes
atggattccatcacccttaaagatgggttcgcttttccatttgttaggtccgacaaaaaagagattgaaaccccagctttttgggatagttcctgctttgtcatgtctctttcttcaagaagtctgaggatgttagtaaaaaaaattaggttgtacacgatacgcttacgcctcgatgtaaattttagcggctaa

SEQ ID NO: 101120 - DNA, 879 bp, Enterobacter aerogenes; identical to SEQ ID NO: 22161

SEQ ID NO: 101121 - DNA, 345 bp, Enterobacter aerogenes
atgcgggccgaaagcgaacggcgcaagcaactggcaaaggagcgttccaaagaatacaaagagcggatgattactgttcagcattataaagaattttacgttggtgctcgatgtgaaatcgtgagtgtgcatcatccggtgtttgctaaaaatattggcactattgtaaaaatcgttacgatatacgattcaggatgtgtggaggcgcatgaagataagcctatacgttatcgaatcaaccgtcgcggaactcaggtagtggattttgaccctacttgcgttcgtactttttacaatattgatcaactgaaattactggaagacaacaaaacaggtgaatcgtga

SEQ ID NO: 101122 - DNA, 324 bp, Enterobacter aerogenes
atgaccaatgtcgttaaatttcctcgtcaagagggaagtaaaccgcagcaaattcgggcggtcgaggatgtcgctggtccagcatcagaaaacacagtacgtaatattctgtatggtgtcattggtgcggtatacatggtgctggttattctctggattcctgttcgcttcctgctgatcgcgaacgttgtcatccagttttttaaaatgctttttaaatggagtgatggcccatttgctgcagcctggccgttcgtgaccagtttccttgtactggctactctcacttacattatggcaacgtggaaacccaaagtgtcatag

SEQ ID NO: 101123 - DNA, 252 bp, Enterobacter aerogenes; identical to SEQ ID NO: 19172

SEQ ID NO: 101124 - DNA, 591 bp, Enterobacter aerogenes
atgcgtcctcaactctgggttattgctgggcctaatggtgcaggaaaatctaccctagttaagcgacatatccttgggaaaatagaggttgttaaccctgatgatattgcgcgggaacaaggtataagcaatcgaaaggcaggagagcaggcactttttctgcgcacggaaaatatcaaaaatagatgtactttcgctgtagaaacgacactcacaggaatgggggagattaagttaatgcagcttgctgcaactgcaggttacaaaattaatttaatctatgtgggggtgaaagatgtaggaatgtcagtagctcgcgttaaccagcgtgtaagccttggtggtcataatgtgcctgttgatgatattttcagacgatacgagcgttctgtaaccaacctacctaaagctatggccgtggctgaccgggtatgggtatttgataacagttataacagacggcgattacttttccgcacagaacaagataaaacaaagttcatttctaatgatttgcctgattggtttaaaaaagtcgctgggacagagattgagcaggccagaatgaaaaagaagaaattaagtcgttag

SEQ ID NO: 101125 - DNA, 354 bp, Enterobacter aerogenes
atgactgacaatcagacgcggaaaaattccacaccgatcaaggtttactgcttcccggaagagaagatgcagattgaagcaaatgccgccgctgctggtctgagtgttgcggcctatttgcgtaaagtcggtatgggttacgaagtggagtcaattgttgatatagaacaggtcaaagagttgagtcgggttaatggagacttgggccgacttggggggttactgaagttgtggctttccaatgacgaacgtacccggaatttttcgccagcgttaattaatactctgctgggaaaaatcgacgccacgcaaagcgcccttcgtgacgtaatggacaggatactgagtaaatga

SEQ ID NO: 101126 - DNA, 240 bp, Enterobacter aerogenes
atgcctttccatatctgccgcattattttcggatcgcgtcttacttgcccggtgattgtctttttcgaggccaaactctttttccagttcctgacatacggctgtccgaatcttataatcgttataaggagtatgaatgttgtgagttttgggatgaactttgtttattgcgatctgaatatgtacattgtctgtatcgtaatgaactgcacttacacgttgatgttcaccataacctaa

SEQ ID NO: 101127 - DNA, 189 bp, Enterobacter aerogenes; identical to SEQ ID NO: 22167

SEQ ID NO: 101128 - DNA, 330 bp, Enterobacter aerogenes; identical to SEQ ID NO: 22170

SEQ ID NO: 101129 - DNA, 687 bp, Enterobacter aerogenes
atgccgattcaggttctaccgccgcagctcgccaaccagattgccgctggcgaggtggtggaacgtccggcgtcggtagtgaaggagctggttgagaacagccttgatgccggcgcaacccgtatcgacattgatatcgaacgcgggggcgcgaagcttatccgtattcgcgataatggctgtgggatcaaaaaagatgagctggcgctggcgctggctcgtcacgccaccagtaaaatcgcctcgctggatgaccttgaggcgatcatcagccttggctttcgcggcgaagcgttggccagtatcagttccgtcgcccgcctgacgctgacttcgcgtaccgcggagcagcacgaggcatggcaggcttatgctgaagggcgcgaccaggcagtgacggtgaaaccggcggcgcatccgataggcaccacgctggaagtcctggatctgttttacaacacccccgcgcggcgcaagttcatgcgtaccgaaaaaaccgagtttaatcatattgatgaaatcgtccgccgcatcgcgctggcgcgtttcgatgtaacgattaatctcagccataacggcaaaatgatgcgccagtatcgcgcagtggcggaaggcggcccgcgtgaacgccgcctcggctcgatttgcggcgcggcgtttctggaacacgcgttggccattgagtga

SEQ ID NO: 101130 - DNA, 558 bp, Enterobacter aerogenes
atgcgcaataactcacctttgtaccacccactgacctatgatgaaatcaatgtacttagagcctcactctcagcaaaaaagttccagcatgacttattccgagcattcctgttcatatgcgagacaggggtgagttgggaggatgttaccctcctaaagtggacgcaaatagacagggaaagccacatcctgttttacgactacgaacgggtcaatgggtatcaaacccaacgcctttcgcagtttgcattgaatgttttgcccgagaagaacagcaacaaggtcttttctgatctacattgcgatttctttccaaacccatatggtgaatggcagtcgtctgacatgttggcctgggggcaggaatgcaatatcaagcgcaggttttgtcttgagactgctggggcaaccttcgttacccaaatgacagcgcaaagttttgatgagcatgagatagcaaaaatgttgaacattaccgtgatcgacttacgtatgatttacccaatacgttcatttagccatctttggagtaacggaaagccagcaatcgcgcaataa

SEQ ID NO: 101131 - DNA, 294 bp, Enterobacter aerogenes
gtgactggtagcaaatgggatgggaaaatatctaatctgaacatatcggagcaagctttccccgagctctatcatgaactgtcccagatgcagcataaggcgcgtagtgatcggctccgcgcccttgctctattgggtctttattctcttcgattttctggcaacattgggttttttgagcaacagagttccaatattcaacctacacagcatcaaaccaagccagtgcaggctgatgaaaagctgaactctcaacgtgattcacttaaaggaaaactgatgggctccgtgtga

SEQ ID NO: 101132 - DNA, 288 bp, Enterobacter aerogenes
atgacaacatctgtagcggccacagaactggcgaagctggggaaatgtgaagcgatgatcaagaaagtcgccaaccatcctcgccctgccctgtcaaagcgcccacaatcgccacatggcacagataacacccttcggggtgagctcgcccacttccggtatgaagcggcagccatgcgtttcatgagcagccttgcgggggctaagcgtcgcgtctaccagctagtgtttgcggcaacggtagcagcgggagttttgacactgctggcggcatggaccaccagctag

SEQ ID NO: 101133 - DNA, 435 bp, Enterobacter aerogenes
atgttggattttgttcttttggtgtttgtgggtttgggaatatctatggtgcttgtgcgccggtcttcccggaaggggatggatctagagctgacatggttccagtcgctgaaagtcgtgctggtacgtggagttgttgcattgggtctggggtttggcattggtaggctcgccttgctggggatacagcatggcttcctgagtgagtcagttctaagagagcatactctggtctctgtggtggtagtgctgctttgtgggcttggttcgtttgttgcgtttcagtggatcgtcgggaggatctctggaagatccatcagcgcaacctccctgatcaaaaccatcatgtacgagtctggttactttgtgctgtcaatgatcgccttgttggtgatactcgtcctatttgggattgcatacgagacttttttctaa

SEQ ID NO: 101134 - DNA, 519 bp, Enterobacter aerogenes
atgacgacgaatactcaaaatgcgaacaccaaccgggatatgtctttacgcaacatgctcgtccccgctcttttgttctacgtgatgatgacggccatgtttctgggacttgacgcattcatggatcagaccaccagcatgaacctgccatttatgccgttccttgtttcgatggtgtgctttaccagtgatgcacgtcgagcgtgggactggcgaaacgggctcaaagttgtggtcgtattgactgtggtagccatgctgcttgcattcgcctatcagctcgcggtcggaaagatgagtctctttggggttggtatatacccggtcacagccttccttttgttggcaatcacctgggtgattcgcgctatcggaaagacggcaccattccagttccttgggaggcgcctggcgcggattggtgcatcgaagtgggtccaacgtaccgtcgcagtcatggtgctcgctggggggcttgccattaccgtttatgcgtactggcttaaccaaggtagctaa

SEQ ID NO: 101135 - DNA, 285 bp, Enterobacter aerogenes; identical to SEQ ID NO: 70433

SEQ ID NO: 101136 - DNA, 231 bp, Enterobacter aerogenes
atgagttacggctggctcttcgagaatccggttgatgacatttcggatggtaatcatatcaatctggaacacctccctccggagctaaaacaggttgctctccagatagtacagaatcagattgatcgtgatactgcagagaaaaaactggcggaattaatccagcaactcgagtttgatataactgcagcagaactgtcagcatatctttttaaaccgggccatgcctga

SEQ ID NO: 101137 - DNA, 1359 bp, Enterobacter aerogenes
atgttggtgactatgacagacaaagaactttaccggcttggcatcattcagcgagtatttgaccgggctttgcttcagcgcgacgcagcagacatacttaagctcagtgttcgtcaggtgcagcgtcttgtgcgtctgtaccggacagatggcgcaaccgcatttgcatcttcccgccgtggacgtcctgcaaacaaccggatcgatgaagaaacacgctgtaaagccctggatttgatccggtgccactattcagattttggcccaacgctcgcaaccgaaaaactggctgaacgccatcatatatatctctccgttgaaaccatccgtaactggatgacagccgacggtctctggcgtcctcattcccgccggcgaacccgggtttaccagccgcgctatcgtcgcgactgtttcggcgaactggttcagatcgatggctctcaccatgactggttcgaaggaagagccccaaaatgctgtcttctggtcttcatggatgacgccacaggtcgcctgatgcacctgcgattctgtgattcagaaaacgcgtttgactacatgatggctacccggcaatacattgataaacatggtaaacctgtcgcattttacagcgacaagcatgcggtgttcagggtcagcggacccgagagccgacgtaccggcacaacccagttcggacgggctctccgggaactggcgatcgaattgatttgtgccaacagcagccaggcaaaaggtcgcgtggaacgggtaaataaaacgctccaggatcgactgattaaagagatgcgcctgcagaacatcagctcggttgctgaagccaatcagtggattgaacatttcatgtctgattttaaccgtcgtttctcccggccggcaaaataccctaaagatctgcaccgtgcggtcacacagagtccactggagctgaatgatatcttcgcctggcaggagctacggaccttatcgaaagcactgacttttcagtatgataaagtcatgtatatcattgaacccaccgaacaaaatacgcgcatagcaggtgaaaaaattaccgtttatgattaccctgacggaagcattactttccggcatcagcaccggccactgggttataagattttcgataaactgacctgcgttgatcagggggcggttgttgataacaaacgactgggtgccgttctgaggctggcacagcagaaacaggacgagctggaggctgaaggaaagcgaatgcgcagtacaaaaatgccccgcaggcgcgctcaggagcgtgcactggaagagctcagggcgatcaacccggtgctggccagtccgcaggattttatccccagcctgaagcgatga

SEQ ID NO: 101138 - DNA, 396 bp, Enterobacter aerogenes
atggacgacaacaaaccagtgctcctgacacttcacgaagcgctacgcctggatttgattgaagcctatatggcgcgggaaatcacgctggcagaagtggcagagtccatggagctcacccgtcgtcagtgctcccgcctgattaagcgctatcgcgagctggggccagccggtctggtcagccggcgccgtggaaagcccggcaatcatcagttaaacaccaccatcagagatcaggcactgcagcttattcgctcacgcggccggggtatgaatccgtcagccatctggcgaattctgaccacagaatacggtgtccggatttcaaaagagaccgtacgtaaactgatgatagccgagaaaacctggcaaccacgttcttcctccaaagcctga

SEQ ID NO: 101139 - DNA, 1398 bp, Enterobacter aerogenes
atgacggcatacggaacggagtttttctcgatgaacgatgtaaaccgactcaggatcctgcaggacgttatcgaccggcgtcttaccacgcgtcttgcagcaacccgacttgagatctctgacaggcactgccgccggctactcgagcgctatcgtgaacacggaccgctatcgcgggttaaccgccgacgtggtcagcctagtaaccgacagttgatgcctggcctcgctgagcgtgcgctgcgcatcattcgcgaacgttacgccgactttggcccgacattggcctgcgagaagcttgctgagattcatgacctttatcttgctaaagagactgtacgtaagcttatgacccgggatggtttatggatccctcgtaagttacggccacctcgtgtgcatcagccacgcccacgtcgggcctgcaccggcgaactcatccagattgatggcagtgaacatcgctggttcgaggaccgtggtccggcctgcacgctgctcgtttacgttgatgatgcaacaagtcggttgatgcagcttctgttcgtcagttcggagtccacgttcacctattttgaagccacccggggatatctggagcgctacggtaagcctctggcattctacagcgacaaagccagcgtcttcaggatcaacaacaagcaggccaccggcggagatggccagactcagtttggtcgtgccatgaacgagctgaatatcactggtatctgtgccaacaccagttcagccaaggggcgtgttgaacgggctcatctgacattacaggaccgcctggtcaaggaactgcggctccgcggtatcagcacacctgaggctgcaaacgcctttgctgatgagttcatggaagattacaaccgtcggtttgcaaagccgccacgtcacgattttgacgtacatcgccagctggataatggcgaaaacctgcaggcgacattcacctggcgcgagcagcgtaaggtctcgaaaaacctgacattacagtatgataaaaagctttatctgcttgaagataatgaagaaaaccggcgttttcaggggaagtacatcgaggtatggcaatacccggatggtgacattgagctccgggccagcggcacttccctgccctttaccacttacgaccgactgggagaactggaccagggcgccatcatcgacaacaagcgtctgggacgtgccctggaaatgataaagctggttcaggacaaacgggacaacacccgctcacaggccctgccatcactggacggccagacctcacgcagaaagaaacaacccggcaagaaatcacaacgaagtctggaccataacgacatgctggaagccctgcagcaacttcagacccggagtaaagacatcttcggcaaaggctga

SEQ ID NO: 101140 - DNA, 279 bp, Enterobacter aerogenes
atgtttagtgaagacgcacactatgaatttctaaaaagatattacagagcggagttttttgaaggaagaaatggttccatttggggaataaattattcttacaatttggcaagggtgggtatgaatatgcttgaaagatatggctatgggataatattaaagcatgaatctatcactggtgaaaccatttactatgatcgtagtctgacgatactatttggtgacagaattacacaggccctgggaggtcagtattgcaacagagaaatgagagaataa

SEQ ID NO: 101141 - DNA, 567 bp, Enterobacter aerogenes
atgaatatctatgttattaccaataataatttcatgcttgtaggtctgaaatgtatgttcagcgacaacagcctctccgtcaacagggttgtgttttcacgggtcagcgatattgccttcagcaacagcgatgtggtgattgtggagtcagagctgaacaccggcgatgccgaacgtctcaagtacctacacatttcaccggtcaatcttatctttttattaaaaccggcgtcaggaatgagcgggacagggcgtgaagcggtatgcattgacactgaattaagcggtaatgaatatctcatgatgaggcaggcgtttaaaaaaatggggatcaatctgaagagggacaagttgtcatttaccaaaagagaaacacatgttatcaatatgattttaaatggttattcgatagatgaaatttcccgtagcctgctgatctccaaaaaaacggttcagtcttttgtcggtattgttttgcataaactgaataccaccaaaataagtggaatataccgcaaaaaaaatctcatcatcgacagttttgccaggaggagcctgcatcgttag

SEQ ID NO: 101142 - DNA, 390 bp, Enterobacter aerogenes; identical to SEQ ID NO: 28364

SEQ ID NO: 101143 - DNA, 351 bp, Enterobacter aerogenes; identical to SEQ ID NO: 28365

SEQ ID NO: 101144 - DNA, 282 bp, Enterobacter aerogenes
atgcctcttaccctgggactgaaaagtatccatagctatcagaccacggaagcagttgagatggctaaggccttgggaagcctaaaagatcttcctgaatatatttatgtcattactgatgtgaatgcccgtatggccgatatgtgtaatcgtgtttgggagccacaatcattggccctaaccccattcattgttgaaatggcagagctgcggaaggcaaatgaaaaaagcgcctatgaaaaggcgctatccgatctcgactgctcgcttttagaaaattaa

SEQ ID NO: 101145 - DNA, 417 bp, Enterobacter aerogenes; identical to SEQ ID NO: 52340

SEQ ID NO: 101146 - DNA, 291 bp, Enterobacter aerogenes; identical to SEQ ID NO: 52341

SEQ ID NO: 101147 - DNA, 234 bp, Enterobacter aerogenes; identical to SEQ ID NO: 52342

SEQ ID NO: 101148 - DNA, 252 bp, Enterobacter aerogenes; identical to SEQ ID NO: 52343

SEQ ID NO: 101149 - DNA, 213 bp, Enterobacter aerogenes
atggaagaatctggcatagatgaaacattggccgagtttggtgaggctgagacgcagatcagagaaatgttggcggatgcgttggctatgaaactggtgggccgctcctggcctatgtgtggcgctctttgtaatgcagcagataagtccaacgtcagtttctccgccgaacttgatgttgctgccaaaaaagctggatacatggttcgttaa

SEQ ID NO: 101150 - DNA, 378 bp, Enterobacter aerogenes
atgctttttgataaaaatgtagaatgtcactcgttcgtaatgggagccagtggtaagggtaagtctgtcttctccgaacaagtacggaagaatgcgagactacgcggagatctgctggtggatactgatatgctccgggaagggcgggggttgagaccatacgagcatgagtacgctcgccgcttagttctggggctaagtggacccttgccgcgtgaactgcgtgggaagctggtgacgcttatctctgatgtatccaggcctaagaaggtaaaacgtcagtcaaatcaatttgttaagactgcgaatggagtcgcccttgaccgccaattggtggctgatgcaagagaacagttggaaatgcaaacaggcatctga

SEQ ID NO: 101151 - DNA, 675 bp, Enterobacter aerogenes; identical to SEQ ID NO: 52348

SEQ ID NO: 101152 - DNA, 450 bp, Enterobacter aerogenes; identical to SEQ ID NO: 52349

SEQ ID NO: 101153 - DNA, 369 bp, Enterobacter aerogenes; identical to SEQ ID NO: 52350

SEQ ID NO: 101154 - DNA, 195 bp, Enterobacter aerogenes
gtggctgacaatcacaataaagagtttgccgagcaaatcggggccgcagtggtgagccttgggaccagtgaggcgttgaactgcatggctcgcgtgatgtgctgggtcgctgctgactacggccaggttatcgagtttgaatgtgatcttggtgtcgtgacagtagaacccaagcagcaaccgctgcaaagttga

SEQ ID NO: 101155 - DNA, 237 bp, Enterobacter aerogenes; identical to SEQ ID NO: 52351

SEQ ID NO: 101156 - DNA, 168 bp, Enterobacter aerogenes
atggctttgatagtgatcagcgtagacaggtcctccctgccgtcccatacggatgaccagtttgaggaatgggtcgagttcaacgtgggccatcgagggggcctcagtgaggataaccccctcgctgacatcgacatggaagcgagggttcgagagattagcaagtaa

SEQ ID NO: 101157 - DNA, 231 bp, Enterobacter aerogenes; identical to SEQ ID NO: 52352

SEQ ID NO: 101158 - DNA, 393 bp, Enterobacter aerogenes; identical to SEQ ID NO: 52353

SEQ ID NO: 101159 - DNA, 480 bp, Enterobacter aerogenes; identical to SEQ ID NO: 52355

SEQ ID NO: 101160 - DNA, 555 bp, Enterobacter aerogenes
atgggtgagcatgtacgccagtcagcaccgatagcgaagattagaatcttcccgagtttcgtgggtttccccttaccgtcggcgctactgatcggtgctgggctcctcaatggcattttgtggggcttggctgcatttgtcgttcacatagtcctcaagcggtacatctacagagaataccggagtttgccatatccgatgccaaccagctcaaggcctatggatgatttgaacgagctccttgtaaaggggataccggagaccttttttcaacagcttgacgcagcttgcggctctgatatgtcagtacaaataacctgcccaaagaaataccggctgctcaaaatgtcgttgaatcgctatgccaaccgagctggttgttacccgcagttcagggaaggggatgagatagcgattgaggtaacacaaccaaggcttggaagtcttgacgaactgcaaaggggcgatgccaaagagcctgaaattacatccacctcagaccaggaagaactaaacactaccaagcgagagaagagaaagatcattctggactga

SEQ ID NO: 101161 - DNA, 429 bp, Enterobacter aerogenes
atgacgacacgggcggctatagccgctctgttatcggtgtcggtacttggcttttcgtctgatttggccgcacaagagctggtggcaagcccggcggctatagaaaagcccacggatgtggagaaagacgcaaccttccacaatcgcaagtgggtgttaaggtcagggcaggttagtgggttcttcatctgccaaggagataacaaagacatttactaccggcatgatcggttgggcgctcactgccagaagacatcgactggatggcgcaatgtactgggcctcagggatgatgttccggaggttgagttaggcgtgtacctggaggccgttgaaggcgttccagtgaaagtcctttaccaggaagtggatggttacgatctgaaagtacagtacaaggttgcacgtaaagggccagcaaatgggtga

SEQ ID NO: 101162 - DNA, 348 bp, Enterobacter aerogenes
atgagcaaaaagcggatcgtaatcaaaaatggtgaggtttgcgggtttgccgatgaggtttctttcaagggccttgatgtgcagggatacagtaaaaaaagggtttctcgcatcgtgccaacgaatggctttctgatgatcgcgttctacgtcattcgcggactttgttccgacgagtcaaaggttgcggcatggactcgtgtttggcgttgtcagtggaaggtgctgatcgacggtaagagctatggcccattcagcagccgttcggatgctatcgcgttcgagaaggatgagatctacaaacaaggaaaattctttgccgggcaccatcacgaggcggcagtatga

SEQ ID NO: 101163 - DNA, 1185 bp, Enterobacter aerogenes
atggtgacaagaaggatagggcgtgccccccttcttatgctggttggtctcatggtcgcagctcctgcggcctttgccagtgactttgtgactggcgtagttgtggggcaaatgctctcagatgactcaggcagcaagaaggtagagaacactggccctgagagtaaaacggtcattgattaccatgatggtcagccggttgtaaccagagtggaggcctttaaaaataacaaatggcgcaagcaggatggtcctcagggaggctactttgtttgtccaggtgaatatcgtagttatgcgggaaggctgcgttgtcgcgtcaatgatgatggcttcaatggttttgtaggagggatgactgatgctcaggagctaccgctccaagaggctctgagcaagatggaaggtaaacccatctccctgcaaaccatcgagatccacgacaacaacttggcagtcaaataccaattagcgccaccagcacaaacgcacattaaaactcaggacctgggggtgattcagcaagaagatgaagtgcagaaggctgcctcccagcgaacagctccggccagcttgagcgtttcaaagactgagcctaagcaggggctcgcaaccaacaacacggacagcaagaccagtgcatatcaaaatccatttgagcgcgccagtgactccatgattagccttctggatagcactttgatgaaagtgttggctatagcaatgctcatgttcggtattttatcgggaattatgaggcagagcctgtcggccttagtggtggggataatgcctccaataatgatgatgactatcccatcatttattagccccttgcttagcaatgctggcacaaccagcaccaatccagttgaagagagcggaagttcgtttcccttcttcttggtgttagtggtgccgttggtgattttctttgtctatagggttgttacaaacaaccggagcgactccgaaattgaggcgttgttaagagaagcccgacgtgctgaaagggctgaacgacaaagtaatgagcctccatcagtagatgaactccgcgagcgtcagcaacaaaacacagagagagaaccggtggtcgtcagctcgtcagctccagcaccgaaagcacaaaaagaagtgccaatcgaagttcaacagggcaagcgcaaaattattttggattag

SEQ ID NO: 101164 - DNA, 933 bp, Enterobacter aerogenes
atggaaaaagcgattcaaagatacttggctgatgaccggcaatatcaagacagggttgccgtagccatcagcctagttgaagagaaaggcgctgagtacgaagctctttgccaacagagggctcagttggggggctggcaaaaaattataacattccggcagttccgtaggcacatcgccgctatacgttctgcactgaaaggacataacagcgatttgcggtatttgcgccgagggagaggccagctaaaagatgaattggtttctcgggtcgtgaagcaagcgattgatggtagccagttcttggaccgaatcatccacgctcaggaacggcttgatgcggcatctcgactcgacaagagcaacacgcgactggttgacatggggcaaaaagccttaaacgaaatccgtgaggcttcttccagtgtttcgtcagcacaaacaatggaggtcctcgatcttgtgactgacaacaaggggatttccgtcatgtcgtcgatgtccagctcatcggccagcagtgaaatagatgatgcgaagagagcagtcaaagccttctcaaatgcgctgggggagcatcgtgacatcgtgggctctctacatcactcaatgtcaacggagtttatcgatctgggtatggactttgccggtttgaatgatggcttcgacttggggagcgtcttttcgctgttcagcttgtcgtctgccagttcgtctctggacaaagtagagtcttgcgttgaatcactgatgccagcattaaagcgagcagcctccaattcggaagcagagtatgcccgtgctaaagaagagttctttggtctaaaacggcaggcctgtatccaggtatatgagctcttgctgacaaatgatgtagaggtgtcagtcacacattttgagtcagccgtggacagctacagagttgggaattga

SEQ ID NO: 101165 - DNA, 729 bp, Enterobacter aerogenes
atgtttgatacgactttatcttgtgtgaatgtcgctcttttttgcgccgcaaacagtatcatgtgggtacagagcaggttcgttaaaatatctccaaactcccctcccttgtggattgcgttaatgagtccagacacaacctatccggtggtgatactcacaatgctggcaatgccgggaatagaattaatgaatggcgctgagtttaacgtctttatgttgagcatctttgtcattatcgggctctttcacttgctggcccggcagggaaagtcaaagggggcccgacttgacttggttggactcgacccgatgctttcctggtggctagaccggcaaggcaatgtctacccccacctgatgagtggcaaagaaggtgttcccgccctgtgttgctccaaggattcagccgaactcctgcttagtcagtttctggctttcggctctcagttcgataaccccatcaatgtccgcactccgttcaagctccctcgtttgataaataaattgaccagcaagggatggcttgttgacaccttaccttcgacgcgaactccttttcttatacgagcaattctggtgctacgccgtcgaaccgcagattgttcttgcaaagacaaatctcggaaatgccttaaaaagaccccttttccttggcgagcacagtggaaacagtgcgccatgcttcatgctgccgttttatatcctccggcaataagccgtaactaa

SEQ ID NO: 101166 - DNA, 342 bp, Enterobacter aerogenes
atgaaacatgtactgaatatcgcgctgatggctgttgttgttcttggcctggctatgcttgaggataccaactggggttacgcattgctcgctatcccgacggtgatttgggcaaagccagcgcttaaccttctgcataaactgccggttctggcaactgcattttgggttctggttgctgttttcgcatggcaaggggcgcttgctggcatcctgttttatggcgtacttgccactcctaaaacaccagccccagcacacaccaaaggcaagaaaaaccgcaaagccaacctgatcggcacgtatagctacgactttaaaaccggcgaatgctttagctaa

SEQ ID NO: 101167 - DNA, 195 bp, Enterobacter aerogenes
atggacgaaaaaatcacctacgaagaaatgcttgaacaactcgaccagaaaggcttccgtgtgaccgatggggcgcgacgacttcacgttgcgttgaacaacggcgtgaaagctgacgtgctgtttaactggggccctgcaacaatcagcttggttgatggggaggttgttgtggaagagcatactctccactaa

SEQ ID NO: 101168 - DNA, 144 bp, Enterobacter aerogenes
atgcgatacatgctcagtgttgcccaacatgttctagccgggaagctcaccatccgtcatgccatctatgttctgcgcgttagaccagtggcagttgcaagcaagggacagacttggattatcgatcccaccttcgaggtttaa

SEQ ID NO: 101169 - DNA, 324 bp, Enterobacter aerogenes
atgtctgacatgaataagggggtggggatgaggttgtcatcaactcagaaggatattttgttcattctatatgcaattgaagtcggtggaaaagccgagcctgtaccaggtatgaaaatgctgtcgatgatcaactcagctcgccagagctgtattcatggaacgaacttccgaacgtcatgccacacgctggtggataacggcttattggacaagtaccgggacgaaacttctctaaagctggcctttaagctgaccgacgagggcagggggcgtgcaggagagatataccgcaaaaggttggaagaggagctggagaagtaa

SEQ ID NO: 101170 - DNA, 519 bp, Enterobacter aerogenes
atgaggttaggtatttttggggtggcagcctccctagcagcaatgctggtggttgcccctcaggtatgggcagaaaccttcaatgcgagggttgtgggcgtttctgacggtgatacagtcacggttttgactgaacgagactgtgactcaggggaagattgccagagtggcaaagtccagtaccgggtaaggctggcggaaatcgacacccctgagaagatgcaaccttacggctctaaggcgaaacaagtattgtccgatctggtgtttggtcgaatgctcaaggttgagaggatcgacaaagaccgttatggccgcttggtagccaacctttatgttgatggcaaatgggtcaatgccgaaatggtccgctctgggagtgcgtgggtataccggcagtacgccaaaacaccagagctgttccagctagaagccgaggctaaagccgataagcgaggcctttgggcattaccggaatcagagagaactcccccttgggagtggcgaagaaagcactaa

SEQ ID NO: 101171 - DNA, 303 bp, Enterobacter aerogenes
atgcaaggtattatttctttccctgacgttatcaaaggcctcgtggacgatgctttcgatacggttgaggctgccaaaataggcctcaacgcctctaaggatctgtaccattttcagaaggcggttaatgaacatggtgaggagactgtcgtccaagagacagcgagggttttgaaggaacgttaccattgctcttatgcggaggcttccgtggacgctggtaatcgtgtccgtgcagccttggagttggtcaaaggccaagacaccttcaagacagttcgtgataatctcaacaagaagtga

SEQ ID NO: 101172 - DNA, 273 bp, Enterobacter aerogenes
atgaggagactgtgggctatcgcgctcgtaggcgcaattttgatactcgtcgcagtgatgatcctcagcgacaaagcaccagacaaaccgaaagagggtgagttgaggagcatcaacacccctagtcatggagtgggggttctcttcggctcacctaagtatgaagccaaaggtgagccagtggatggaggtttccttgataagaagggtgctggtgagccaatggcccctctccctagcgctcctagcgatggacgtgccatcgaggaatag

SEQ ID NO: 101173 - DNA, 1641 bp, Enterobacter aerogenes
atgagaaatgtggcaaggaaaggtgatccgactagcacgggtgggatgatccaagagggagacagcagttggctcagcgaaggctctccaacaacatatatcggaatgatagcgacttgccctgcttgcaaagtaggacagggccctatcgttgccgttggccctcgctccatcatcggtccaggtgggcctgtggcgctgcaaggagactatgttgcctgcggttgcccatcaatgagcaatgtaattcttccagcacaaggaacaaccgttggcgataatatggggccccgagccaaaacagccagcacaccagtagaaccaccggcttccacactagcagactcacagccagcttctgcactcgctgactccgtaacaactcctctcgttccgaaaccccttccgctggtggatctcttagagacccggatcggcgtctttttcgatggcacccagaacaacatgcacaacagcaagctcagggagcaatgcgagagagccagtgatgccgtgtgttcgtcaatagagaagttgattggcgctggaacgtcatacgataacggccttaccaatgtggcacgtctacacaatgcctacacggggaaggccatctacatcgaggggatcggaacccaatccggtttggcagacgacacaaagggcctagctcttggtatcggtggaaccggtgtgatcatgaaagcgcaaatgggcctggatcagctcactgcacatgttcaatccctcccccccggcagtgttgtcgttgatgtattcgggtttagtcgcggcgcagccgctgcgcggcacttcatcaacaagctgctcgcactaaacctgggaaggcctcttcgagtggggtttgtcggcctgttcgacactgtagcggctatcggctctgcggcagatggtctggatacctccgatgacaacaatttgggggtgtcactctacctggcccccggatgtgccgatcaggtggttcaactcaccgcgcaccacgaataccgggtcaacttcgccctcaactcaatcagctcgacccatcgtgagatccctctatacggagcccatagcgatataggtggcgggtatcttgccggtgaagagcggatccccatagctagaccctatgaggtcactatgatggtgggtgatcaagaagccttgaaggcattcaagtccgaagcctccaagcgctactatgaagctcagaaggtctatcaggcctatctggcaacaccgtcacaactcaaagacgagctccaccaatactcgatccctacaccgtcgggcggcagaactggctatattgcaaacacggttatgacccggtacgtcaaaccagagctgcaattgcttgcaggccacctcatgcgacagcttgccgcagagtcaggcgttccgatcctggagcttacggaaaccattccagacgagcttgcggcaatatttactgcctaccaggcagcggctacaacgggtgggctgccgacgctgactccagagcaggaacacctgatcatgactcagtatgcccactgctccgacagttgggttacatcggcagggatcttcgttaacgcaccagcgccatccagaatacgtcgggtctaccagcaacagcaggggaagtag

SEQ ID NO: 101174 - DNA, 939 bp, Enterobacter aerogenes
atggagtttcgctatccaacggcagcggcagaagttaatgcagccaaactgaaatatctgacaaagaatttgagcgaccctatctcgggaaaaaatgaatttgagcgcctgacgaaagaactgggtaactcaatagacggatatgcgacttggcatccggtgctaacgatccctagagatagactaaggccaaatgaagatcgagctggtgatttgttccgtctatacaaaggcctcgatcatgtagtcaagttcgtcaaaggctttgtttcatgcccttatagtgaagaggctgcaaattcgctagtagagcaagtgcgcaatgttccaggtttagatgcgtatcgtcttgataaaccactttaccatgacaacgcttatccggtcgttgtggtggcgaccgaagtcacccttgaggcggatggaacaatccgcagtcgtgatgccatcgcatggtgcgttcaagagctagttagaaatgctcgccaagcagaagtggctgaaacatggtggaacctcaaaagtgaaattcttggtgaaccacatggttcgcgttcatcactgctggttaatcagttcactggtgggcacatgcgaaaaatcttggacgctttaaacagcagtggtatgtacggcccagttaaagaatggtctctggaaatgctctcgaagaaaaagagagttctgatagctgagaccctgctccgcacagcactcaaaaactatgatgtcaatcaccaagcatttgaatttgaactaaatggagaggtatgccaagccgaagtgcgagacacatggagtgatggcgccgaattgtttattcaggtcacaattggtaatagtgacctagtagtaagtggcttttactaccgggaaaatgactgtttggaatcatcggatcccaaaggaaaaagagctattgcggaaaaattcttatag

SEQ ID NO: 101175 - DNA, 495 bp, Enterobacter aerogenes
atgagcgaagaaaacgattttggtgaaagcatcaagttctactctgatgggcaacaggatccagtcaagcggacaggcctgaacgcccagtacaccatgacgaaggcgaactacccgacagtcagcatcgaggttgctccgatctcgaagccacgttcgtccccaaactgggagaaaaaaataacagtgcagcttaccaagggagagttgaacgccgtctgtggtgtgttgtttggtctccgaaaggaggctgctgggtcttaccacggggacgccaataacaagagctttgcggtttacaacaatggtaaagcaggggtggctcttattgtgagtcagcgaggagagcagcttcaccatttcctgtctgccgatgatcggatggaggccgccgtattttttatccgacgtttggcggaagcttggaaagtgagctcatctgatgcgattgcgttgttacgacaggcggcctggatggataagcacctcatttaa

SEQ ID NO: 101176 - DNA, 1314 bp, Enterobacter aerogenes
atgaaaatgcagacgctaacagtggcgatgaatggtgaggtcgtaggaacactgtaccgagataacaaaggggccatgtcatttcagtatgccccggagtggatctcggaaccaggttcacgcgccatttccatgtcactgcctttgggtcatggcaggatcacaggaagtgaagtcttcaatttctttagcaacctcctacccgactcagaggcaattattgccaggatgcaggctaggttcagagttgagacaacacatccatttgatttgctggcgagtgttggccgggattgtgttggagctatccagctctattcccccgatgcggacatcccaactgtaatggagacgcttgcagagcctctggatgaagctcagattgagcaactgcttgaaggctaccaggaagcgccccttgggatggcagaggatgctgattttcggatctcgattgccggagcccaagagaaaactgcactgctttggtatcaggaccgctggcaacgccccttgggcagcaccccaacaagccatatttttaagctacccattggtaagattgttcaaaataacatcgatctcagtgagagttgtgagaatgaatggctctgtttgcgcattgcaaaggccttcggttttgacgtcgccaatgcggacctagcaacgttcggcaagaagaaggtgcttgtcgttcagcgttttgaccggcgctggtctaaatccggcgaatggcttctacgattgccccaagaagacttctgccaagctcttgggatcgctcctgcgctcaaatacgagtcacatggagggccaggtattgctgacgcaatgaagttgttgttggggtccagacttgcggctaaggatagagagcaatttttcaagtcgcagatcctattctggatgttggccgcgattgatgggcacgggaagaacttctccatcttcattgagcctgcatcgtcatttaggatgacccccctctacgatgtcatgtctgcttttcctatcttcaaaagcgggggaattgctgctcaaaaggcaaagatggggatggcgctccaaggcaaaaaccgccaataccattttgcgatgatccagcctcgtcattttatcagtaccgccgcccatgtcgggttcccacaagataccgccgctcaacttatgttcgacatggctaccaagacagaggaggtggttgccacagtagcggctgagctgccagccggtttcccagagcacatcagtagcgccatcttcgaggggctgtccagccaggcggctaagatcttgaagggagtaaccaaatga

SEQ ID NO: 101177 - DNA, 252 bp, Enterobacter aerogenes
atgaaagtgacatctccatccttgcttgcggctgcggtgcgtgaccaacgcaagctcagcaaactaacgcagtcagaggcggcgaaacaggtcggaatcaagcagacgaccgtctctgattttgaactacggccagaatctaccaagctggagacgctattcaagctcctttctgcactggatctggagcttcatgtcgtgaagcggggttcaatattggacgatagtaaagtctgggatagggagtggtaa

SEQ ID NO: 101178 - DNA, 1005 bp, Enterobacter aerogenes
ttgcacgatacgaacaacgaccgagagggctcgctttcacatgtgaaagcgagcgttccgtcagaacaaaccgtccgcagtgaactgctgccgtcatcgagctcgctccgaaacatccaggacaaccctgccgtcgcctatctgatgagtctcgggtcaaagcgaagcaggcagacaatggggtcattcctcaacattgtcgccaagatgatcgggtttcagaaccttcgtgactgtgcctggagctcaatgaggcggcatcatgtccaagctgtgatccaaatactcagcgactctgaccgcgctccagccacgatcaatacctacttggctgcgctgaaaggagttgccctggaagcgtggacaatgaagcagattgataccgacagttaccagcatatcaagcaggtgcgttcggtgaggggctctcgcttacccaacgggcgagccctcgaaaagcacgaggtcagagccctttatttcacatgtgaaaacgatcggagctccaaaggattgcgtgacgcagccatccttgctgttttagtcgggtgcgggcttcggcgctcggaggttgtcgccctcaatatggaatgcgtcatcaccagggagcaggcgcttcgggtgctgggtaagggtaacaaagagcgcatcgcttatgtgcctgacggggcttggcagcggcttatgcgttgggtgaatgaggttcgtggtgagcagcccggagctctgtttcagcggatcaggcggtttgatgatgtcaccgccgacagaatgacggaccaggctatctatcacattcttgaaacgaggagaattgaggctgggttggaaaaattcgctccacatgatcttcgccgaacctttgcatcggccatgctggacaatggtgaggacatcatcacggtcaaggatgcgatgggccatgccagtgtcacgaccacgcagaagtatgatcgccggggagatgagcgcttgaaacaggccagtcggcgtctcgaattctga

SEQ ID NO: 101179 - DNA, 564 bp, Enterobacter aerogenes
atgccaaacgaaaacaaattgtgggagaggcccacgaaaaatgtcatcttcatcagccagtctgaggccgaaaggctggagccagtagccggtgcggccatgatctccataactgatcctgataagtcccctgccactctcggtccgtgggagctgctgtaccgcgatagcttctatgatggcggctattctgagagcactatccacacgatgaaggctgcgttccggatgaattacgcctcctatatcgactcttcccaggctgaaaggctgtccaccttcctggatggattggctggtagtggtatcgatcagatcttcgttcattgctattacggcgaatcaagaagtggcgcgatagcgctgtacctccagaacaaacatggattcaccccgaacaagccaatcaccaagcccaaccgaacagtttacgagttgctgtgcaacccagccaagtttgaaccgctgatacaaagctacgaaacgcaagatatagaggaggatccacctctccacctcaaaatatgggatttgcttctcgttgcggtggggcttaggaggtaa

SEQ ID NO: 101180 - DNA, 282 bp, Enterobacter aerogenes
gtgatttttgatgtaagagcgaccttcgagatagcactccagacggacactaatctgatacttatcgatctggatcaaggagcatcagttacgagcgatgctgatgcggtgatctcctggttggccgcaaacctcgaaggtggaattggaaagcgtaaggtttactaccgggataccgacggacgctttgatgagctcaaggttaatgccggtgcattcgtcggtttcgcaccttgtagcgaaggccagcagaccgccttttctaagatgctcggtcagtaa

SEQ ID NO: 101181 - DNA, 822 bp, Enterobacter aerogenes; identical to SEQ ID NO: 16544

SEQ ID NO: 101182 - DNA, 2109 bp, Enterobacter aerogenes; identical to SEQ ID NO: 16545

SEQ ID NO: 101183 - DNA, 1668 bp, Enterobacter aerogenes; identical to SEQ ID NO: 16546

SEQ ID NO: 101184 - DNA, 762 bp, Enterobacter aerogenes
ttgcttaatggcgcagaactggcgaacaaaatgacgcgaccaccaccgcacttcaccgaagccacattgctcgctgcgatggagaatatcgcccgattcgtgactgaggagaagttcaagcaaatcctcaaagacacagccggtttgggcactccggcaacacgcgcaagcatcatccagggcgcagttgataaagggtatttcaaacgccagaagaaggtgttacttgccaccgataaggctcatgcactcattgcagttcttccacaagccatcaaatcaccaggcatgactgcggcttgggagcaggagcttgagaaggttgccacaggctcaggaaacatgtctgtcttcatgaaacagatttcgacatggatctgccaaatggttgaacagctcaaagtggcggcaccagttctgaccaaagaaggtggcgcaatggctaaagcatttgaaggcgcaaaaccgccctcgcatgaatgcttcaactgtggtggagagctccacagaatcaaagggaagaacggcttcttctggggttgtcagaatgaggcttgcaaaaagacattcccagacaacaggggcaaacctgagaagcgtatcgctgctgaggattgcccagactgcccggattgcggcagcccgatgcgccttagaaaagggaaagctccaggtaaaaaacgagcatctaagttttggggttgtaccgcttatccagactgcaaaggcacaatgccattcaaaaaatcagacttagaatga

SEQ ID NO: 101185 - DNA, 792 bp, Enterobacter aerogenes
gtgaggcagacttttagtgatgaggcactagagaaactggatttaaagttggcagagaacaaggacacgtgttggctgaaaagtatattccgtaagcatagaaaagcctttagttatttacagcatagtattgtgtggcaagccttattgccaaaactaacggttatagaagcgctacagcaggcaagtgctcttactgagcactctataacgacaagacctgttagccagtctgtgcaacctaactctgaagatttatctgttaagcataaagactggcagcaactagtgcataaataccaaggaattaaggcggcaagacagtctttagagggtggggtgctatacgcttggctttaccgacatgacagggattggctagttcactggaatcaacagcatcaacaagagcgtctggcacccgcccctagagttgattggaaccaaagagatcgaattgctgtacgacaactattaagaatcataaagcgtctagatagtagccttgatcacccaagagcgacatcgagctggctgttaaagcaaactcctaacggaacctctcttgcaaaaaatctacagaaactgcctttggtagcgctttgcttaaagcgttactcagagagtgtggaagattatcaaattagacggattagccaagcttttattaagcttaaacaggaagatgttgagcttaggcgctggcgattattaagaagtgcaacgttatctaaagagcggataactgaggaagcacaaagattcttggaaatggtttatggggaagagtga

SEQ ID NO: 101186 - DNA, 1617 bp, Enterobacter aerogenes; identical to SEQ ID NO: 16548

SEQ ID NO: 101187 - DNA, 201 bp, Enterobacter aerogenes
atgcaggcaatacaccacgtagaaaagtttcatccaaaagattttgattttattgcattaagtctggcccagatgaactcacaagggcggaaagtggacgttgaacaggtcaccggcagtatgaatgatgcatgtaaatcccggttcctcgacagctaccgctaccatctcaatctatttgtcgaaaaatcaccaagttga

SEQ ID NO: 101188 - DNA, 582 bp, Enterobacter aerogenes
atgaaacttaaaattgcattgcttagcgtagctatgtcttcagcatatattttttccggttcagtattcgcagcagagaaatatgaaattgccttggttgcaaaagtcaatggtatcccatggtttaaccggatgggggttggcgtaaaggaagctgccgataaactcaatgttaatgcctatcagacagggccagcaaccccggatccggctcaacaagttaaagtcattgaggaccttattgctaaaaatgttaatgcaattatcgttgtaccaaatgatgcaacggttctggagcctgtattaaaaaaagcccgggataaaggtattgttgtgttgtctcatgagtcccctgataagcagatagctcaatgggatgtggaaactattgatagcgaaaaatatgctcaggccaatatagatgaacttgcaaaagatatgggtggaaaaggtggatatgtgatttacgttggttcactgactgtaccactgcataataactgggccgaccttgcgattaagtatcagaaagaaaaatatcctgacatgcatgaagtgacatcccgtttacggctttgttga

SEQ ID NO: 101189 - DNA, 219 bp, Enterobacter aerogenes
atgctggccttcggcggaacggtcgcggatttcaccgcggcggtggaagctgattgcccgcttcagcgcatgatgagcttcgcctttgttgagcccgatctgggcacgccgttggagttcggcatccagaatccagtcgatcatgaacagggtgcgctcgacgcgaccgacttcccgcagggctgtcgcgagggcactgttgcaaatagtcggtggtga

SEQ ID NO: 101190 - DNA, 375 bp, Enterobacter aerogenes
atgcgcgccgtgcaattcaacaccatcaaaaccggcctcaattgcgcggcgagtggcttcgccgaagtcatggatcacaccagaaatttcgtcatgacccaacgcccggctggcttgttccccgcgattaaaagggccagccggagcggccagggcactggcgctgacgagctctccatctgggatgagttcgggaaccgctttattaccggcgtgaaacagttgcaggattgccagcgcccccccgctttttgccgcatcagccagtttcctcagactcgggataaaacgatcatcgtaggctgcgaattcattggtgaaacccactccgtttctctgggggcagtttggatatcgaaaattattgtacgctaa

SEQ ID NO: 101191 - DNA, 504 bp, Enterobacter aerogenes
atgccgcaaagcggcattcagaagacaggctgcgcactgctcgcgtcgcctccgaacggaaataccgtggttttcaccgatcttgccagctaccccaagcaaaacggacttgccaaagcattgagggaaattggccgtatagaacgaaagctgtttatgctcgactggttccgcgatccggcacttcgtcggcgggtacaggctggattgaataaaggggaggcccgtaacgcactggcgtgtgcggtattcctgcaccgactgggggaaatcagggaccgcaaaccggaaaatcagagctatcgcgccagcggactgacggcagctatctcgctgtggaacaccgtctatatggaaagaacgatcgatgccctgaagcgtaaaggagtgaagagcaacgagcaactgctgtcgcatttgtcgccgttaggctgggagcacatcaatatgacaggcgattatatctggataagcaaccggcttccggtaagtttcgtcggctga

SEQ ID NO: 101192 - DNA, 132 bp, Enterobacter aerogenes
atgaaggtggtgtacctggctatccaggcggcgaccaagaaatggacgatgccgatccgcaactggaagccggccatgaaccgttttatgatcgaatttggtgaccgtttaaatggccaccggctttgttga

SEQ ID NO: 101193 - DNA, 330 bp, Enterobacter aerogenes
atgggattcccgtcacccgcaaaagactatgcagagcaaacacttacaataaacagaatttgccagattgatgctaattgccgcgtgctggaaacgagttcgggttatgccgttatcgatgtttcccggcgaccaaagcagggcgatcacgtgctcgtttctttctgcgggataattcagtttggcatcgttcgcggtcgcgcgctaattacttccgatggtgaagcgatcgaaggtgacgccctggacgatgtggaggtgaagggcgttctgacgttcctgattaaccgtgcaacttacgttgatgaagaccctaaccccgttatctaa

SEQ ID NO: 101194 - DNA, 204 bp, Enterobacter aerogenes
atggaaaccgtaattttccgtttcggtaacccaggtggtatcaattacaaggggtggatgagggacattgaactgaagattgataatgtttccctgccgcgtttcgccgattatatccagccagtgcataccaggttttttccctgcctggttatcctgcagcagtttgtggacagcgcggccgtaatacttcgcaaacattag

SEQ ID NO: 101195 - DNA, 1050 bp, Enterobacter aerogenes
atgcagatcaacgctataggtacgtactccgccaatcagccgctggaatcgatggccatctcgcgccgcgatcccggcccgcaggatgtgcagatcgccattgcatactgcggcgtctgccattccgatctccatcaggcgcgagcggaatgggccgggacgctgtatccctgcgtgccgggccatgaaatcgttggccgggtgacggcggtcggcgatgccgtctcaggttacgccgttggcgatctgattggcgtcggctgtatggtggatagctgtaaacagtgcgaggagtgcgcagaggggctggagaactactgcgaccatatggtgctgacctataacgggccgacccaggacgcgccagggcacacgctcggcggttattcacagcagatcgtggtcaatgaacgctacgtattgcggataaatcatcccgaagcgcagctcgccgccgtcgcgccgctgttgtgcgccgggatcactacctattcgccgctgcgccactggcacgccgggccgggcaaaaaagtcggcgtcgtcggcatcggcgggttggggcatatggggatcaagttggcccacgccatgggggcccacgtggtggcctttaccacctcggaatccaagcgcgacgcggccagagcgttgggcgcggatgaggtcgtggtgtcgcgcaacgaagacgaaatggcggcccacgtcaaaagtttcgatttcatcctcaacaccgtggcggcgccgcacaatctcgatgccttcaccacgctgctgaaacgtgatggcaccatgacgttggttggcgccccggccacgccgcatccgtcgccggaagtgttcaatctgatcttccgccgccgctcgattgccggctcgatgatcggcggtatcccggaaacccaggagatgctcgacttctgcgccgaacatggcatcgtcgccgatatcgagctgattcgcgccgatcagatcaacgaagcatgggaaagaatggtcaagggcgacgtgaaatatcgcttcgtgatcgacagttcgactctcgccggctaa

SEQ ID NO: 101196 - DNA, 693 bp, Enterobacter aerogenes
atgatttcttatattattgaaaaaaatttaaagagccttattctttttggcagtcatgctcggggggatcacactatagattctgatgtagatcttttaggtattgaagattcaaagaaccataccgtatgtaacgtaaaatcaattaatctttctctatattcctctgaaaaatctttatcaatgtgtcaacatggagatttgttctttttacatatagttaccgaaggacaaagtttatttaataactcacatttgcataaacttaaatcagcattccattataagaatagttatattactgaagcagcgtcagcgtattatttagctttaaagatatttgagtcgcaaaatgaaataataaactggccaattgcgaacaaaagaatatcttggtgtgtaagaacaatactcatcgcaattagtgccgaaaatagatcacctatattttccaagtcgcaattggctaaagcgttagctaaccataacctatcatataatgatgcttttatgttaattgatgcaaaaaaccataaagataaaaattataccatattaactttactcaaattattcctagacaattaccattacttaaaaaaagaagtaaataaaaaagagttttacacaaatggaatagtacattcgactattgaagctattttacgtaaaacccccaatagttatgaataa

SEQ ID NO: 101197 - DNA, 1167 bp, Enterobacter aerogenes
atgactacatacagatctgattcagctacagataaaaacgccccgaaattcgttaatgatcatcggaaaacctgtttttgggaatctatttatgacccagaaattgatctttcactatacaaagaaataaatatccgagaagttgacaatataaggcataacggtgaccaccttaaaaattatgttattaatttagatgatttcagtaattactctcaagaaaaaccaaatacgaaaagaattacaattaaaaatgcaacctttgagaattgcgatttaaggggaaataataaaggccaaaaaataacatttgccggatgtgtttttaagaaggtatattttggccatgctgaattacatgatattaattttgaaagttgtgactttgacgaaagttcattttctttagcaaaatttataaactgctcatttaatgatcattgtaaattcaaaagagtttctatttctggtggaaagacaaactttgaaaacagcattataaattcgggtaacttgcttcttcactcttttaaatatgctaccaatgagtattgtaatgaacatggttttcacaaagaagagcaagtctacagaatgtacttatcccaagtaaaactagctagaaatatattaaattcggtttctgttattggtgatgatgatacttattataacgcaacaaaaacgctgtttcagctgcgtttaaaagaaagagagtcaaaaataaatctttccgctagaaattataaagataaagcaaaagatgaaaaaaaaataaaaaattggagcttttatttatataaaaaactccgctcttctcttttccctgtagaaaagttcatgcttaacatatttggttttattaacggctggggtagtaattttttacgatgtattgcctttggttttcttatttgcatttccttctctttggtgtacttattacaaggtattgattcgattgctttattatcatggagtgctgtaggaaaaagtattattcagagtttagatataacttttctagcggggtatactaaatattcgacgactggaacccctccttttgaacaatttatattgcttataaatatgatccttggtttattttggtatggtgttagcctcccaaccttaataaataaaattagtgtggcgagattatga

SEQ ID NO: 101198 - DNA, 1395 bp, Enterobacter aerogenes
atgaacctcattaagtgtttgagcctgttatttttgtttttactggctggttgtcagtcagaggaggaaaccctgtcgtttctgctggcctgtaaatacgacagcgtcgtaaatattgaaaccatgctgaataacggcattgatgttaatggtaaaagcaaagcaggcattaccgggttaatggtggcggctgcagaaaatcgccgggaagtcgttgaactgctgctgaagcatcatgctaaaccaaatatccagactcgagccggtacatcggctcttatgctggcttcagcaaggggaagtgaagctgccattatctccgatttgattcatgcaaaagcggatgtgaatctggttacccgaaacaagaatacggcactgatgtctgctatttctgatggtgaggaggtcaaggatgactatctgcatattatcgagttgaaaaaaccgggcgcccctcaagaagaagagagcgtgcttgataaaatagtcgcagcgacagcggagcggtcgctggccagaaacggtagcgcgctgatgaccgaagatatggccttaaaagccgcgcccggtatattgaagaaaaatggtgaggagatcgtcgcactgcttttaaagtccggagcggatgtgaatgcggtcaataatgatggcgagacggcgttttaccaggcgattaaccacaatcgttcaacgtcggtgattaaagcgttaacagatgctggcgcggatgtgaacaaggcggacaacgaaggaacttcgcctctgatgctggctgcggtaagcactgaccctacactgataaacatgctggcgttaccggggctggatgtcgatcaaaccaaccgcgatgggttgacacccttgcagattgcctccgcctatggcgcgccagctgtaatttcagcgctggtggagcgaggggcaaaggttgattttctctcttcaaaagatttcaccgcgttgatgatggccgtgaaaatggagaaaaaatcgagcgttgttgccctgcttgccgctggtgctaacgtcaatcttaaaaacaaagcgggatatacggcgataggatatagccgtagcggagaaatacgccagttattaatcgataatcatgctgatttaacgggacaggttgcgctgatggcgcaaagcgagctccagttctgtgcgaataagttagcggattcactcgcttattcggatattgcccgttcgattagcggtgattctcgtccagacattatgatgcatcggcaggattgtcctgggctagggcaattgaccatgctgctgggcagttttgaatttaagcctgcagggacgcaatatatgggacaaacggtaacctgcacggtatcggaacaccgcaaagagtttgaggcgaagtgtcattga

SEQ ID NO: 101199 - DNA, 495 bp, Enterobacter aerogenes
atgcgttttcatattaagaccgcgttttttttcttcatcattactaatgccattcccgttatggcaaatagcagtgacttaccgccggttagcgccgggaaaagttcttcgttagtgactgaaagcaggcaatccccactgacaggtgcctggaaaatggtcaagtttgaagccgggactgccgatgaattaaaagtaataccttatagcggacaacttattatcacgaatgccggaaccctgtctgcacaggcaatgaacccggacagaacagtgcctgacaccgcttatacggttaatggctatgaagcgctgtacggtgagattaacattgatgatgcttccgggcgcttcatcgtaacggtggtttcatcacttgccagagaactgatcggtaaaaaaatggagcgagcctttatcgtaaccgggaataaacttgtactgtcaccagtagataaaagtgaaggctggcgtgtaacctacgagcgctactga

SEQ ID NO: 101200 - DNA, 732 bp, Enterobacter aerogenes
atgtcacgaatttttattacgggatccaccgacggtcttggcaaagcggttgctcaggcactgatacagcaaggccacgatattgtattacatgcgcgtcatcacggaaggatggaggctgttaacgcattactatcgcaaggcgcagagatagtaacaggcgatcttgctgacctgtcccagacaaaagcaatagcagagcagatcaatcgctcaggtccggttgatgtgataatccacaacgccgggattatctcaggaagcgctctcttccaggtcaatgtggtagcgccctggttactcagcgcgttaatcaaacggccatcccggatgatttttttaagcagcagtatgcattatgacggtcggataccgggcactgatgagcgctgggaagagtacatttccaccgttgattattcagacagcaaacttctgctcacgacgctttcttttgccctggcgcgtctctgggaagaggtggtcattaatgccgttgatccaggatgggttgccaccaaaatgggcggtaaaaatgctcctgatgatttaattcagggcattgaaacacagaagtggctcgccgttgcgacggaagcctccgctctctcctctgggggatattggcatcaccggcagttacttaccccccataaagaaaccagaaatagtgtctttcaacatacactgctcagttatcttgaaaaaataactggcgtgaaaattcaataa

SEQ ID NO: 101201 - DNA, 1173 bp, Enterobacter aerogenes
atgcagcaaaataaaacgtctctcccttatatggcattaatggcttttgccatgaccggctttatttgcatcatgacggaaactattccggcaggattattaccggaaataagtagcgcaatgaacatatccctttccagcgcgggtcagtgggtcacagcttatgcactgggctcattatttgcagctattccgttaacggtcgcgacccgtacgtggaaccgtaaatctgtcctgcagatgacggtagctggtttcctggtatttaataccattaccgctgtctcatcgaatgtctacctgactctgttggttcgtctgggagccggggcggcggcgggactggcatggagcctgctggctggttattcacgcaggattgtggcgccgcatcttcagggccgggctatggctattgctatggcggggacgccactggcgctgtcgctgggcgtccctctgggtacctggctcgggcattatcttggctggcgtctgacattcggttccatgtcactcttctccgtattgctgatggtatggatccacatcagcgttccggattcaccgggtcagcaaaagcatcagacagtgccgtttcacaaagtacttgctacacctggtgtcagaccagtccttgcagttgtcctgacctggatgctggcgcataacattctctacacctatatcgcaccgttttcagcattatcaggtatggggacacatgttgatgccattctgttgattttcggcctgtcggcactcgcgggtctcatcttcaccggaaaaatcatcgacagccatttacgcaaaatggtattggcctcgctggccgttttttcctttgtctcgttattactggggctgttcgcctatatgccagccatactgattatgggaagcgcggcctggggagtgacattcggcggcgctgccaccttgctgaatacggcgcttgccgatgcggcgggtgatggtgcagatgtggctatctctatgacggtggtgagctggaataccgcaattgctctgggcgggatcaccggcggacttattcttcaggggcctggtgttggcggcttaccgtgggcacttctggtgctggccaccgtcagtttcctgattgtaaaaatcaaccgtggatatgccttcccacgtcagattcggcactaa

SEQ ID NO: 101202 - DNA, 1158 bp, Enterobacter aerogenes
atgcaagatttcatctatcacaatccggtaaaaattctgtttgggcacgaccagatccctgcactggcgcaggaagtcccacaggataaaaaggtcatgatcgtctatggcgggggcagcgttataaaacacggcattctgcaacgcgtaaaagaatctcttaaaaacacccttgtttttgaatttggtggggtggaacccaatccacattacgaaaccctgatgaaagcggtcgagattgtcaaagcggaaaaagtcgaatttctcctggccgtaggcggtggttcagtgatcgatggtacaaaattcatcgccgccgccgcactctatgaaaatgatccgtgggaaattatcaccagctatggcagcgtggtgaaacaagctttgccgtttggatgcgtactgacgctggcagcgacggggtccgagatgaataacacggctgtgattaatcgtgcggccacgcaggataaactcttttttacgtcttcctgcgttatgccgcaattctccgtgcttgaaccgaaaatcacctacacgctgcctgaacggcaaaccgcaaacggggttgtggatgcctttgtccatattcttgaacaatatatcacttacccggtgaacgcgaaggtgcaggatcgcctggctgaaggattgctcaacacgctaaaagaagaaggcccggcagcccttaaaaatccgcaagactacgacgccagagcgaatatcatgtgggcggctacgatggccctgaacgggatgttgagtgccggtgtaccgaccgactgggcttctcacatgattggtcaggaaattaccgccttgtatggcatcgaccacgcccgcactctggcgatcgtgatgcctgccctgtggcgcttttacaaaaatgaaaaatccgggaagctggctcagtacggtgctcgcgtctggaatattcccgcgtctgataccgaaaaaatggccgatgaggctatcaatgccacggtcgcgttttttgagcaattgggcgttaaaacccgactctctgattatgatttaggggctgaagccattgcggcagttattcgtaagttaaaagaacatgggcacattgcattgggtgagcatgggaaaattacggctaaagaggctgaggccatattgaatatggcgctttaa

SEQ ID NO: 101203 - DNA, 894 bp, Enterobacter aerogenes
ttggatgaactgaaagtttttttaagcgtggccagactgaagagctttaccaaagcggcagcagagatcggtgtgacgccctcagctgtcagtcatacagtaaaatccctggaagaaaggcttgggatcaggttactggccagaaccacccgcagtatctccaccacagaagcgggtgaaaggctcatcaacgaaattggccccttgatggagcaggttgatgacgcaattagtcggctgagtgagcttcgtgaaaaacccactggcatcattcgccttacgggttcggatgacgttatccagtacctgatccgcccggtgttgcatgacttcctgagccgctaccctgacattcagattgaaatcggcattgattatggatttacagacatcgttgatcagcgttttgacgcggggatccgccccggagatgcgctgaataacgatatgattgccgtaaaaataagccaggactggcggcaactgattgttgcagcgccggattattttcagcgctatgcgaagcccaaaaaaccgcaggatcttctgaaccacaactgcatcaacgtccggtattccgacacgagtggtttgtatgcctgggaattcgaaaaggaagaccagaagttcagcctgaaggtgaaggggcaatatattgcgaacagcacggtacatcagcttgatgcaactctcgatggcctgggcgtagcctgccttccagaatatgttgcggatgaatatattagaaacggcaggttgattgcggtactgacagagtggtgcccctggtttgagggataccacatcttttatcctcaccgccgacaggattctcccgcctttatggctttcctgcaagttttgcgcaaccggtacgataacgggataagataa

SEQ ID NO: 101204 - DNA, 948 bp, Enterobacter aerogenes
atgatgttgaaatatctccttcgccgcctgctaccgctgccgctgatgctgcttgccgcctcggcgatcatcttcctgttgttacgtcttggcgccggcgacccggcgctggactatttgcgcctttctaacgtgccgcccaccagcgaaatgattgccgctacccgcgagcagctcgggctcaatcagccgctggcgctacagtatctacactggctgtggcacgcgctgcatatcgattttggcgtctcctacgccagccagcgcccggtgctggacgacctgctgcattttttgcccgcgacgctacagctcaccggcgcggcgctggtgattattctgctgacctcgctgccgctggggatctgggccgcgcgccatcgcgaccgattacccgatttcgccgtacgtttgattgccttcctcggcgtctcaatgcccaacttctggctggcctttttgctggtgatgctcttttccgtccatctgcgctggctgccggcaatgggctacggcggctggcgacatctgctgctgccggcgttttccatcgccctgatgtcgctggcgatcaatgcccgtctgctgcgcgccagcatgctggaagtgtccagccagcgccacgtggtctgggcgcgtctgcgcgggctgagcgaaagtcaggtggagcggcgacacgtgctgcgtaacgcgacattgccggtagtgacggcgctgggtatgcacatcggcgagctgattggcggcacgatgatcatcgaaaatatcttcgcctggcccggcgtcggtcgctatgcggtttccgcgattttcaatcgcgactacccggtgatccaatgcttcaccctgatgatggtggcggtgttcgtgctggccaatctggcggtcgacctgcttaacgccgcgttcgatccgcgcctgcgtcgccatgaggaggctaccgtatga

SEQ ID NO: 101205 - DNA, 897 bp, Enterobacter aerogenes
atgaagtttcttcccaccgctacgctggcgttactgactttcatggcgccagcttttgcaattaccgtaaataatctcgatgccgtaccggatgccattcattcttcagaagggaaactgatttacgctgagcaaatgacaggaacagctccagaaaatggatttggcaccttgcccgcagggttagaagaaaaagaatggatacaatgggttgccccagaagagagtgtcgatcgattgatcataacgggcgctaaaccttggggaaaagatggcacatatattggtatcgcttgttttgccgatacggcggaagatgcccaaaaacttaaaaaatatggcagcgccagctgccctgaagataacaacagcagacgcgtcaataagctgttcctcggtgtttttcgctggcaaaaccagcggctacagccgattgcacgcaccgaagaggcactggacaagctttctctgtggtcgaaaagggtggcacgcgaagccgatgacgaaacgctacaacccttacaatattacagcaagctcgatctggcgccttaccgaatcgcgccagataccatggcatttggcgtccgcggtggctattcaaacgcctactccggcggcggcgccttttatgaagtactggagctatacataattaaaggcgataagataatcaatatctttgccgatttggtctaccagtatgcggatatcgctggcgaatggaatgacgacggcacccgaaaacacgatatcagcgagagtaaatcaatccttaaaattttgccgaccacaaccgatggttttcatgatttgcagcttgttaatgtcatcgataagcataaaacgatttttcgctggtccacggccgatcggcagtattctccgcagccctaa

SEQ ID NO: 101206 - DNA, 657 bp, Enterobacter aerogenes
atggctggctggctggattcctggcatactttctctttcgccaactactacgacccgaactttatggggttctccgcgctgcgcgtgattaacgatgacgtaatcgacgccggccaggggtttggcacccacccgcacaaagacatggaaatcctgacttatgtgctggaaggcgcggttgagcaccaggacagcatgggtaacaaagagcaggttccggctggcgagttccagatcatgagcgcgggtaccggcgtgcgtcactctgagtacaacccgagcagcaccgaccgcctgcgtttgtatcagatctggattattccagaagaaaccggcattacgccgcgctacgagcagcgccgctttgatgccgcgcagggcaaacagctggtgctgtcgccagatgcgcgcgaagggtcgctgaaagtgcatcaggatatggaactgtatcgctgggcgctgctgaaagatgagcagtcggttcaccagattgccgcggaacgtcgcgtgtggatccaggtagtgaaaggcgaagtgacgattaacggcaccaaagccaccaccagcgatggtctggcgatttgggacgagcaggcgatttcggttcacgccgacagcgatagcgaaatattgctgttcgatctgccgccggtttga

SEQ ID NO: 101207 - DNA, 132 bp, Enterobacter aerogenes
atgagtaaccgttcggcggtgagagaaaattcaccgtcggactgcctgcttcagatataccggcagacttttattccgggagactttccgaaattcatcactcagccattctcttcaatcattttcatgtaa

SEQ ID NO: 101208 - DNA, 2733 bp, Enterobacter aerogenes
atgactgacatgaaattagaaaaccggaataccaaccggtctgcgtcagaaaatgataagcagcataaaaagtgctttgcgattgaaacggaggcctttaatagcccggatcacacgctggcgcgtttaaatagcagtcggcaggggctgacgaccgccgatgcgctggagcggctggaagactatggccgtaacgaagtggcacgagaaaccgcgccgccgttttttattcaattactgcaggcatttaataacccgtttatttacgtgctgatggcgctggcggcggtcagttttattaccgattactggctaccgctgcgtaacggtgaagagaccgatcttaccggcgtcattattatcctgacgatggtaagtttgagcggtttattacgcttctggcaggagttcaggaccaacaaagccgcgcaggcgctgaaatccatggtccgtactaccgcaacggtactgcgccgcgggccgggcaatattggccacagccaagaggaaatacccatagaagagctggtgccgggagatattatatttcttgccgcaggcgatctggtgccggcagatgttcgtctgctggaatcacgggacctctttgtcagtcagtctattcttagcggtgaatcactaccggtagaaaaatatgatctcatggccagcgtgtcgggtaaatgcagcgatcgtttaccgacgccggacaaaaataacagtctgttagagatgggtaatatctgtctgatggggacgaacgttaccagcggtagagcgcaggcggtagtggtggcgaccggcgaccgaacctggtttggctcactggcaaaatcgatcgtcggcacccgtacgcagaccgccttcgatcgcggcgtgaatagcgtcagctggttgttaattcgcttcatgctgatcatggtaccgatcgtgttgttgattaacggcttcagtaaaggtgattgggtggaagcctcgcttttcgccctggcggtggcggtcggtttaacgccggaaatgttacccatgatcgtcagttcgaatctggcgaagggcgcgatcgccatgtcgcgacgcaaagtgatcgttaagcgtctcaatgccattcaaaacttcggcgcaatggatgtgctgtgtacggataaaaccggcactctgacccaggataatatcatccttgagcatcatctcgacgtcggcggcgcggaaagcaatcgggtattaatgctggcgtggctgaatagcagcagccaaagcggggcgcgcaatctgatggatagagccgtgcttcgttatggagaaggacggctggcgccgacggaaaaagagcgctttgtgaagctcgatgaactgccgttcgattttgttcgccgccgcgtatcggtctcggtggaagatagccgctatggcgataagagcctgatttgcaaaggggcggttgaagagatgctcgaagccgcgacccatatccgtgagggcgacaaggtcgttgaactggacgcgctgcgccgggaactactgctgacgaaaaccgaagattataacgctcagggcttccgggtattgctggtcgctacccgcaagctggatgatgccgcgctaagcgttccgctcactgccgccgatgaacaggggctcactgtcgaaggcatgttgacgttcctcgacccgccgaaggaaagcgcgggcaaagccattaccgcactgcgtgataacggtgtcgcggttaaggtgcttaccggtgataacccggtcgtaacggcgcggatttgtcttgaagtgggtattgatgcgcacgacattctcacgggccaacaggttgagtcaatgactgaccgtcagcttcagcaggaggtggagaaacgcgcggtgttcgccaaactgacgccgctgcagaagtcgcgcattctgcagatgctacagaaaaatggccataccgttggttttctgggcgacggcattaacgacgctccggcgctgcgcgatgccgatgtgggtatttccgtcgatagcgcggcggatatcgcgaaggagtcatcggatattattctgctggaaaaagatctgatggtgctggaagagggcgttattaaaggacgtgagacctttggcaacattattaaatacctgaacatgaccgccagctccaacttcggcaacgtgttttcggtgttagtcgccagcgcctttatcccgttcctgccgatgctggctattcatctgctgatccagaatctgatgtacgacatctcacagctgtcgctgccgtgggacaaaatggataaggaatttttgcgtaaaccgcgcaagtgggatgcgaagaacattggccgctttatgctgtggattggccccacatcgtcgatattcgatatcaccacctttgctctgatgtggtacgtcttcgccgccaatcatgttgaggcgcaggcgctgttccagtccggctggtttatcgaagggctgctgtcgcagacgctggtggtgcatatgttgaggacgcagaaaataccgttcatccaaagccgcgcgacgctccctgtattgctcaccaccgccgctattatggccatcggcatttatatcccattctcgccgcttggcgccatggtggggcttgagccgctgccgctaagttatttcccgtggttggttgccacgctgctgagctactgcctggtggcgcagggtatgaaacgtttctatatcaagcgcttcggccagtggttctga

SEQ ID NO: 101209 - DNA, 330 bp, Enterobacter aerogenes
atgaaaaagactttatttgcgttcttggcactgatgtcatttagcgcagtatcagctacagcattcaacattccaacggattcgaaagccaaatacaccatcatcgataaaaccataaatggcaccatggcaaccattacgacgatgagagaggggccatcaggggtgtcttactcacagcgcctttatgactgcgctgcgtggaccgtgaagtatcttggtgatggagacacgctggagcagatgaaggcatccaagcctgacgaaagcatgtcttcaatagttgataattcaatagcgtattatataggccaacgggcctgcaaataa

SEQ ID NO: 101210 - DNA, 246 bp, Enterobacter aerogenes
atggcactggttaaagtgattagcgataaccttttctccggtaccaatctccagaaactggaggttggtgcaaaggtggaagtaagcgaagacaccgcgaaaaagtggaaagccgctggcctggttgaaatcctatcctgtggggatcgcaagcttgaagtcgccactcctggcgatattcctgcagagcaggcagagcaggcagagcaggcagagaccaccgctaaatcgaagaagggtaaataa

SEQ ID NO: 101211 - DNA, 1095 bp, Enterobacter aerogenes
atgcttgtttattctaaattgctgggcgaaaagaccggcaacctggccgtgaaccagtatcaatttggtatgctgacgcaggaacgtaatgccgctttgaaccatcagggtattaacgtaatgcaggaaatggctgatcgcctgaatgcagtcaatcagctgaatggcatcaatgctgttcgctcacctgctgatctgtacaaggcatttgaccagaccgtgctgcgtcaattccagccgaacactgagttcactctgttcaacgacctgatgccgctgtctcgttcagtgcgcatcaatcagaccgtgtacgaatacgctaagtccggcggccgcatgtgggctcacacctctatgtcaggccagatcggcgcggcgctggatgcggtgcagtaccagtacgacggaacaatggttccggtgcacgataccggcttcaagttccactggcgtgagcctcgtctgaacaaccctgatgcgttcgacattatctctgatgctcagttcgagtccaccaacgaagtgcgtcgccagtatgttgattacatctacaacggctatcgcgacgcggaaggtaactacatcaagtttgatgagaagacctggaagggcctgaagaatgatgagcgcgttgcgatggttgatctgggcgcatctggcctgaatatcgacttcaccagcgcctccgccacagctgagcagatccgtaacgcggcgattaagctgcgagacactctcaaactgaccaacaatcagtatgcagagcagacctggtatgtgtcgagcgccatcatctccaacctggagcgctacttcagcgacaactaccagtctgacaccattctgcaggagcttctgaaactgagcggcatttccgcgattaaagaagatgcccaactgaccgacaaccagatcctgattgttccgctgactgctggcgtgattgccccgattgtaggccaggcgttcggtaccgttgccgatccacgcccgttctacaacagtgattacatctggcgcacctggggcgctgctggcctgatggtaaagaccgacatcaacagcaagaaatcagtcatctacgcacacagctaa

SEQ ID NO: 101212 - DNA, 429 bp, Enterobacter aerogenes
atggctaaagacggaaaacacgtaattcacgccggtggcgtattccctaatccgctgctcaaccgtgaaggccgcgccactgcggttaagcccggcaccctgggcttcttcgatgctggcgtcttcaaggtgtcggtagatggaagcgagacagcgattatctatgtcgctgacttcgattatctgcgctgcaaaacggtagatgacacgtttgctgtcgacgatctgctggtgggcatccatccgctgccgggaatgttcctgaatgtgcgcgctgctgccggcacctacaaaaaaggcgacgctctctcaatcgtcaacggccaggtgaagaagtgggccactggcgaatcagatcgctgctattgcgacgaagagcgctcaatcaccgccgctgctggcgacctcattcgcgtagtgattaagtaa

SEQ ID NO: 101213 - DNA, 312 bp, Enterobacter aerogenes
atggaagcacgagaaataggtaagcgtatttacaatgttttatggaatgctaactgtagaaatcgtaataaccccatacttgttagtattgatgacctaatgtctgccatcaacgagaatgttcaagtaactctaactcgcgagcaagttgttaatgttattcttaacgatcctttcaggcagattgatgctagtggtcgcgtaagagaagaaatacctctttttgaaactgcatttacgaatgatgttttagtgtcagttagacttccagaaataccatttaaatacccccatcagtggggacttagttaa

SEQ ID NO: 101214 - DNA, 387 bp, Enterobacter aerogenes
atgattggcgcactggttaagcgttactggttgcagttgattgtagtggcggtaatcggcgtgatggcgttcttcgtgaactactaccgtgataacgccatcacctacaaagaccagcgtgataaagcaacggtcagagcggaaaccgccgagaccgttagcaatagcgtagtcaccgcaatgaacctcatcaatgacatttcccgggtaactcagaatgcaaagaccgaactttccctggcaggtgagcagcgcattatctacatcaggcaggcgcttgaaggcgatcagtgcgctaagcagcttgttcctgctgccgctgcttacagcttgcgggaatacgcggacggtttacgtgccggcgccggtagtcccgataagcgctga

SEQ ID NO: 101215 - DNA, 231 bp, Enterobacter aerogenes
atgaagatcacctatagcgacgaaggggcttattcccgcatctggctgactggcccgttttggcagctggctatggccagacgcattgcggatgcagggctgtacgcttctccggtcaatacctgggagtctcgcggaattaccttccagatcaccctgtacggaaagagcgcgtatgtgctcagggcatataaggcaatggccaaggccatggcgaggacaaccaaatga

SEQ ID NO: 101216 - DNA, 483 bp, Enterobacter aerogenes
atgataagtgcagaagatttgcaaagattgctcaatcttccggaacctccctctgaagagttaatggatgtttatttacagttcaccatgattttcccgagggtagagcaacgtttttttggtggctttgctacgtgtggagagagcttagtttatgctcgaaacttacttgctgcccgaagagaaatacctaatgaactttttcacaattttaggcagagatacattttaaataatgatgctcaagaaaggctatcggctctttgctttggccgtgagagagatagacagggaatcattagtggacttcagcatgatgcagatgatgatttaaacatcatgtctacagttataaagattgttataagggtaagaaataacctcatacatggtaataaagatgcttatctctttgttgattctcaggaacaagtgcaactactgaggagttgcgttagatttcttcagggggttttaaattaa

SEQ ID NO: 101217 - DNA, 255 bp, Enterobacter aerogenes
ttgaatcaatcaaaatggaacatcgcagccaaaagccaggaagcacgcgacaaggttaatgttgaccttgcggcttccggcgttgcttacaaagaacgtctaaacatgccggtcattgccgaggttgtgatgcgcgagcagccagagcatcttcgtgattacttccttgagcgtttgaaatattaccgcgaacaaagtctctctttgccaaaggcatctgacccaagatatctgaaacaagaaggtgaaaaatga

SEQ ID NO: 101218 - DNA, 270 bp, Enterobacter aerogenes
atgtattacgacgaagttacggaacaagagctttcccgctatatagcgatttttaaagagataggagcaactgaacactatgaggttaatgaacacataactatacatgacatgtgggatgagtttcggaatatacgttctatgaataatcacgggcgaggaaaggacagcattcccggcattcagcctaaattctttcgtgagatctgtcagagattgagaataagtggtggcaatgggtctccccttgtgagtagcaagcagtattaa

SEQ ID NO: 101219 - DNA, 531 bp, Enterobacter aerogenes
atgaataaattaaccttagagcagttgcgcgcactggctgttaaaaaagtcgaggcgctgaaattttcgattactcagagcgcctataccggtatccgctgccgccttgaagaagaactgcagttagctgaattcgcgctggccgcaatggacagcgagccggtgattattgttggcgatgatagcggtgatgctctttcttatcgccgccttctccagtcttttgcgcctggaactaagctctatcgccacgcgcagccagcgccggtagtgccgaatgaaagagataagaccgttgatgctgacgaccatccattgacgtggagctttaacgaaggctggaacgcctgccgcgctgccatgctccaggctggcaactctccggcaattccggatggttacgtgatggtgccgaaggtgccgacaagggatattctcgacgagttcgactcaattatcgactatggcgcagaagactctgtagacgcctggcgcagactgctcgcagccgccccgaaggaggtgaagtga

SEQ ID NO: 101220 - DNA, 285 bp, Enterobacter aerogenes
atgtcacgaagaatcagactaaccgatgctcaaatctatacgcttcgccgtatgtatagcggtacgcgctacttcatgcgtggtgatatggagaaaggcgaacaggataaaggttcgcatcgcgttaactgcccgtctctcccggtgctgttccgggaaggacttgtagattggtgcaatccatcatgccgcaaatctgatgggctgtattacagcgtaaaattgacgccagacggaacaagaggagctatcggtgcgcagacaagagaggatcgcgggctatga

SEQ ID NO: 101221 - DNA, 729 bp, Enterobacter aerogenes
atgatccaccttcacaatgccgattgcttcgaagttttcccgcaaatcgccagcggtaccgttgacctggtatgcgccgatattccctacggtaccactcagtgccgctgggattctgttctcgacctgccgctgatgtgggagcagctctaccgcatcgttaagcccagcgcagcgattgtgctgttttccgctcagccgtttaccagtgtgctggtcaacagcaatctgcgggactggcgttcagagtggatttgggagaaaggcaacgctaccgggtttctcaatgccaaaaaacagccgctgcgagctcacgaaaatatcgaggtgttttatcgccgtcagccgacctataacccgcaattcacacacgggcatgaaaggcgcacatcgaagcgcaaaaccgtcaactcagagtgctacggcaaggctctaaccctgacgaaatacgattcaacgagtcggtacccgcgcgacgtgcagttcttctcgagcgacaaacagaccggcaattatcacccgacccagaagccgctggcactggtgcaatacctgattgaaacctacagcaacccaggagatacagtgctggacttcactatgggtagcggtacagctggagtcgcctgccagcagaccgagcgcaacttcattggcatcgagaaggatgccgccatttaccgcaccgcatgccagcgcatggggattaaacaggagtgtgcagcatga

SEQ ID NO: 101222 - DNA, 300 bp, Enterobacter aerogenes
atgaaaggtaaacaggcaattctgcgttatctcgaaacgcaccggaccttcacagcgaaggatgtggctactgagtgcggaatgacgatcaactgcatcacgaagaatgccattgagcttgagcgggccaataagcttgttcgtttaagcaaggtttggcgaacggttacatatcggatggcgtcacctgaagaacaggcaggaacggcacgcagttgcaccaatcagattttcaacgagtgccggcagagcccggttatgaaacgaattttagcggtctacgggagagcgcaggcatga

SEQ ID NO: 101223 - DNA, 474 bp, Enterobacter aerogenes
atggacaagccttgcttccctcccctgctccctcccggattccatgactttgatgatgataaaatcaagtcattatgcgtggaagcatttccgaattccgttagaaggagtatgctatactgtaattacatacagttaattgagcattttagagcaataaaccagcagtgtcgctgttttacagaggtgtggctcgatggttcttttactactcaaaaacccgagcccgatgatgtagacattctagtggttattgattttttagctttaaacaaattgcccgacgtgctgaaaccaacggttagcactttgttaaatagagattatgttaagttaaattttaacatcgatgtcttgttattggctgaaaatcatcctgatctcgattacgatgagaggcggagttactggcgcggatggtttggctttgataggaaggagaatccaaaagggcttgcgagggtcatgttatga

SEQ ID NO: 101224 - DNA, 933 bp, Enterobacter aerogenes
atgaacgatgataaaactttcaactctttgaaagagaaaatcgcctttgttcagcgtgacgtggattctcttgcccagcacaagggaagatcctttgctgatgatatcctgtatagatctttggactctcatttaagcgatctccgggctgaacaactagccatcgaaaacaagcatcccttgcaggattttatggaactgcgtctaaaaggtgttttggttgatcttggctcaataccattagaaatcctgtcaattatttcaggaaatttagcggcgttggtacagaaagcagtacatcgtattggctctgggaaggactcgcgacgcgtcccaaatgatgttaaaaattcgctaaatttgaggcttgcagacctaggaccaggttcgacaaagctcggagttactttttccactggcgcatgtgaacttgttgaaacagtgtctagccaagctgtgaaggaaattttctcattgcttgaagcagcagatgaagaaacctttatggctaaaatttctgaaattggttcgaattcaacgattaaccttaagaatattattgatgaatgcgaaaggaatagcttgaattttgatcttacctggattggcccactcagtgatgggactaaacatgtctcgataaattctgatggcattcatcgccttaccaatagattagccatgactaaaatttctaagctacccgatgaaattatttctggtgaactggcagtcttgtctatgtatggaaagcttgaaatcgcaagtgacaatggaaagattaaagcatcatatccaattgatatgcttcaggatattcaaaatagatataaagttggtgagcgcataacattaactgctagtgtttctgaagtttataatgagcgaataaatacttcccgtcgtaactatatgatcaagaaaataatttaa

SEQ ID NO: 101225 - DNA, 654 bp, Enterobacter aerogenes
gtgaaagaacgcggaatgatttttaacagtgagatggttcgcgccattctcgatggccggaagacgcagactaggcggattgttaaagggactgacggcgccgtgaagttctgcaaggaatgggacatcaacggagaagaaatttttgttgtgctcggcgaaaaagaccacacaggaatgaatcctgtatttggtgctatctcttgcccgttcggtgccgtcggcgatcgcatctgggtgcgtgaaacatgggcagaggctggagcctgcgcaccggacctcaaactttatcgcgcgaattaccctgagcatgttccgtcgatttatgaaaacgtgccgctggctgaagaaattcgctggacgccatccattcatatgccgcgcgcagccagccgcattctgctggaaattacaaacgtgcgagttgagcggttgaacgccatcagcgaagaggatgcgcgagcagaaggcattattgacggtggctgtctcaattgccgggaacctgagccatgcggatgcgccaatccagagcctgatgctaccgatgcttttgcctacctgtggcaatcgatttacgggcaggaaaactggaatgctaatccctgggtttgggttatcgagttcaagcgcgttgaaggcggtgcagcatga

SEQ ID NO: 101226 - DNA, 534 bp, Enterobacter aerogenes
atgagcaccacgacagtgcaaacattgccggatttgatagatgttttatccaaatttgttgtcccattgattgttgctgcgttcacagcctatttttcgactaggtttgctttaaataagttttacaaggaaaagtggtgggaaaagcgacttgaagcattcaccgaagttatcaatatagcatatcgaataaagatgactaatgactacttccttaactgcgaaaatgcaaaaatggatcaggatgattcgagattcaaaccacatcccaaaaatattgaagataaattaagtgtggaatattggattgatattcaagaacttgaaaggatcgcgcagttagctgacttcacattgacatccaaagtcaaaagcatcttagacgtctatgtaaaggacagaagaaaaattgaaaatgactattatgaaggcgctatcgagagtttagaagtgtcagaacaggattttaaactatctcaaaagttactgagtgatttagttttagaagccaaaaatgaattaaaaattacctaa

SEQ ID NO: 101227 - DNA, 246 bp, Enterobacter aerogenes
atgagcgaagttattcaactaactcctaataagtgggttactgagaaaaaactaatcgagattactgggttaaggcctgggactattgagcgagcgcgaaccagttcatggtttcttggtcgtgagtacttgcacatatctcccgatggcgatccaaatcccaaaagccagtgcatgtacaacacagaagctattaaccactggatagagaagcaagcgtctaaacagccaggtgctcattcgtga

SEQ ID NO: 101228 - DNA, 153 bp, Enterobacter aerogenes
atgaagaagtcaggtatgctgagtctgatggatgttcaggcgcatgacggtggtattgtccgacgaattctcaagctcagcatcacagccagacagttatggcataccagatggcaacttaataccgataaaaaagaaaaagccccgagctaa

SEQ ID NO: 101229 - DNA, 786 bp, Enterobacter aerogenes
atgcgcttacttatcttcgctctttccctgctatcagcccagtgcgtctttgctgctagcgagtgtgatctcaataccatcgtcaaaaaggcctggccagaaggcgtgccgcaaggtaaatcaataattattcgcggtgaaagcgatagttattcaccgcagagcgcaatttgccgcgtctggccggctcatcctgagctcacgctggcggccattccgctgatgtctcacgaacaaactgactacgaacatactggcgatcttgaacttctggtcctcaactccgccactctcgaggtaaaacagcggttacatctcgtcgaccgtatgaatgatgatacgactagtattgatagtattgcccttgataccgcccgctggaaaatcacgcctacgcaaaccgcttttggtttacgcattacactgaggaatccctccagagtagccccttttagagaagaggtgttgtggctgtattcatatgataacaatcagattcataaagtacttgatggccttgtcgttaacagaacacatggtgaatgggatggcatgtgcgcaggggaattcgatcatattgaacgtactctggtcatgattccctcatccggcaatggcggctatgccgatatccgggtaagtggaaaaaacgtacataccaccagaaccatttccaaagagaacgattgcgaagatatggaaaaaaccggcaaagagacatggttattgcactttgatggcaaacactaccctattccgaaaaagctcgcccctctacttgattaa

SEQ ID NO: 101230 - DNA, 945 bp, Enterobacter aerogenes
atggcaaaacaaaagttaagaagagaagactctgaatggtttaagtttcaagaagaaatttgtgaacattttaaaaaccttggagctaaagcagaaacaaatgtaacgattccaggaccaacagcaacttatgatatcgatgtattggtcacatcaaaatatcttggtaccgatttcacttggattatagaggctaaacactggaatagccgagtaactattgagaaagtgaacgcattaaccactgtagttaaaaatactggcgctgaccgcggttttatcatttctaaatcaggattccaaaaaggagctataaatgccagtaaattcaacaatataacactattaacctttgatgaattaaagagtagtaccgagcatttaattcaattcgaaacgattaaaatgcatttcaatcgcttaataattctaagcgcaaggtactggggacatgcgaaaagaattaggcgagagtataatctaagaagtgatattggggattcaaaaatatacttttccggcactttgctcatgaatgccatgagtgaaattttcagacaggacgtaatatcttaccctcttcgctttattccattaatggaagatagcgttggcgatgaatttattaacaactttaccgaactaaataactggcttcacttaaatcttaaccacttagatagaaaaatatttgaagctgaaatgagcatgataaaaaatggagattttcacccagactatagttacttaaccaatgaaaccctgagtgttctttcaagtgaaagtggcagacggctccttgaaggcagttttttaccaaaggaactaatagaacaactaaaaacccgcgatactcttctctcatctggtgctatatcaagtctattcttcagccctgtaaatgaaataaacgctcctcctgatggtaaagagatcggtaattaa

SEQ ID NO: 101231 - DNA, 852 bp, Enterobacter aerogenes
atgccgagccagtcgtttacctccctgaatctgtcctgtagtggcgacagctcgttacgcacaaagacttttgccaccttctcaacgtcaccgagtgaaccgatattctcgggcttgccgcccatgagctggaacggtacgcggtgcgcgtccatcaggtcggcggcgctggctttcttgatgttaaaaaaatcatcctttgtggcgacttcgctcagtggcacgattttactgatatctctcaccatgacagacaatcggggatttgaggccgaccagctcgatatcgagctcgacgatactgacggcaaagtcgagttacccctgcgcggggcggtgctgacgttgtggcttggctgggagggttcggcattgctgaataaaggcgatttcacggtcgatgagattgagcaccgaggggcgccagataccctgaccatccgggcgcgtagcgcagactttcgcggaacgctcaattcacggcgtgaggaatcctggcacgatacaaccctcggcgagctggtcagcaccatcgcaaagcgtaacaaactgacggccagtgtcgcggagccgctgaaaaaaatcccgataccgcatatcgaccagtcgcaggaatccgacgcggtattcctgaccagactggccgaccgcaacggggcggcagtgtcagtgaaagcggggaaattgttgtttctgaaagccggtagcgcggtgacggccagtggtaagccagtcccacaaatgacgctgtcccgcagcgatggtgaccgtcatcagtttgccattgccgaccgaggggcatacaccggcgtaactgcgaaatggttgcacaccaaagacccgaagccgtaa

SEQ ID NO: 101232 - DNA, 648 bp, Enterobacter aerogenes
atggcggcggatatagtagcgcaatgtgattggcttggccttttaacgagcggaacgctcataccagcatctgcctttgttgcgatttgtctttttatcctaagggaatggttagattggcgtcgtaaatccaaagccagaaacaatgaggttcgcgcattaaagaagctctttgcacgggagtgccagttagcctggaacgtaaaaggacaaattaaaacactatgtgaaaaattcgcaccctacgaaacaaagcccatgcacgaatgcccccttgacttaagcattacgaaaacgacagcgggtaaaactcgttataccgtcacagaaaacgacgttccacgctggggtggcactctaagcgaaccatcagtcgcaaccttcacaaagcatttatatgacgtgtctaaacttgattctgcattttatgaaaaggttaacctagcttataccgccgtgattgagctgaaacatttttatgaatcgttagtggataacgaagatacatcgcagctgattggactcaacaacgtgatgtacggtttttcaggctatgctctcaatgagataatatggattgagcaggaacttaaagctctttatcagtactgtactggtgaagaactgactataggccttttacgataa

SEQ ID NO: 101233 - DNA, 1140 bp, Enterobacter aerogenes
atgatcggcgcgatcctgttcgtggccggttcgctattttccgccgccgcgccgaacgtcgaaatcctgctgatctctcgcgtcctgctggggctggcggttggtgtcgcctcttacaccgcgccgctgtacttatcggaaatcgcgccggagaaaatccgcggcagtatgatttcgatgtaccagttgatgattaccatcggtattctcggcgcctacctctctgacaccgccttcagctacagcggcgcgtggcgctggatgctcggcgtgattatcatcccggcaatcctgctgctgatcggcgtaatcttcctgccggatagcccgcgctggtttgccgctaaacgccgtttcgtcgatgccgaacgcgtcctgctgcgcctgcgcgataccagcgccgaagccaaacgcgagctcgatgaaatccgcgaaagcttgaaagtcaaacagtccggctgggcgctgttcaaagagaacagcaacttccgccgcgcggtgttccttggcgtcctgctgcagatcatgcaacagttcaccgggatgaacgtcatcatgtactatgcgccgaagatttttgaactggcgggctatgccaataccactgagcaaatgtggggcacagtgatcgtcggcctgaccaacgtactggccacctttatcgctatcggcctggtcgaccgctggggccgtaaaccgacgctgatcctcggctttatcgtgatggccgccggtatgggcgtactgggcagcatgatgcatatcggtattcactctgctaccgcgcagtactttgcagtactgatgctgctgatgtttatcgtcggcttcgcgatgagcgccggtccactgatttgggtactgtgttcggaaatccagccgctgaaaggccgcgatttcggtatcacctgctccaccgcgaccaactggattgccaatatgatcgtcggcgccaccttcctgaccatgctgaactctctcggcagcgccaacaccttctgggtctacggcggtctgaacgtgctgtttatcctgctgactatctggctgattccggaaaccaaaaacgtctcgctggaacatattgaacgcaacctgatgcagggacgtccgctgcgcgaaatcggcgctcgcgattaa

SEQ ID NO: 101234 - DNA, 732 bp, Enterobacter aerogenes
atggcgctgtatacgataggcgaagtggctcagctttgtgatatcaaccccgtgacgctgcgagcctggcagcgacgttatgaacttatcaagccgcaacgcaccgatggcggccatcgtttattcaatgacagtgaaatcgatcgcatccgcgaaattaagcgctggattgatgccggcgttcaggtcggcaaggtaaaaaatctgctgcccgatcgcgaagcggatgtcgaagacggctggcgcgaacagcaggaaattttgctcggttttctgcaggaaggtcattaccaacgggtgcggctatggctcaaagagcgcagccacagctatagcgcacagatgctggtgcatcatctgcttaatccgcttcgtcaccgcctgctaagccctcagccgactttactggcgctgcgtagcctgctcgatggtatcttaattaaccacatcgcccaatgtctcgcccatgcctggaagcgccccggtcatcacgcgttggtggtgggttggaataccgatgacaccactcaattgtggctggaagggtggatcgcctgcgagcagggctggcgggtggatattgtcgcgcattcgcttaatcagatccgcccgcagctatttcccgacagtaccctgctggtgtggtgccccgcgccgccgggtagcccgcaggcagcgcagctccgcgaatgggaacagcgggaaaatctgatctggctaaatagcaattaa

SEQ ID NO: 101235 - DNA, 804 bp, Enterobacter aerogenes
atgaaatttttactgaatgaacatatcgttttcgatttcgacaccagcacaatattcaccgaagaatctcctgacgatccaatacaaatttcgaaccctgccaagagacttctttatttattactctcccattccggggaggttgtttgccgggaagtattattcaaaaaagtttgggatgactttggtatggtttccagcaataacaatcttaatcaatgtattagtaaattacgccgaatactacgccattttaatcagaacgaagaaattattattaccgtcccgaaagtgggatttatgctaaacaagcaaattgttgttgaagaacttgctgatcatgcccctccgattgccaatacatcagcaatcatatccgattgtccaacagtaaaactatcacagtatcataggcaacattttgcgccggggttgtggacatgtatcttcgccgcatgttgtgtatccatatcgctaatattattaatcacatttctatttttcaatagctcacatcaccaggatgaattattaataggttcagcaagaacctgcgcagtacggattgcagaaaatgcagccgatctggcgacactatctagttttaaaaaagatgtccttcagagtctgcaacaacttaatttacactgtaaccatgatcaatatattctgctggttcgtaatgaatctctcacgtccagaacgttgggggtatcacgttactcccctcttttgtgcgaaaaaataatatcaaacgaatcagatatttgcctaaaaatacaaatatcaaccattctcaagtag

SEQ ID NO: 101236 - DNA, 762 bp, Enterobacter aerogenes
atggtaaaggactttatccgttatggcattcgatatctcactggcgtggcgcttatattactgccactgaccttttcatgggccagcgtgacgctattaggtagccgtataatttatccttcagatgtcacatccgtggacgtccagttaaaaaacaacgatacgttcccctatgttgtacaaacatggtttgataatggcgatatcgacgccgacccacaggctgtcggcactgtccctttcctggcaacgccgcccgtttttcgtattcaagcgaaatctggccaggttgtccgtgttgtatacagtaagaccaaagcattaccgctggatcgcgaatcggttttttggtttaacgccctacaggttccgccagctaacgttaacggcgataaaaagcaaaataaaatgctggtgatgctgcgtacgcgtatcaaattattttatcgaccagccaaattaggcgcaccaggaaatctggttaaaaaactacaaataaaagcggtattcgacgcaaataaaggcactggtattaacgttattaatccacacccctggtacgcctctattagcaatctaacggcgagcgccagcggcaaaacgtatacactgaaaaccgatatggttgccccattcagtaaccaaatattttggctaccggaaaataataatgccaaacgaactactggtagcgtaaatgtcaccttggttaacgatcagggcgcaaggattagcgagcgatataatgttacttatccctga

SEQ ID NO: 101237 - DNA, 729 bp, Enterobacter aerogenes
atgttacttatccctgaactccccccgcaaaaacttgcagtactagtcggcttactttgcattaatcctgctttagccgaagatttctattttgatcctaacttattccagggttcgtcctatggtcaaaatatagagaaatttaaccaaccgcacaccgcctctggcctttatgtggtggatattttcgtcaataatacactagtgaaatctggtgtaccgattcagttcaaagctttagagaatgaaaaggatactgaaccctgcctgccgctggcaatcatgaaaaccgcgcaagtaaaatcattacccgaaaaagatgatgcatcatgccgctccctaactcagtgggtgccgcaggctaagtgggattttgaagcagcgatacttcgtttatcgctgactattccaatgaccgaactcaatcgtgttccgcgcgggtatatcccaccaacggaatgggatagcggcgccctggcgcttttttttcgccacaatagtagctataccgtcaccgagaataccgacaataactctcgctatcagtatttatggagcgggattaatgctggaaccaatcttggattatggcaagtgcgccatcagggaaatatgcgttatgccgatagcgacgaaagtggaaacgaatatcactacgatagcgttcgtacctgggtgcagcggcctatccagcaaatcaatagcgtcatcagcgtgggtgataattaa

SEQ ID NO: 101238 - DNA, 1329 bp, Enterobacter aerogenes
atgcgttcggctattcatttattattactcattgccgcgatggctacggcggggatatcttcggcttcctgcatcagggtgaccagttcgtcgtcattatcctcagccgcaaaagcggcaggttataccgccgccagctggagcggagcctgtgacacctgcaccagcaacatcggtctgccctcggtcataagcgtcaattccgggaaaaattttcagccggcggggacgctcctcgccagcgccgtcggcaacttcctgaccgcgtcaactaatcagacctatgggagtaatcaagtcctgtttcgctgtgcgctggcagatgcgggtagtttatacgaaatgtactcgaccaacggtgacagtacctatgccggcaaatatgcggtatccgatgtcgacggcgcttattatgacgcggaaaaaaatgtcgccgtacgcatcaccaacttgagtacaggggagtactacagccgttactggaaggagcggcagcttacatcagatagctggtatcaggatgatcaatacatttatatcccggcaagcgccttcagcaacgtgctatatgaaatgtataaaacggatgacacagcctactatgtttactccaacgctacgaacaaagacgtctggagccaacctcgcggttatattgcgttcaaaggacctggtttagcgaccaatgcgctctctcctggagaagatcacaacacccattatgatggctggtatagcctgtggcctggcggctggagcacctacaacaatgtcacctacgtacgcggcgcgctttgccagataaaagattatccctcagtggtcaccttgccaccgattgcggttggcgcacttgcggcgggcggcagcagccaacgccctttcaccgtcagcctggagtgcgagtctggagcgaagtcgagcacatcagcttccaccagcagttcagccaacgtcgcgatgggttttttagttaaccaaccaaccgcggtcgccgcagcacaatcattaggactggtcacctccggcggcgggctaacgtggctattggatacccactatggaaacggcggcatcgcctcaggtgttgggatccgtatttacaatcagtcaggaaatgcgatcaatttattgcctgacagacaaagcaccggcagtggaaatagccgcggctggtatgcgtatcaggatctcacatcgctcatctcctctggcagtaccaatatctacagcggcgatttcaccgcctcgctggaggcgataagcggtcaaaccattacagcagggacggtgaatgcgcagcttcaggcagtggtcagctttcagtaa

SEQ ID NO: 101239 - DNA, 417 bp, Enterobacter aerogenes
atgaaattacaacggaaaaacgtattactgttttggggatggatggatctatgtttcattctcgacataatgtggtgtaacttttccttacgccgaatccccatctatgacgataccctggcatttgtgcaattgctggactctatcgaccccgcgctagcctggcaattcccggtaagcatcttgcttgttcttagtattccgctgtcgatgatcctgttttttaaacaaagccgctatgccaccgcggcgatgtggatacaagcgccgttccgtttgttttttgtgatgccttcgttctacgttgggatatggctcctaaacaaaatgcaaattggtaatgtcatattaaatttatcatttctactgctttctgaagcgctaaaaatgtataccgtgtggcggttcaggaaatag

SEQ ID NO: 101240 - DNA, 2124 bp, Enterobacter aerogenes
gtgaccactagcaaattgatcaagggcgataccctgaccgaaaccagcaacgccgcagatggttttaacccggcaactgaagtcagcaactacagctacacgtcagaccgcgtcgccaaaccggtctataacaaatacaaaagcgcaaccaccaaaccaaaggtattcggctactacaccgactggtctcagtatgatggtcgcctgcagggcagcgatgcgaaagataaccgcggccgcggctatgatctgaccaacgtctcccctaccgcttacgataaaattatcgttggcttcgtcggcgtgaccggcttccataaagtggatggtctgtatcgcgatgtggtggccgacggggctgagaagtgcggcaaagtcaaatatgaaccgaccttcctcgacccgtggggcgacttccagtcctacattaacgttggccacagcgtcagcggctgggatgtcgatccgaaaaccgtaacccagacgaacaccaaaggcctgctcgggggcctgcgcgacctgcaggcgaaagccaaacagcagggccacaacctggtgctgtccatgagcatcggcggctggaccatgagtaacggcttccatgaaaccgcggcatctgattccgcacgtaaaaccttctctaaaggcgtggtgaagctgttcaaacagttcccgatgttcagcgaagtggatatcgactgggaatacccgaacgctgaaggcgccggtaacccttatggcccggaagatggcgataactacgccctgctgattgccgaactgcgtaagcagctggattccgccggcctgagcgatgtcaaaatctctatcgccagttcggcggtggtgaagactttcgattattccaacgtcaaagcgctgctcagcgccggtctgtacggcatcaacctgatgacctatgacttcttcggcaccccgtgggccgaaagcattgctcaccacagcaacctgaacgccattgaacaaggcggctgggcggttaacaccatcgttgaacatctgctggcggaaggtttccccgctgaacgtatcaacatcggttacgctggttatacccgtaacggccgcaacgccgagctggagtcgctgtctccgctgaaaggtacctataacccgggtaacggcaccaccgtcggtacctttgaatcgggtaccaccgaatggtatgacatcatttataactacctggacctggaaaaccagaaagggcgtaacggctttaacgtttataccgaccaggtggctgacgctgactacctctacaatccggaatccaaactgtttatgtcgctggatacgccgcgcaccgtgaaagccaaaggcgaatacgcggcgaagctgggcctcggcggcatgttcacctggactatcgaccaggacaacggcgtgctggttaacgccgcccgtgaaggtctgggatatgaaatcgcttctgaagttatcgatatggacccgttctatttcgaaggcatcaacgttgcgccagctgatgaacaagaggaagaagatacagaccagactgaaccgacggtaaaccatgcgccagaggcggcgattgagatgatggtcgtaggcggctcccgcgttcgtctgtctggggaaaagtcgtctgatgaagatagcgacgagctgagctacagctggggcgtgccggcagcgattgatgttgtggataaaaccgccgcggttattgagttcgatgtcccggtcgtcaccgcggataccgagtttacctttaccctgttcgttcgcgacacctggggcgaaccgtcaacccagcagcgctttattctgtcggtggtcgtcgcttcccagggtgaaccaagcgctgatgagccggccgatgagcctgcggatcaacccgctgatgaaggaaaagataccgatgacgcgccggcaaaggatgatgaagtcgcgccgtccgacgacgctacgccttacccgctgtgggatgctaaaaccgtttatggcggtagctggggtacctttgaaaccgtgagctggaaaggccataactatcaggtgaaatggtggtctcagggcaaccagcctgacctgtactgcggccagttcgacgtctggaaagatctcggcgcgtactaa

SEQ ID NO: 101241 - DNA, 852 bp, Enterobacter aerogenes
atggttggtttagtcgtgattaacgtgcgtatcgccagtcaattaaccatgcctgatattgtcatggctgccagacaggcattgcttgatgaagtttacttaacacctaagccaggtttggtggatgcggctaataatggcgcgcaccgggatatggatttatcgctattcttacgcagcatcgatgcgattactccgtggctatctcatttctggtttaaggctgagcaatactgccatgtggatgaaaccgcgctattgccgctgattcgcccaattgggttggcttgtgaacaagcgatgtttaccgccactcatggtattaatacccataaaggcggcatcttttctcttgggttactctgtgctgcggcaggatggttgagcggacgtagcgaagcgctaacgttgtcatccctttgcgaaaccgtcaggcgcattactcgtggcattgtggcaaaagaactgcagggtggcagctctggaaagaccgcgggagagcgattatatcaacaatatggattaaccggggcgcgaggggaggccgaaagcgggtttcagatcattcgccagcatatactgccctggtggtttactgagcattgtcctcagaaacgtttgcatcaggcgctcttaagtttaatggccgttaatcccgatactaatctcgtctcaagaggggggctggaaggattacattttgtccaattgtacgccagccaattacttgcaaatggctggactactgcggatttagcgatcatggacaaagcgctaaccaaccgaaaccttagtcccggagggagtgcggaccttttagccgttgcccaggtgcttatgctatatgcttaa

SEQ ID NO: 101242 - DNA, 195 bp, Enterobacter aerogenes
atgctaccaacgcctgaaatggcgggcgtgagtctcaatctcctgctggcggtgaaagcgctttgtgctccacgccagcaggagtggctgacgcgttggcaatttccgttaattttcttactactggtgaggccgctgtcagatgcggctaaccagatagaacaacgtattgatggttggtttagtcgtgattaa

SEQ ID NO: 101243 - DNA, 882 bp, Enterobacter aerogenes
atgaaacttgctagttatttactcaacggtgtccgcagctacggcatcgttaccgacgatggaattgtcgatctcggaagccgtttgggacaacgctacggtgatttaaaggcgttactggcagggaatgctgtgacagaagctcgtgcgtttgcgcatgaaaaagcggatgtcgccatggaacaggttgaatttttaccggtgatcgagaccccgggtaagatcctttgcgtcggcatgaactatgccgaaaaacgcaaagagtttaacgaacttaacccagcaccgacgctgtttgtgcgttttgcggattcgcaaaccgggcaccgccagccggtactgaagccgcattattcttctgagttcgactatgaaggcgaactggccgttgtcatcggccatagcggcgaaaacattccgttagaacaggcgctgaattttgttgcgggctacagctgctatatggatggctcggcgcgcgactggcagcacacctggtataccgcgggtaaaaatggtcgccagactggcgcatttggcccgtggatgaccaccagcgatattatccccgatccgcaccagctgggcatccgtacctggctgaacggcaagctgatgcaggacgataatactggcagcatgatccaccgcgtggcggagctaattgcttatatcagcacgtttaccgcattaagcgcaggtgatgtgatcatcaccggttcccctggcggcgtgggtaaaaaacgtaacccgccggtctttatgcaggcgggcgatcgcatcgaagtggagatcgagcatatcggtcgcctgagcaacgtgattgccgatgcgccggtgagcgtggcgaataccgaagcagtttgccatcaggtggcataa

SEQ ID NO: 101244 - DNA, 1347 bp, Enterobacter aerogenes
atgagcgttgaagatattgtggctgttccacaaacagcacaaaaatcattgaaggataagtggtggcgaatactcgatacctggaaaattggtattgtgccgttgccattgtttgttctggctggcgcactcattgcggtcgactgcctgaacggtaaattaccggccgatatcgtggtcatggtggcaacgctggcgttttttggttttgcctgcggtgaatttggtaaaagattgccatggttaggaaaaattggcgcagcggcgatttgtgcaacctttattccttctgcattggtgtactacggttggttaccggagatcgtggtgaaatccaccaccgagttctataaatccaccaacattctttatctctacatttgctgcatcatcgtcggcagcatcatgagtatgaaccgcactacgctaattcgcggcttcttccgtatcgtctttcctatggtttgcggcgaagcggttggcatggtggtgggcgtggcgatgggttatctgctcgggatgtcgccgttccacacgttcttcttcctggttctgcctattatggcgggcggcgtcggggaaggcgcgattccgctctcgatcggctatgccaccattttgcatatggatcagggcgtggcgctgggtaaggtcttgccaatcgttatgctgggcggtctgtcggcggtggtgatggctggttgtctgaaccaacttggcaagcgcttcccacacctgaccggtaatggcgaactgatgccggatcaccagagcgatgtgggcaacagcctgaccaacgccatgagcggtaaggttgacgtcacgacgctggcttccggcgcgctgctggccgtactgctctatatgctggggatgcttatccagaaatacaccggtttacccgcgccggttggcatgctgtttgtcgccgtactgttgaagatagccaatgctgtctctccacggatgctggaaggctcgcaggttgtatataaattcttccagaccgccgtcacctatccggtgctgttcgctgtgggcgtcgcgattacgccgtggcaggacctgatgagcgcgttcaccatctctaacctggtggtcattattgcgaccgttggcgcgctagtgctgaccggttctttcgtaggcaaaaagttgggcatgtatccgattgatgtggcggtgatctcttgctgccagagcggtcagggcggtaccggcgcagtggcgattctctccgcagctgagcgcatgtctctgatgcctttcgctcaaattgcgattcgtatcggtggggcactcaacgtcgctttgtcgttgctggtgctaagtaaatttattctgtaa

SEQ ID NO: 101245 - DNA, 1638 bp, Enterobacter aerogenes
atgaaatttaactttcagattagattatttattaatctggcacttcttatcgcatcactctttattattttaggcgtctggttgtacattggcctgactcatcaactatataatcggatatcttaccgagcagaacacgaggctgaacaaatagcctccattcctgatttacaacaagccattgaatctcataacataaaaaaaatcgccagcattatggataccatagtgaaattcagcgatgccagttttattgttgtgggcgacaccagagaaatacatctttatcactctgtgacccctgctattgtcgggaaacaaatgattggtggtgataacgcatcagttttagcaggcaaaagtacgatcaccaaaagaaaagggactctggggttgtcactcagaagtaaagttcccgtatttaatgcaaaaggaaaagtaataggcatcatctctgtcggttacctacagagttatctggatgaaattacccttggtcatatagtcaatattactttcgctgtattattcattattgctattctctttattttttcctggcttttcacccgtagcatcaaacgtcagatgttttcacttgaaccctgtgaaattggcatgttggtccgccaacaaaaagccattcttgaatcaatctatgaaggggtcattgttattgatacccacaaaagggttaaaatactcaatcaagcggctaaaaaattactgaatattcagcaagcgaaagcgaccatccaaaaaaacctcatgaccgatatcatacaggacagtgcgttcctcgatcctcagataatggaaagcgatgatgcgtttgatgaaattgttattttcaatcgcgtaaccatcgtcgccagtcgggtccgcgtttatgtggaagggaaattgcagggatgggtgatcacttttcgcgatcaaaatacaatagaccggctcagtgagcagttaagtcaggtgaaacattatgtcaacgacctccgggttatgcgccatgagcagctgaaccgtatctcaactatctctggcttactgaccatgggccattacgatgaagcgctgcattacatccaaacacagtcttcgcatatccaattagttttggattttctgacgcaacgcttccagtcacctctactttgcggtctattactcggaaaatattcccgggcgcaagagaaaggcatcacattaaatttcgaccctgggtgttttatgccgcaacagagtaccgttttctccgaatctgagcttatctccatcgtcgggaatctactggacaatgccattgaagcgacccaaaaagtgcctcttcctcaccggccgatcgatgtgctagttcagcaaaatgaacgggagttacttattgaagtagcagattacggcattggtatttcctcggaattgaaatcaagaatgttccagcctggcgtgaccaccaagcaagatgacgatcacggactggggttacatttgatctccagctatgtcctgcgtgccaacggactcattgaggtttcagacaacgctccgcacggaaccattttctcattattcattccttcgccactaccttatcctacagataaagaagaacctgattatgcaacccgagattattga

SEQ ID NO: 101246 - DNA, 711 bp, Enterobacter aerogenes
atgcaacccgagattattgatgtattaattattgaagatgagccccaactggctcacttccatgcggaaatactcacccgacaccctttattacggcttgcgggtatcgctgccaacctgaaagatgcacgtaagtttttacgtgcatcatcgccacgactcattctactcgataattatctaccagacggtaaaggtatttccttactcaacgatccagaactaaaatcacttcagtgtgcggttatctttatcactgccgccagcgatatggagacctgtagtatggccatccgtaacggcgcatttgattatctgcttaagccagtatcattaaaaagactggagcagtccttagtacgatatattaaattttatgaacagcaacgaatctggaaagttgtcgatcagcaaggaattgatgagctgctgtccctacaggcggtcaacaccacattaccatccagtaataagggtattgaagaagcaacatggcagaaaattttatcagtatttaatgacgataaaagaaaagcgttaaccattgacgatattgtcaccgctactggactcagcaaaaccacactacggcgttatcttgaacattccgttagcagcaacatactgagcgttgagagatcctatggccagccgggacaaccccgccgactttaccgatttattgacaacgataacctacaatcccattaa

SEQ ID NO: 101247 - DNA, 948 bp, Enterobacter aerogenes
atgaagggaataatcagattaattttcctgctattaacaatgagtcccgctgcctatgccaacgatacctcaatcggtgaggttaatggctccattgcgatgctgaaacaaaatgacgtcagtatggaaaaagagcgccttctgattagcccacaacgtattaacgttgactatttatttattaaccatggtcagcaggatgtgacgctgccagtggcgtttcccatgccacctaagcagtttgacagtggtcaggaccataatcccgggattatgaatttcaaattaagcgttgacggtaatcccgtaaaaccccaggtgcgctgggtagcgcaacttctcgacgataatggacatccccaggaagatattaccaataagctcctgaaaataggttggacggttgaaaagttgcgcgatgtcataacaagcgacgactttttcaaacagcccgataatctaccagccctacccaaatcgtggatgaaatacggtggcgcaaatcttgctgtgcagcaatatttcatctggcaacaaacatttcccgcgggtaaagaggtgatgattaaccattcttatactcccagcatgacgagcggggtaccgcgtgaatttgctgatattacggataaaaaatgcctgacggacgataaccgtaaacggctagctcaactgcgcagcagatataaaaccgatgatacggaggatttctttcccggattcaactggagtgaaataagctacattctgacaacaggtgccaactggaaaggcggcgtgattggcgactttacattacgggtacatacaaacgagccgaaagaagttgccgccgtctgttttaactattcactaaaacaaattgatccgctcacacaggagttcaaacaaaaaaactttaaaccggaacgcgacctgagcgtgatttatctgtcagcctcacgttga

SEQ ID NO: 101248 - DNA, 1089 bp, Enterobacter aerogenes
atgcgttattttccgctgtggttatgtatttattgctgctatgcgtgtggtggatatatgcaagagctgaatcaaggtgattatattcgtgaggcgattttgcaaaacttacgccaggaagaggtggggcaggatacgttattcaacgtcaagcgggtagcctcacaatatcaagtcgcctatttttgcgcgctggttaaggataaaaagaaccagtatgtgtcgtcgaagaataataaatatcatctctacgatcgtattatgctgggtacggatcaaggctggttcagcgcggtacgcctggacagcgaggcggattcgccagaatcagcccactgtttttatgcccctgatgtggttttgcagtcgcagacactgttggcaaaagtagaacaggaaggacgaaaagaactttgccaacctgtgcataaaggcgatccgttgcgcgctcagcttctgggggctttgcgtacccgttatattggcgacagtaataccataacgcttaatggcgcgctccctgaaaccaaatttgtggttgagaaactgtgcgccagtgataaatatgcgtatttttatgggcgtgcgagcggcgatccgcggagtgtgtacagcgaaaataaaaataatcttgaagtgattttgcaggctggaagcaatggtggatggcatacggtaccggaaaataaaattctgacgcagcaagccaccgtgccgtggcgtcagtatgatggatatttttctactgcaatgctggcagagatggcgcaacatgaggagcggcattgtgcattggagagcgatacggttagcgtaacgggaatcgtgcgacaggaaagcgtaggggatgccgtttattgggtcgtggtgttagataagccgttaacctgtgtacgtgacgcggatcaacgttttccaggttggaatgaaaaaatgcagttgctgctaactgcccaggagcgagagacagtaaaagatttacttgggaaaaaagtgatcgttggcggcgatattttgctggcgttaagcgacagtcatcatacgcccctgctgctggggaatatttttcgactgcaggagctaaagtag

SEQ ID NO: 101249 - DNA, 1284 bp, Enterobacter aerogenes
atgataaatcgccttaatatattgacgctggccttcattttgctggcgttcatttttattagtcatgcgcaagcggatgacggcgcgcctgcgtttctcaactatgtccagcagcaggagaaaaaagagaagaaagagatatctccggcgccggaggtcagtaaaccctccagagcccgcgagaacaacacggcagcgctgcacaaaaaactggccgcgcaaaaaattctcatcgccgacaaagataagaccatccgccaactacaggcacagctcaaatcgccacctcccgccaggatgccagcgacggtagataatgcagcgttgaataacactatcgaacagctccagcgccggatcgctgctttggacacggaaaacaaacggcttgttcagcaagtccataccgtccagcaggaaaaagtcgacaccgcggataatctcaaacgctctgccgccgctctgcaggcgcaaaaggtacagctcaacgcgctggagacagacaagcaggcgctgagcgataagctggctacggcaatggcggagcagcagaaactgagcgccgaactcgccggcgtaaaaaccaccgccgccacgacagccaaagcacccacgctaaacctcagcagcgctccacagcagcaggcatattcggttggcgtgtcgatagggcaagatgcgcttaaaacgctgtccagccaggccgctaaggggttaaacctgcaacaggaaaccgttcttaagggcattaacgatgtttttgccggtaagctggcgctggatgaacaagcgcgcaataaggcgcttttcgacgtctcgcagcggttatacaagaacattgataagcttgagcaacacactctccgcgaaggcaaaaagtatcaacagcaatttgccgcgcagaaaggcgtagcgcttaaagcgggtatttacagccgtatagactaccccggcaaaggtaaggtcgctgaaaacgatatcgtcaccgtcgttatcaaagaaagattgatcgacggtaccgtgataaacgatatggaagccgaagataaggtctggtcacaggcgctaagtcagtatcccgcgaccttccgcgaaccgcttaaacgcctgaataaccatggcgccatcactattgttgttccaccggagcgggcctacggcagcaaaggaatccctggaaaaattccgcctggctcgacgatggtgtataccgtgcgaattgttgacgccaggcccaacagcgaccaacagcctaaagcatctgcgccgaaagcctcacgctaa

SEQ ID NO: 101250 - DNA, 282 bp, Enterobacter aerogenes
atggacgctaaagcgaaacgaggccccggtggaaagctggcgttatgggctttttacgccttttgcggttattttgtgtgggcgatggtacggtactggtggatagtgggtcgcattcaaagcgtccccggcgtcagcattgatggcgaattggggtcaacggcgggcaaatggattggcgcgctgctgggttttttggtgctgggaggagtgggggcaatccttggggcgatagcctggtacacgcgtccccctattcaggtacatgaacagcgcgattaa

SEQ ID NO: 101251 - DNA, 852 bp, Enterobacter aerogenes
ttgaacaatttaatcagctttatctctgatttatccccgctgtcctttatgggttaccatatattatcaacgatagtgatatatattctggtgatgattattatctcaaacactcgtccttctgagaaaaacacgccgataccaccaccttactccctatcaccttcatttctcgcctggctacggggaaaagccaccgtcgttattcaattagccatgttcaggcttttaagaaaaaactacgtaaccattatttattccgctgagaatatcaaactgcacgccaatcagcagtatgcggagtgcaagatgacttgtgtcgaaaaaatactctttgaccatttttctacgccaaaacccagcgcccagaatttacccctttctctttacgttgccgataaaaaccattggtcagacgatccccactgtagaggcctgatgctcagtccggcacaacacacgtggaatatgattctgatattcgtgccatcgattattttaattgccacctatacgtggaaagttctttttaataaccataccattattcattccggagtattcagctggcttaccatgtttattggtaccggcctgtggttattgctgtggataataaccacgttaaatgccactcgtctggatcgggagggtatctcggttaatatacttggtttatatattgataaattaaaggacacccttatcgccgacgcagagacaacaacggatgaaacagctgattattatatcgccatcggtaggacaaatttgctgcctgaaagatatcgcgagtatgtaaaaattataaagcaagtaaactatcccggctcagtcgtaaaacttgattaa

SEQ ID NO: 101252 - DNA, 735 bp, Enterobacter aerogenes
atggataaaagagaaactgaagttcatgtactggaactttcccggccattactacataaaatttatggtggatacagcattgataaaagtcagattgaccgaccggatgctgcaatttgtgttaaaaaaccgcacagggcattttgtaaatcacgagttccatttagggtaggaatcgaaattactacttgcgacaagtgtggtgatcttggctatttaaaggatgataaatttggcaaagataaggtcgataaccaaattaatgattttattcatgggatagatagtaaaaccccaaataaaaaggtcgatgttaaaattcctgttgattatatatatgagggggttgtcagaaagaatggcaagttcaatgactacgtccgcgccgaggtgtttaaagaggttgtgcttatctgttttagtgaagtaataggaactgacaatgttattttcaaaaatgggctgagacaatggtctgaatacttaatatctaagtctaattctatgtttgataaggttatttttgttgatctcttgggggggagacctgtctgtatctatgataaacagaatccacatttgattcagccattaccttatgcttatgaaaatagttcgattaccgtgatgcaaagcccaatgttacgctttgatcaacaacataatttaaatgaaatttatgctaacgaaccattgattgcaaaaagaatcgacaaaccgcggtcgaaaaaataa

SEQ ID NO: 101253 - DNA, 1320 bp, Enterobacter aerogenes
gtgtctggaaatttttggcgtggtgacctacatcgtgaaatcggcgggctgatcgtgtttgccctgtgtgatgtgaactcgttctatgcttcctgtgaaaccgtctttcgcccggacttacgcggccgcccggtggttgttttgtccaataatgacgggtgtgtgatttcacgttctgcggaagccaaaccgtttgtgaaaatgggtgaaccgtactttaaacaaaaagatatcttcaggcattatggcgtggtttgcttcagtagcaactatgaactctacgccgatatgtccaaccgggtaatgacgacgcttgaagagatgtcgcctcgctgtgaaaaatactccattgatgaagttttttgcgatcttaccggcgtgcgtaactgccgcgttcttaccgagtttggacatgagctcagagccacggtgcggcaacgcacgcacctgacggtgggcgtcggaatagcccagacaaaaacgctggctaaactggcgaatcatgcggcaaaacgctggcaacagcagacaggaggcgtggttgacctgtcgaatgcggagcggcaaagaaaattgatggcggcgctaccggtggaagaggtttggggagtgggtcgacgcatcgcgaagaggcttgaaacgatggggatccggacggtattgcagttggctgacacagatatccgattcatcagaaaacactttaatgtcgtactggaaagaaccgtccgtgaattacgcggcgagccctgtctcgagctggaagagtttgtcccggtaaagcaagagattatctgttcccgttcgttcggccatcgcatcaccgagtacgaagaaatgcgccaggccatctgtagttacgcctcccgggctgcagagaaacttcgtcaggaacatcaatactgccgatttatctccgtctttgtaaaaacgtcgcccttcgcgcctgacgaacggtattatgccaataatgcctcggtcaccctgcttaccccaacgcaggacagcagggatattatcgccgccgcgacgcgttgtctggatgccatctggcaaagtggctgccggtaccagaaagccggggtgatgctgggcgatttttatagccagggcgtcgcgcaacttaatctgtttgacgaaaatgcgccgcgaaaaaatagccaaaaactgatggaggtgctggaccgcctgaatgctgaggacggacgtggaacgctttacttcgccggccaaggtatccagcaaccgtggcagatgaagcgggaaatgctctccccgcgatacactacccgatatagcgatctgcccacggttaaatga

SEQ ID NO: 101254 - DNA, 420 bp, Enterobacter aerogenes
atgcagtttttcacactaaccgagctacgccagatcgtggcattacctctgttcagcgaccttgtgccctgcggttttcctagccccgcgcaggattatgttgaacggcgtatcgacctgaatgaactgctgattcagcatccaggcgccacctactttgtgaaatcaagcggtgactcaatgattggcgctggcattggcgatggtgatttactggtggtggatagctcccgcaaggccgtccatggcagcatcgttattgccgcggtggatggggaattcacggttaagcgcctccagttacatcctgttgtcatgctcaaacctgataatcccgcctaccagccgattatgccaggcagtgaagagtgtctggaaatttttggcgtggtgacctacatcgtgaaatcggcgggctga

SEQ ID NO: 101255 - DNA, 720 bp, Enterobacter aerogenes
atgaataaaataagcatctttttcggtttaacttgcgcactgcttcttactggctgcggcagtacaaaaaaagacgctggctatccggttaaaaaattgagcgggccgcagtggcgctgggaaattcaaaagcgttttgatgccgcaaatcctaatgccaatcaagcggtctgtataattaccgatagaagactgcgcaccaagtttagcggcgagattcggcctagtgcaggaacgccatggtttattaaacacgatcttgtagaagaaataaaacaggtaaacgaattgggaattactttcttttattatcgactgactgataaaggtgcagctagcagtccaaactggccttatagctggagaactggtctatgcttcggcaacatacaggtggaaaatgtaaatactatcactcctgctatggaccaacgcaccaccaaggtcgaattcatttatcatatcaataatgtacctgaatggggtcaggaattaatgttacagcttttccccaacgcaatagatggaaaaataaccggatgcgctaattttgatatggtggatagaacacagctacgcagtcagtccggaatcagtaattactatattgaggaaaacgaactcttcaactctgatataacgaataaaacacttttacactgtcagtccggcattgaaaatcactatagcgagaaagaagaactctttaatggattttga

SEQ ID NO: 101256 - DNA, 891 bp, Enterobacter aerogenes
atgaataaaataatatatgcactaccgataattttaactttaacgatattctcatctctcgcagagagcaaatatccaccaacgcctgatgagctcgaaaagatccgcatgttcgatgctaatttaggcaactacggagtcagaacgattatttccggaccggcagcaattaaattaaacgacattgccaaattaaatatatcgaaaaactatatttacattgaagataaagaaaactacggtacgccattaagtaattccccagaagaaaactgttccaggtacatattgctacgtaatcccaacagaagggtgttatgcataaaaatatttaacgtcggatacttaaggctctctaacaatctatccaacttgcaaaaaaaagcgaaggaactacagaataacattctgccagaatatatcagaaatactcctgaagacgttagtttcagctggctagagttaccacaatacaataaacacgatcatacgttatcctggacgtatcgctatagatttacaaacaaaaattatatcacccctgtaaatcacacagaacaagaaagcagcgtaataatatttggaaagcaacatataatctggttaacaaactatgattttcataaaaaagatgaatttttatcgcatctgaacgattgggggaagaaaattgtctttgccgaaggttatcagtaccagcaaggcaacgttcctgcttgccacggactagcaccgggtgatagtgcgctggaagggattgcatacgactattctgctaatccacagcgctgttttccctatccaattgagactttaatcactggcctaccagaacagacccgtggcaatcttaatatttataatttcatgaagaaaatctggatgtcataa

SEQ ID NO: 101257 - DNA, 1167 bp, Enterobacter aerogenes
gtgaaacagactcattatttcaccctgaattttaccggcttcaccactgccgcctcggaagaccagggctatttacgccttatcgaagatgggcgcgtcttttataccgataaacgctactttaaggactcctcgctttttgatcgcctgcaggtcggccagccgctacatatcggcacccgccgcctgcaggatggtagctattggatccactggttaagcgatggtagtgcgttactcgaacccagcctacagccgctgaaaggggcatggcttttcggcgtactggcgctctgcgttgctgtcggtatgatcgctaacgggttattttttgggcttttcatgttcgcgctgctggttatgttatttttgcggattcaccctaccggtttcgcctggatcgctcataacttttcccttacgcaagctgacctgattagcaaaatgaatcaagccagacaaggtgacttttcattttcccagatattaaattcagcacattcaatagacgagagaaataaactcccgctggataaaaatctatcgctaccagaacatatcgcccttgaggaaggcgtaataatgaatagttactttcgaatatgggagtatagatcttcgagaaaatatgcaacagcagaaggcgtatgtttccagctagccacctctgcattgtattttcctgcacaactgacctggctaaccaaccccttcgcgacacatccgaatatatatcgtcatcacccaccatttcttgccgatggcgactgggtaattaccgcacgacaacatggacataatggtctccaggcgttatacaatgtcagcgatggcagcacttatctgaaaagcagtcaatttagcctcggcaatccgcagatggcgtttatttataaatgtgcttacggcttcgtactgttgattgtattattctcactatcaatacatctgcacgatctgctaagcgctcctgtaaattggaagtttattaccagcctgatgataatggcgatgcctatcaatcttcttttaattatcatcgaacttatcggcttagttagccgtcggctatcgcgccgggtaaaaggtagaataaaagtgcatcaaataatattggcttacgccaggcgtaatggttccaggataacgccacgggaattgatgtag

SEQ ID NO: 101258 - DNA, 495 bp, Enterobacter aerogenes
atgaacttgcattgtgaaagcgactgtgcgcggatagataacaatgtgcaaaataaaataaaacaaggtgataatattagtggttggctatacattccggcatttttattaccgattattattattagtggtctgatgttggcttgccagctctgctactgttactggtttcagatgtacttctatcctcttggtttttatgtgaaattttttattctttttaatttgttttttgctgcgagcgtattctttctggcgaattacgttatcacgctattctggcggaaaaaacgtcagttgccgcagttttatatagggctactgattgcgtggtggcttgcattattcatcaaggctattcttacgtatcacatcttaatggggcaatttgcggcttgggatttgctttgtctgggggttttcagcgttatttccgcaatctttatcccttattttcttaaagcgaaacgagtgcaattgacgttcgtcagttaa

SEQ ID NO: 101259 - DNA, 522 bp, Enterobacter aerogenes
atgctgacctgtgaaagagtactttctaccgattcgccccatttcgccgcgcttgacgcgctgtacgcccgcgcctttccatggcacgaacagcgcgaaagcgacgccaaacttcaggcgctgagcaacccgcactatgcgctggaagcctggtttgatgacgggatatttattggcctgagcggctgctggcagtttgccggttatagctatatcgaacatctggcgattgacgacaccctgcgttcgcgcggctatggcaaacagctgctggcgcagatcctgacgcgcgcgccgctgactattctggaaatcgatccactcaccagcgaaatcgcccataagcggctgcgtttttatcagtcgatgggattccatgccaatgcctgggcgcaccggcatccgacctatcatcaagggatcgacgatcatgaactgctggtgttgagctgtccgcaaccgatcgatgcggcgcagtatcagcagtttgccgaggatttagggcgtgaggtgatggggtag

SEQ ID NO: 101260 - DNA, 2031 bp, Enterobacter aerogenes
atgacgaaattactccttaagttatcgcaactacttactgtcctattgtttttaatgaattatatggctttcgccgccgatggtattggtgatgtaaaaaagccgcgacagttctcaaccacagcaataccttcttttgagcatattctttcatatgacgttctggccagctttaaccccgatgggagcatggaagtccaggagaatataagcgttttagctatgcgtggaaggatccgccagggcattttccgaacgttgcctaatatttgggagcgacgtgatggtagaatattccgtgccaactatacggtaatgtcagtattacgaaacggcgttccagagctttttcagcttgatcaacaaccgcaagcagtgattgttcgtattggcagtcctggacatatcctcaggtccggtatctatcattatcaaatacgctataaagtgagtaatcatttcagccgttctcatggcatcgatgagctttactggaatgtcaccgggagtagctggccctggcctatcagtagggccagctttcgtctgcagcttccgaacgcaagtgaaaatctgaacgcgcaagcaaaagatcgccggttacactcaatagaagcgtttaccgtaatggccggggcgaagcgacctgttgcgacagtattaccagacggcagtgtccgcactatacgtcctatggcaaaaggtgaggggctaacggttgtctatagctggccgcaagcggtactggctaacgctccccagccgaaggccgttgtgccattagtacatttgttgatacctacacccgaaaccctggtgatatggctgccattactgctaatgattggctattactattgctggtggcaaaaaaatgtcattcaaaccggcttaaagatgccgtctattatctcgcttgatcatgtaccaaatggtatgactccgggatatctgcgttttcttatccgccgtgactatgatgatattgctttcagtagcgatgtgcttggattagtaactaagagggcggtcgcattggcaagtggaaaacgggatgctctgagggaggccggtgtaatacaacggctctcgctattaaccaccgcaggaaatagtcgtttagatcgtgctgacaaagtgctcgttagtcagatttttagtggaaagcgcaaaagtctttctcttcgtacagggcatcagccctcactacataaagctcgtcgcaatcaggaaaaatattatgatgcacagcgtgagaggctttttcgtaagtgggggctgccgctcaggcattgtatttacctggcgcttttgatgcctgcgttttgtgctatttgggtggattaccgcattgcgtttatcactattcccgtgcttttcttctggctggttggtggggctatttggtttttcctgttgagatttttatgtcatcgccgtgacatgtggaagttttgggggccggttccccttgtcttaggattaatttttgggtccttaacgacgtggggaggctacgctctcatgtttatgcaaccgattaaccggcttccggctggatacattggcggtatggcgatggcgtttgcatttctcgtctatgtcagttggcgaacaccgcgctatacccagcgcgccttgaatgaactcgccgttgctaaaggtgtgaaactgtatctggagtcagcacaaaaagaaaacttccattatcgatacccgccagcgcaaatgatgtcgcatttcgaaacgctgttgcccgtggcggtagcgctcggcgtgggtaaagaatggatgggagcgtttacggactacctaagaaaccacggtatgacctctcaattattcgctggcatcgagtggaaagacataactcaattttgcgactgctgccaggcgtgctcaatggctgcagctaaacctgattcgggagctgtttcacaggatttgcctgatagcagttatagctccagcgatagtggttcttcagagagtagctctggaggagatgacggtggaggcggtggctggtag

SEQ ID NO: 101261 - DNA, 789 bp, Enterobacter aerogenes
ttgccggggcgggattatcatctgcatcccgtcgccgccggatgcctgctcccctctctcctgccggaagcggttttacgctggctggcagaatcaccagatctgttcgccgcttttctttatgcactcaccgggcatcccgataaatcaggggccattggcgaactggtacaacaggctgactgcgcctcggtctccgccagcctgggcggcgatatcaacaccgcgctgaaccagcctcgccctgctctgccgcagcagtgccttattgggatccgctggttgttgcagcatgagttggcgctcaatcgtcaggcgtgcggttccgatggctggcttaccgatgacgccttatggctggtgagcaagacctgcgccgataagctaagagcctggctactgcaacatggggtgaatggcgtaccggataacaatagccgactgtttgacgaactactggcgcaacggttgctgctgccaaacggcgatcgggccatctggcgctgtgatatacgtgatgccactggctggacgccaggcacgccgctgacgctactgaaactgtctcccgccaccctctggccggacgtctcgctgcgacctcacgtctttcagggggaagtcatcccggaaatggtgtccggcaatacgaatggaaatgctgacgctgattgcgaaccgctcccgcaaaaagcgccagcaataccggagtaccgattagtgcttcacaatatacatcgtgcggctgtaggccacgtcttccggattggtgatcgggtatccttttaa

SEQ ID NO: 101262 - DNA, 438 bp, Enterobacter aerogenes
atggacagaagcaacaatatttaccagaaagtgacggatgaaattatcgaggcactacaacagggatgtccgccctgggtacgcccctggcgggatggagaaccggtgttcccgattaatgccgcttccggtcgggcctatcacggcatcaacgtgccgcttttatggcgcagcgccgacaaaaacggctatgaaaatgaccgctggctgaccttccaccaggccattgaagcaggcggtaatgtccgcaagggtgagaaatcctcgctggcggtgctgtatctgccgcaggaaaaagaggtgctggacagcaacggtgcgcccgtagcggataaagatggcaacccgcaggttcgccattttgcgctcgtacgggagttccggttgtttaatgtggcacagtgtgaaggactgcctgccgcttttttgagccgatag

SEQ ID NO: 101263 - DNA, 294 bp, Enterobacter aerogenes
atgagcatcaaattattcgctgtttccatactcgctgccgctttcgtctttgtctcagatgtggctatcgccaaatcgaatcagttaactgatgaccaggttaagcaaaaaattatcgacgactctgtagcgtcctatcccggcacatgtgcctgtccattcaatacggcgcggaacggcagttcgtgtggtcgtcgcagcgcctggagcaaagcggggggctattcacccacctgctacaaaaaagaggtcacgaaggagatggtcaaagaatggcgtcagcagaatcagtaa

SEQ ID NO: 101264 - DNA, 426 bp, Enterobacter aerogenes
atgagcaaatccaatctggtagcattccgcgttccgactgaattgcatggcgcattcaatcaggctgtagcggcggcgggcggtgacaaaacagcttggctgctcgatgccctgcgcagtaaactgaaccagccagaaagcaacccacagctgcgcatgcttgagctggtggagcgaatggaagtggcggcggctgcgctggcgggtggtaagcaggggattccgccgactctgtacaatgaagcggctgttatcgcgattgttgctgataccatccgggaagggttcgacaatggccgcattatcgctgagcggctcaatgagtccggttatcagactaaagcaggtaaggcgtgggataaggacatctacagcgcctggaaacgacaggggcgcaacgctgagaagttatcggcggcactatag

SEQ ID NO: 101265 - DNA, 192 bp, Enterobacter aerogenes
atgttagaccgtcacaagcttgaattaacgttgctcgagatagcccggcagaacgatgaaggagtggacagccacactctttacaccattcgcaacggcgtggcgcaggtgttgcaggccaaagagcgccaccactgcaggatgagcgcaccagcctaccagtggaagaaacccgccacgccgcgcagataa

SEQ ID NO: 101266 - DNA, 630 bp, Enterobacter aerogenes
atgagagagctgacgcgggtttacacctctgcgctaccacggattaacctccagtttctggcagatatgcaaagaaagctggtggattcgagcccgaaaacacacattttttgtgataccgagagcggaagggtgtgcttctctctggcctctggtggatacagcgcgacaatcaacggggtaacgcgggttattggcatcacgatcacccgggcaggttttggctaccggcgatggtacatttgcccgcattgtggtggccgggctgcgaaattattcattggccggaaggatgtagggtgtcgcaagtgctggagccttcactatgccagccagagtgaagatgagatcgctcgcttacggcgcagcgtgtggaagcagagacataatatttggggggatgagtacccgcccgcgggcagcctgttaaatagcccgctaaagtttccgaagcctgccggcatgcgatgggaaaccttcgagaaaaagcgctctcgcctgctaaagactgaatcagcttactggcggttgaaagaacctagggacgctaaaggatttgcccgggtgatccgcaaagctgaagcgtcaatgcgttcatttgaacgggcatctaaaaaggctacctcatga

SEQ ID NO: 101267 - DNA, 372 bp, Enterobacter aerogenes
atgggcatcaaaggcaggggaatgaacaaaatccggagcaacatgaatgcgctggtgagggacattaccgggcggcgcttaccgcgtgcaatgacagctgctctgtatgaaggcgggctggtagccgctatctatacgccagttgataccagcaccctgattaactcgcagtttaaagaggtcatcactaacgggacgcgcatcactggacgcatcggatattcagcaaattacgcaatctatgtagcagatccgaacatcccgcagaaattcaccctccccagggccaggaaagagtttttgcagtatggcgttgctgatgcaaaaccgcagatggatgctgctttcctgcgggagttatcaaaaccatga

SEQ ID NO: 101268 - DNA, 2712 bp, Enterobacter aerogenes
atgacaacaggctttggcgattacacgatagagattgaggcggatgtagcaaaattgctttctgggcagcgcgccgctgacgcggccctaaaacagattgagacatcagtcaaaagggctggcaactccgcagaaaaacttgataaaagcctcgataagttgggaggggggttctcacgccttgctgtggccgttaaggggtacatatcaattcaggcgttgatgaagctccagcaactatctgaagaatttaccttgcttcaggcacgagtaacacgactatcttccagcaccgaagccggtgccagaagctttgagcaactggtaaatattgcctctgcaacaggggccagcctcggtgataccgtcaacctctggcagcaactcaccgccacactgaaaaccgtaggtgctactaacagcgatgttaaccggctagtgatgacgctgcagaagattggcactatcggcggctcatcagcccaggaaatggctaatgcgctaagacaatttatgcagtctgtagcgtccggcagaattcaggcggaagagtttaactcagttctggaacagatgccggaactggcgcggcagattgccgatggtatgggggttccatttaacgagctccgccagttgatgctggccggcaagttagatattggtgaagtgcttgcggcgatcgaaaaacggtcggacgaaattaaccagcagtttgaaaaaatgcctcgtaccgtcacgcaggctaccaatgccttggttactcagtttggtgtggcggtgtcaaaaatagatgatgctattggggcttcacgctatctggcaaagtttttggacggcgccgcgctcagtatcagcgtcgcaaccggaaacgctccagacgctgtgatgctaactcaaaagcttgagcaaaattctgagcaacttgctgttgctgagtctgacttagctaaggcgagaaaggcaggcttgggctggggagtaaaacaaactgagcaaacggttgaaaggcttaaggcggagcgcgccttgatcctaatggctcagcaggcaagtaaagactcgcaaaatgtttacacgccgtctaaaggggaaactcccgcatatatcaccaacctcgaaaagaaaactgcagaaaacaatgccaattcgatcattaaatctggtcaaacagtcgttgataagctcaaccagcagcgtgaacaactaagcaaagacaaggctaaagggctcattgacgataagaaatacgttgatgctgctgctgttctggataagcaaattgccgacgccaggaaaaagcaggacaagccctcaaagaatgcctttgctcgcggcgacgattcaatcgacaacctgcagcggcagattgccgttttgacaatgcgctatgacgagaatactagagaggccgcgcagtttaatgccgtggccgctctcggagctaaggctaccgatgcacagaaggaaagagtgcgtgagttggccgggcagctatttgacgctcagcagcgacagaaagaccttaatgatgcggtcagcaatgacccgctcaggaaggaaaataaagcctattctgacggcagagatcaacttaaacgccagctcgatggccagatgattgatcagaagacctataaccagcaatcggagttgatggaacagcagcatcaggtcaacctagccaaaattcgtgcgcagcaggtcgttacgccacagcaacaggcagccggcgaggtagatccagtacagcgcctcgctaaccagcatgcgcaggaacttgcgcttattcagcagtttgaacagcaaaagacaatcactgaacaggaatctttagctctcaggaacgctgcaaacaatacctatgaaaaacagcgaattgaggctcaatgggagatattccgcaaccaaagcacaactaacgaacttatggcagcggcagttgatggttttgccagccaggccgctagttcgatgacgggattaattaacggtacgcaaagcgccacagaggctttcaagaatctgggtaacgccattcttaatagcgtcattcaggctctggttgaagttggtattcaatacctgaaaaatgctgcgatggcgatgatagccgataagatgacatctaactcatcacaacaggccggtgcgcaaactgctgccgcgtgggctcctgccgcagccgcagcctctatcgcaacattcggtggggctgccattgccggtattgccggcatggtagctgcgttcgccattggtgctgcgttggccggcaaacgcaaaaatggcggaactgtaggtgctggtggtgcgtaccaggttggcgaagggaatatgcctgaactcctgcagaccaagaacgggttaatgatgattcctggcgaccgaggcagagtgttcagcaataaggatgttaccggtagttctccgacgatccagaaggcgtctacaggtaaagaatacctaccaacttcatcagcatcatccagccaatcgggagatagctctaagcggccgatacaggtaaatatccagctgatagatcagacaaccggcagccagcacaacatcactggcactgaatctttccagcaaggtgacgtggtgacagttactggatttctcaatgacgtggataccggcggcccaatgtccacagcgatcgcagatgcgcacgggcttagacggcaggcaaggggagccttttaa

SEQ ID NO: 101269 - DNA, 330 bp, Enterobacter aerogenes
atgatggagcaactacagagactggctgaggtcattgccgaaacctatatccgcgatctgcgccgggaaacgggtagcaacgttcttaccgtggatggcgttagcgggcgcgtcgaaacccctctactttcagtcggacttgttgataacgctgtgagtgcgtccaaagataagtatgactcgaccttcgagcgtaaggcctatcgaatgttgatggagtttatttcttttgatggcccggagtatcggcttactgagcatggtcgccatgtcattacagtcatgaataccatatccctgaaaaaaaataaggtaataaccatccattga

SEQ ID NO: 101270 - DNA, 546 bp, Enterobacter aerogenes
atgccattacctgaacgcatgaagccagccaaaatcagccgtcagaaacttaaggtactggcggacgcagccgaagaaatactgtcgcaaattgataacggcgccgacgaagatgatgaagggctaaaagcgttgattgatgactggaacaggcaggccgttaatccgtatgaattctctgatttccgtgacttttcctcatggaccagtgcaaaagactttacccggatggcatttaatcaggagaaatacattgaggatttaacctgggatgaactagttcagataatcagtttcgtgtgcaatgctgaaggcaaggaatctgaacaaagctacgctctgggattgctggagaaaaactttaacgccaatccgtccgatctcatctactggcctaatgaatggttccaggacgaagacatgcttcatgtagatttgacgcctgaagaaatcgccggatacctgatggcaaaatctggccggcttctaagtgatgcgccacaaatcgacctgagatacccgctccctcccggcgcagcaagttaa

SEQ ID NO: 101271 - DNA, 174 bp, Enterobacter aerogenes
atgatttcgcacgtcttcccacatttgcggcaggttcccatagccataattcagcccgtcctgcatacctgtaaacccatacagattgcactttgctgggagaaccactacacttcgcctgtcaaagaagagtgttgcggttggattacctccatactcaccggaacgtgttag

SEQ ID NO: 101272 - DNA, 477 bp, Enterobacter aerogenes
atgtatcagatgagagggaacagggtttcaccgatgcaagaggaagaaatagcatacagagctatcaacttctgtaatgcgattggaatgacagctacgaaacgtaagcgaaagcgctacgattctttctttgaaagtttatctatttatgggatcacccttagtgtcatggatgacaaagaatgggaagctctgacatacgacctcactatcgggcactgtgaccccgcgtctcttaccattacagtgccaaacaaaatttatgaaaatgcttgcctaggggaagaacacgccctcgctgttatttttcacgagctaggtcatttactccttggccataaaccggttttgcacttttcaagtaaagaaccaactcgagttgaggatgcggaatggcaagcagatacatttgcagagattgtcttggaaacgataggggtaagaacaattcaaatgtcgttagatttttacatgtaa

SEQ ID NO: 101273 - DNA, 360 bp, Enterobacter aerogenes
atggcactcactgaattcggtaaggccgtcagaaaagcgaggatagatactggcagcacgctgttaaccatgtctcaggaattggatacaactcctgcttttcttagcggtttagagactggtagcaaaaagataccccaaaaatgggttaagaaaatagatactttctttaaattgaaaggcgtgaaactggaaggtttacaggagcttgcagctgttgcaaatgagactgttccaattgatggtctttcacagcaacagcaaatgctggtggctggctttgccaaatcgcaatttacgccagagcagctaaaaagttttgctgaactcttgcaaaagattaataacaatgaggtttga

SEQ ID NO: 101274 - DNA, 762 bp, Enterobacter aerogenes
atggacaatatagagatagcaaccctcttacccggagctacgttgtttagtgatagcaacataaaccagacatggaaagcccatgtcagaacagcaacgaatacggttgtagtgtttgcaaagataattgatccccgggaaatttgcgtggaagcattctgcgctattcttggtagagagctaggaataccaattcctaagcccttcctcgttctcgcagataacactacgttggatgttatcccctcagggcagcatgcactgatgtatggttcagaagatgcggattatcctagttttcgacggtacgccgattgcagtcaatcattcgaaaagctacaaaattttaaagcatctctggatgttggcgttttcgatgaatggatagccaatcatgacagaaatgttggcaacatcctttatgatggatgcgatgattttttatttattgaccatggactcgcgcttccagaaggtctgcccgctaacgaaccggcaatcgataacaatatcttgagagccctattctcattcaaagccgaattagaaaaattccgtgatttacgaaccgcctctcagatgatagctcccatgtatcgagctttaaatttggaggatgtaatgtctagcgctcaggcaacaatgtatgttcctgatgcggtgatcgcacaaattttagcttttctcaccgagagattgtcatcaatcgagactctgataagatctagactatgcatctctcaaacggacatgtttcaatga

SEQ ID NO: 101275 - DNA, 873 bp, Enterobacter aerogenes
atgacatttgacatttcactctttccagctaaaccaacctacgcaggtaagtggtggtcagtgtcctttgagcctatcatcggttcaggcgaacggattaacgcaatcattgttgctcggggagttgatggtaagcatgaaataatacaatccatcagagatgaggttcttgactcaatctacggaacgaaatcagaatcaatcaagtcaatggtatcctgggtgaaaagctctctccattctcatctgaaatccaacattaacttagaacattgggcaccgccaatttctggtttcgcaatatcaaaaaaatcagacgcactcgatgatagcttatctgggatcttaagacaggctgtcaggctaacagcaagtctaggtactttaactcttgaggcagaacgctcagaagatgatgaccgctcgagccagaaacagtctgagcaatggtcaaccagaatatctgacgaagccagaaaactaaacccgaagctttcagattattttggcacccgagtccagttatcaagtgcgcagttgcacacgcgctttggattttataatgatatttatgcgtctaattttgggttaatggtacctagtcgtttatcggcatcgattaactctattaaagcaaaagtatatgatttagaatcactttctcgttccagcatggttttgaagcccaatactctcgacgttatcgttggtattccttcattcgaagatccaaccatcccacctaaaaccgttgcaagcatgcgtgggtatgttaatgaactcactgagttagccttaaaggaagatattaatttcattcctgtaaatagtgcattcgaagccgctcaaaggattattaaaatagcagcttga

SEQ ID NO: 101276 - DNA, 444 bp, Enterobacter aerogenes
atgaccgctcaaatttcagcatatggccggctggtggccgacccgcagaccagaacaacgggaaaaggtacgaacatggctatggcccgcctggcggtagctcttccctgtaatgcggcagataacggagaggctactttctggctgggtgtcattgcctttggtaagcaggccgatgcgttggtcaaacaccgtaaaggcgaccttgtcagcgtggcgggcaatatgcagctcaatcagtggactggtcaggatggtggtacacagcaaggctatcaggttattgcggacagtgtactgagtgccagaacggtacgcccaggaggtaaagcagggcaacagggacaagctacagatgccttacgtcgggctcatgagcagcaactgcccactaccgggcatgaaggattcgaccagacgccgccgtatgacgatgatttttga

SEQ ID NO: 101277 - DNA, 2757 bp, Enterobacter aerogenes
atgcgtaatatcgaccttattcgcgaagtgacccatgccgccgctgaccgctggcctgcggtgctggcgggactgcatattaatgtgccggattcaccgcgcaggcatggcccgtgcccgtcctgtggcggttcggatcgcttccgtttcgatgatggcggccgcggcagctttatctgcaaccagtgcggcgccggtgacggcctcgaccttattcgcaaggtgaataaatgtgacaccacagaggccgcacggctggtggctgatgtgctgggcattgattgccgggcagcagtacaggacgaagccaccgccagccagagacgggagcagctggaagccgagcgtacacaactggagcaggagcgcctgcagcgggcggcaggggacgcacagcagcgccgggctacgtttacccgtctgtacgatgagaagcgccagagcgctaatctgggcgaatctgaataccttactggtaaggggctgggcggcttcaccttccccattctttccgatggatcattattgctggcgctggtgggggaatccggcgcagtaatagcagcgcagaccattaccgctcagggagaaaagcgactcatgaagggatcgtcaaagcgcggggcatattacgccgtaaacgcgctggaacagtctcaaagcgtcgtgattgcagaggggctggctaccgctctaacgtgtcacttaattcaacctgacgcgctcacagtagccgcaatcgatgccggaaacatgctgcctgtttcgcaggtgatgcgacggcattacccggatgtgcagatcatcattgctgccgacaacgatattaagcccggagagccaaatacaggcaaagacgctgcggagaaagctgcaaaggctgtctctggctgggtggctttaccaccaacggagaaaaaggccgactggaacgactaccaccagcagcatggactagaagcctctacaacggcgtttaagaattcgatgtatcaaccgcaggagcctgaagtgtccgcgaaactgcaagtgatcaacggagggaagaagagcgcatcaaaacctgaatccctgcgacctcatatccaaagccgtattgatggcgtgtactgggttgaacccaaatcagataaggataccggggaaataatcagccgtgaaagctggttgtgttctgctctgaaggtcatcggtattggcattgatgacagtaaaacccgttacctgatcctgcgctggcaggcatttggtgcgaagagtgagactgtccaggctataccgcttgccgatatcggtgaacgcgaaggctggcgaacgctcaaggctggtggggttaacgtcacaaccaaaagtggtttacgtgcaacgctagccgactggcttcagagctgtgccaatggagatgtatggcgcattgcgcatgctacaggctggcagtgtggcgcctacatcatgccggatggcgagatcattggtactccagagcaacctgtgctgtttaacgggcgaagttctgccgcgtctggttataccaccagcggtaccgcgctgagctggcagaagagcgtaggacgtctggcttttggcaactattccatgatgactggcgtggccgcagctctggcagctccattgattggccttgctggtgctgatggattcggtatccacctctacgaacagtcgagcgcgggtaagaccaccactgctaatgtggcatccagtctctacggaaacccggatgtactgcgccttacctggtacggcaccgcgcttgggctggcgaatgaggccgccgcgcataatgacgcgttgatgccgcttgacgaaatcggccagggggctgacccggtggaggtctataaatcggcctacgcgctgtttaacggcacgggaaaactgcagggagcgaaggaagggggaaaccgtgacctgaagcgctggcgtactgtggccatcagtaccggtgagatggatctggagaccttcattgccagtgccggccgtaaggctaaagcgggccaactggttcgcctgctgaacattccgatgcgtcgggcagtgcgtttccatgagcataccaatggtaagcaccatgccgatgctctcaaagatgcttaccagcacaaccacggagtgtccgggcgtgagtgggtgaaatggctggctgaccaccagcaagaggcggtgaacgctgtcagagcagcggaagagcgctggcgtagcctgatcccgtcggattacggggagcaggtccatcgtgttggcgcccggtttgccattctggaagccgcactattgttaggtaatgtgatcaccggctgggatgagcaaacgtgtcgggatgctattcagtacagctataacgcctggctgcgtgaatttgggactgggaacaaagaacatcagcaaattatcgagcagacagaggcattcctgaacgcctacgggatgagccgctttgcaccgttcccgtatgacccgagcagcctgcccatctccaatatggcgggataccggcagaaaggcggtcacgagactgacccgatagtgttctacaccttccccgcagccttcgaaggggagattgcccgcggctttaactcccgtcagtttgcggaggtattgaagaaagccggcatgctgacaccgccgacttcaggccgggggttccagagaaagtcgccacgcattgatgggcggcagattcgggtttatgtcctgcagtatctgccggacgatgaccagccagagtaa

SEQ ID NO: 101278 - DNA, 351 bp, Enterobacter aerogenes
atgattactaaaaacttccgcctgaatgcgctggcgaaccagtatgctgcggcgctgtatgaccatatcaccgccaccagcaatggcgattacttcatgattgatgtggatggcgagtctgtccgcgtggagattgtcggtggcgtgaaaggcgtccgcgacctcatcgacggctatgcgctggaggcgctgaaagagttctacccgcaatgggaaagcgtgggtattgagctaatgagccgctgcgttaaggctggtgggctgactgagcatgggcgcgagatatggcaaagcatggttaacgatatgggcgcaacaatggcagacaattgcgggggtaagaatgcgtaa

SEQ ID NO: 101279 - DNA, 627 bp, Enterobacter aerogenes
atgagcaatatttacccactcccgaaaaagccgggtagtaccgatccattccgtgcagagcctacgcctgaagggctgagaataaccagctctggtggcgatggtcgtgaaacagttcagcttatcgcttatgacgaagccgtgaaccgtctggacgcgggagattatgacgattccagcacgggttatgacattcaccttgctgtagcagagggcggaaactgtggatatttcgactttaccgcgcagcataacgtcactatgtggcgatggctgattgccgcggcgttcatcaccgagatgaagctgaaaaacggtacgaccattgttactgagccggacggctccgcgtcacaggtagcgatttactccaatggtaaagcgggaattgtggtttatccattcgctgaacgattggcgatggcgaacaacattgagggggctcttatcgagcgttacggcactgaacagggcacggaaaacgccattgtgttttatcagtccatgctggatgtggaagccggagaactcacgtccgccgggcgcgagatactggcagagctacatgatggttttattgatggcatagaacaaaacggccctcccgaagtgccggtggcacactaa

SEQ ID NO: 101280 - DNA, 210 bp, Enterobacter aerogenes
atgagagagtttcgtgtgttttccacgtgtctcgatcgtgccggttacccggtgcctgttacatggcgcgggtatgccagtagttcagatgttgcgatcagaaaaatggagcatgaggctaaaagcaatggctggagcgttgcgctgattgtttttgtacagcaaagaagagtggcgcgcgataagtcgctggtggagataaaggcatga

SEQ ID NO: 101281 - DNA, 504 bp, Enterobacter aerogenes
atgatgaatattgctcaaagagatcgaatcctggcgtctgtaaaccaggtcattgggcgcaaagagagtgttgtgcctaataccccagaaaataattctcacgatcgtttatcgcggataagcgctggtctcttgcacctgttaaatgaggttctccctggcatggccaatacagctgaacgcgacgaaatagccgtgtgggtagatgcgatgtattccatcacgatgatagaagcgttggatgcaaaaccacctacgcccaccaccgtgccagccttgcgcaatgagataccagtgccgactggtaatgatgccgcaaccacagtgcgttatgccgcagaactgcaggtattgtgggagcttcatcttgatactcgcttgcgagaagccaaccccaaagctggcgccagactatggacgctaattaacgaacttaactacgcagctcagcgtacggaaagcagatacaaccgcctgttgttaaagctggagggcatgaaatga

SEQ ID NO: 101282 - DNA, 960 bp, Enterobacter aerogenes
atgattgccgccgcccagggtaaaagcctctctctggctggcctgatgtatgcaaaagttaacgctctgcaggcggtgcgccaccgtgggaacctgtcaaaacctgtcattctgtgggccactgatagtggctctgttgaagtgtatttcgagacaagtaagcgcgcgggtaagcgttcggaaactgactatctggaagatagcgtgtccggcgccggcggtagatgcggggcccatcacaccgccagctataaattgccgcgccgcgacaaaaagggcttgcggtctgaaggtatcccggtctatggttatagcgcaccagcaaaatctggtgccgggattggcgtcctggtaattcgaatggcgacacatgacgcgcctagcgtctttttttgtgccgttagtctgactcaccctttttttgagcgttgggatataatccagcgcctcgcaagagcaatggtggctcaggcaggggcttcttcggaagcgccggtatccattcgagccggttacgccaaccctgcttgggctaccaccagtgaaattggcgtttccggtggtagcgttacccgctatcgaatggaggctgccgcatggctactaccctcacccaaaatccgcaatttatttggattatcgccgctgttcgccgcgatatgccgacaattaccgcaaaaattcaccatattgccgcgccttctgagcgcgaagcccgccgttctctggttcgggatcacgtctgctttttcgctggtcgcatccgtctggaggtggctcatgcgtaactatttccgcatcaccggctacgccgttaataagcgcggtttaacggttggtatcggctatcagctcatatccagcgacaccaaaacagcaacggcccacgcagtgcttcaggcgcagcgtgaaggtctcagccatgtgcgcattacccgcgttcaggaggtatcggcatga

SEQ ID NO: 101283 - DNA, 180 bp, Enterobacter aerogenes
atgaataagcccaccagcacaccgctgccaaaccactcctatcgcgacgctcacggccagatggtgagcgtgaccgctgtagcgcataaccgcgtgacgttctatcgcgagggctatcggttcccatgcgtacagcccattgagcgcttcatgaaggagtacacggaggtgaagcaatga

SEQ ID NO: 101284 - DNA, 810 bp, Enterobacter aerogenes
atgaaaatcgaaaaaagcagattcaattctgaggccgcccctcaacccaacgttaacccgggcgtaattaacggcaatgactttgccgccatcgttcccgttattcccggccaaattggcgggcgcgaaaccaatattgcgagcgccagagatttgcataaagcgctgggtgtgggccgcgactttaccaactggattaaaggccgcatcgaccagtacggatttgtggccgggactgactatatccgtgttgaaaatttgagctcaccaaaacgggcgagcgcaaaatttcgccagcaaatcgagcatgattaccttctctcgctggatatggctaaagaagtggcaatggttgagcgcaatgaacaggggcgcgccgtccgccgctatttcatccagtgcgaggaagcgctacagctgagtgcgccggaaatcgccgcgaagtatcgccggcacctcaaagcccgcattggtgctgccaacctcttcaagccgatgtgcgccgctctggatgctgcccgggcagaacaggggaaagagacgcaagcccggcactacagcaatgaaagcaacatgatcgcccgtattgtgctgggtggcatgaccgctaagcagtgggcgcaggtgaacggtatcgacggcgaaccgcgcgatagcatgagcgccgcccaactggaacacctcagctacctggagggtacaaacatcacgctgatcgatatgggcatggagtacggccagcgtaaagcggaattaacccgcctctctcagcgttggctggctaaacgtctgggggctaacgatgaataa

SEQ ID NO: 101285 - DNA, 432 bp, Enterobacter aerogenes
atgcaaaaagaaaaccgcccattacaggcggctaacacagatactcgcggatctgatgttacgccaccagcctacaccgttcaagcctcaaaacgcaccccgaagaaacaccgtgcccgtacctacatgctgcgttgtggggctggtgggtggacagaaaacgatatcctgcgcaattgccgcctctcatctggccgcaactatgcgagcgaacttgagcgcgagcttgatatttgcctggaacgcctggaagagaaaaaccctgatggtatcggtgcgcacatgcgttaccggtttgcgtgccgtggtgacgtgctgaaggtgattcagttcgttaaccgcatggccgcagtcaaccaacattacgggctttctaagcaggatatagccgacattctgaacctctacccggacaacttcaccgccgcataa

SEQ ID NO: 101286 - DNA, 198 bp, Enterobacter aerogenes
atgtcccaatcattaatccgattttctgaggttcagaaacgtactggctacagtaaggcatggttgtatcgccttatgagtgaacagcgttttcccgcggcaattaaaattggctcccgttcaatcgcctttattgaaagtgaaattgacgattggattaatcagcgcattactgaatctcgtggtgaggtggcctaa

SEQ ID NO: 101287 - DNA, 726 bp, Enterobacter aerogenes
atgcctattgtcgaaaatcttcctgacttatcccattggaaaacagttcaagagttcagtatttcccaagccgctttattactggctggaattgatccatttgattttgatgaaggaaaagagcttgatcaagtacgggcatgcaaccatgaacgttggaagcaagcatggggaatgagttcggggattttaacggctatcaggcgaggtatattaacaccgatcctgtgctattcagagcaaatggtggaaaattggaatgggcctgattatattgaatatacgccgataaaaccaactgacagaaattgcgaaatttcaaagagtaaaactattataacaagagactcattgtatgcatggattgagaatgagagtgttgattttgtgcgcaagtcagttccaaagaaagtaatttctttaaattgcgaagtaatcccccctccgaatatcattgatgttgttcccgagtcagtcgatgacggtattttattgcttcctaagtatgagcatcaaagtgaaggtttagagtttgttcaagatgctataaaggaactttggtcaacttatgatgcagatgaaccacagacggcgccaactaaaaaagaagtaattgactatttaacggaaaggggggctggtaaaaacatggcggaggcggtaaaccttgttttgcgtcctgtctgcctgcagggaatagggagaagggtaagaaaatcaacatga

SEQ ID NO: 101288 - DNA, 1215 bp, Enterobacter aerogenes
atgaagctcacagcccgccaggtcgacacatccaggcccaaggacaaaccctataagctgtctgatggcggcggtctttacctgttggtgaaccccaatggctcacgatactggcgcctgaagtaccgcatcgctggtaaagagaagctactggcgttgggggtatatcctgatatcactctggcggtagccagacagaagcgcgcagatgcaaaaaaagttctcgctgctggtggtgatccgggacaggagaagcaggaagagaaacaagcgaaagagcaggctgtggcaaacagctttgagcgcctggcgatggaatggcatacccataaaagcacatcatggtctgaaggctatgctgagcatcttctgatgtacctgaagaaggatatattccccttcatcgggcaaaaggcgattacggatatcagccaggttgaaatgcttaacgtcctgcgaaaaatggaacaacgcggcgttctggataaactcaagaaaacccgtcaggcctgccggcagatattcacctatgccattattaccggtagagcggagcacaaccctgtatccgatctggctggcgcgctgaagtcgcccaagcaacagcactacccacaccttttagtcgaccagatcccggattttctccgtgcgctaagtgaatacagcggcagcaccatcacccgcaacgcaactcgactgttaatgcttaccgggctcaggacaattgagctccgtgcctctgaatgggttgatatcgactttgacaaaggggtctggaacgtccccgcagagcgaatgaagatgcggcgcccacatctcgttcctctctcaactcaggttcgcgagttgctggaagagatccaccaacttaccgggcgagggaagtatgttttccccgggcggaatgacgccggcaagccaatgagcgaggccagtattaaccaggtgattaagcgtattggctacgacggtaaagcgaccgggcacggcttcagacataccatgagtaccatactccacgaacagggctataacaccgcctggattgaaacgcagttggcccacgtcgataagaactccatccgtgggacatataaccacgctcagtatctggatggccgccgggaaatgctccagtggtatgccgactatatggcggctcttgagaatggtgaaaatgtggtccatggctcgttcggaaaacgtgcctga

SEQ ID NO: 101289 - DNA, 540 bp, Enterobacter aerogenes
gtgaataaatcaatgttggcgggtattgggattggcgttgccgccgcgttgggcgtcgccgccgttgccggtctcaatgtattagatcgtggcccgcaatatgcgcaagtggtgtccagtacgccaataaaagaaagcgtaaaaacgccgcgtcaggaatgccgtaacgtgaccgttacccatcgtcgcccggttcaggatgaaaaccgtattgccggttccgttctcggcgcggtcgccggcggcgtgatcggccatcagtttggcggcggtcgcggtcgaagcgtagcgaccgttgtcggcgcgttgggcggcggctatgccggcaaccaaattcagggctcaatgcaggataacgacacctataccactgcccagcagcgctgtaagacggtctacgataagtcggaaaaaatgctcggttatgacgtcacctataaaatcggcgaccagcagggcaaaatccgcatggaccaccagccgggggcgcaaatcccgctggacagcaacggtcagctgattctgaataacaaagcgtaa

SEQ ID NO: 101290 - DNA, 336 bp, Enterobacter aerogenes
atgcataatccgctggttatcgaagcgatcatgttgatcgcggccattgtcgtcggcgtatggagccagagagctttacctatatacgccgatagtcggccgattctctttatactgtgcttgttcatcagtatcggcagctcattgggcctgctgctcgatggcttagccctgctcctcaccggccaggtagcaacaggtattgtacggatatatggccccctgctgctgctgctggtgctgtggaaaccccttaatgcggtcttcggtatcattgaagattttttgcagcgcagagaagccagggggaaatcccggcggcgaaagcgaaattag

SEQ ID NO: 101291 - DNA, 885 bp, Enterobacter aerogenes
ttggaaattaacagagcaatgccaccgttgttcggcgttactacggcgaatgatatttattgtgatataataaccaacatgaatatcggtatgaacatgaatagcatgacgcgaaatgtaacaataccgacactactgataattatcacttcacctttcctatacctttgctttagtctactggaggaaaatgacattttactcttccttggtctggcagggagtgtattaatttacttttgcatatacatattacgatgcgctgttgtgcatccgaaaactctcaccattaggttaaatcgccaacagcagaaagtttatattcaaaaacatcagcgtacatttaatatttttgccaaatggcccattgaaacactcatttatgactggaatcttatagaggcccattttggtcagcatgtcagtcgctattatggtccccagtcgtggtaccgctggcatgctgtttcatctaatggtaccaaaaccagttttaccattagcgaagatattttaccgatgtggtctccctactctcgctttaaagccgatatgactacgattatctctggctatgaagcatcatgggaatggtgtaaccactatatgagtggcgcgatgcccaacttgcgtttagtctcacctgaaaacgaatacagctataaatactgcgtcacggcaatcagcagtcgaatagtgctacgtgccaatcagaatgacaaatggaccacaatctttcctctcagggacccatttttcttaacattttctatagttattgttcccttcattttattagacgcattagcaatgcgctggattatgcgaagacttcccgacaccccgtggtctgactccgcgcagacggaatctacgttgagttag

SEQ ID NO: 101292 - DNA, 864 bp, Enterobacter aerogenes
atgaatgatataaaaattaacccccctccactcttcggtattacagaagttaatgatatttactgcgatataaaaagaaacatcctccgaggaaatggaactggtgtaactatatggttatttttaataattggaactatttactctctttttctggtgggtcctctactaacccattccgatgaaatcttttacgccatactattcgttatttttatattatactacagtatatatgtgctacgcgtggccataacacagcctaaaagcttaatcatcagactgaatcgcaagcgacagcgggtgtatattcaacatcataatacttcctataacatctttgccagatggcctatcgaaacgctgacttatgactggaaagagatagtcgctaactttaagaccggaaccgggaaaagctgcggttgtacgtggtatgagtggcgtgttactgaatccagcggttaccaaagaaaatttgttattagcgccgatcatagtgcttcactattttcacgcttcaccattgaaaacgaagattttctctttagctatgcgaaatcatgggcatggtgtgaaaactatatgcgcggcatgataacgcctgtccatattttaccgccagagcctcaacactcatttaaatattgcatgttattagttagtcggggcttcctgcgtgctgatataaatgataaatggtcaactattattcctttccggaaccctttcttctggattctggctcttttcatgctgccaatgatgatacctgatgcattaataacgtatgtggtgttacgaataaaatccggcaccccgtggtctgattcagcacgggcggaatcaacgtcgaacaattaa

SEQ ID NO: 101293 - DNA, 378 bp, Enterobacter aerogenes
atgccagatacttgtcctcgtttcgtgattccaccctacattttacgccgcattgtcgatcatggttccgttcagcagcagcgctgcgcgcagcaaacgctgagccatgtacaaaccctgatgacgcacgtgccgggccgccccgccgccgcccatgtcgccacgccaggccagcttgagcgcgacatttacgatgccaggcagactcaggaacttccaggactccaggtgcgctttgaaggacagccttccaacggcgatgtcgccgtggatgaggcctacgactatctcggcatcacccatgagtttttctggacaagctatcatcgtgattcgctggacaaccgcggattgaagctgaccggcagcgttcactag

SEQ ID NO: 101294 - DNA, 795 bp, Enterobacter aerogenes
atgtcattgatagacaaaaataatcgtgatagcacacgaaatcatctttggtcgggcggtattgcaggcctgatcgtagggggggttatactctatttcttgaacgaatggggatcctggcttcctgatataacgtttaagaaaattttaatatgcttatctcgcgaaacaatggagcaaagaacttaccctgagctgaagatatacatcggcttaatcttttccagctttcttattgtgttattacatcccggctatgccaaagcatccatcgccggatggatattacacaacgaaccttcagctaaaaattgttttcgatatatagtatgtgcgctgatactcaactgtatcctgcagtacattctttcatgctatgtaacgttatctgccatccatacaattaagcatattctatatatagtgactttgctggcgacaggtggaatgctactgtacgacgcctggcaacagtcacaacttaatgacactacgttaaaccaattgcgtctcgcagtattaataacaatagcgcttcaagctatctggcctgtaaatttattaattttttccgcccaaacatatgacaatatggccatgggcttgagtatcgcagccgcgttaatgttaggcgctctgctggcatttttaaccacggcaggtctgacctgcttagtacgtttgttgctgggtaagaaaaacctacgtgcctggcgcccgcagtttgcgttattcaatggaataattattttatgcgtagcgggaagttatctgtttaatatgatatctcattaa

SEQ ID NO: 101295 - DNA, 786 bp, Enterobacter aerogenes
atggtagatgatgtcaatggcaataacctgcaaaaactcccgtggttaggaggtatcgctggtctgatagtaggagctttaatactctatttctggaaggagtgggcatcatggcttccgggaatcacatttgagaaaatggcaacttatgcctatcaaaatgaccttgaaagaaatagcttactgcctattacggtatatgtcgatcttcttttctcgactttcctacttgttctttttcaacctggctatccacaagcaccgattgtatcttgggtattacataataaaccctcagctaaaaacatcatcatttatatattgctcgcctggatgctcagccttattatacagggtatccttatatcactcccacaaagtaccttactaaaatcaatactatatatactggccttactgaccatagttagaatgcttgtaaccgatgcctggcgccagtcccaggcgctttcctaccccttaaatcagttgcgccccgccgttattgctattattgctcttcagtctatctggccgattaaagcaacactaatatttgccgatttatatgacaacatcggattacacttgatgttcccagttgcaataatgattggcgttctgctggcttacttaaccgctgctggtctggcctggttaacgcgccttgtaataggcgagaaaaacctccgggcctggcgtgggcagtttgcattattcaacggaataatcatcttctgtgtggcgggaaaatatttttttcatttggtatcacggtttatgtaa

SEQ ID NO: 101296 - DNA, 363 bp, Enterobacter aerogenes
atggtcttgcactccacgcgctggctggcgctaagttacttcacctacttttttagctacggtatttttctaccattctggagcgtctggctggcaggcgtaggcctgacgccggaaaccattggcgtgttgctcggcgccgggctggtggcgcgttttctgggcagtctgttgattgcgccgcgggtcagcgatccttctcgtttgattagcgccttgcgaatcctcgcgttgctgacgctgctatttgctctcgccttctgggtcggcggccaggtagcctggctgatggtggtcatcgtcggattcaacctctttttctcgccgctggtgccgctaaccgatgcgttagccaacacctag

SEQ ID NO: 101297 - DNA, 348 bp, Enterobacter aerogenes
atgaagagggttattcaatattacgacacttacaaagaagatataccttgcactgtggatggcatgaggcttgttagtgcaacaccaattaaccacaagcaaaaacaatatgagtgtgtttatcgctctatgtctacatacgaacttgcagaatcaattgcacagagacgtaataaagaggcgctagagagaattaaacctctgactattggctatactggcaaagttattaaagggaaggcgtcatatttcacaactaactctctattaaagtggggttgtaagtatcccggcaaaacggcccattcacttttagagatcttccgacatactgattatgtcccctga

SEQ ID NO: 101298 - DNA, 1125 bp, Enterobacter aerogenes
atgattaaccaacatcagccccgggacataccgcaaattctgctgtcggtgctgtttttgtccctgataattatttcctgcctgtgggttgtgcaaccatttattctctccttcgcctgggccggtaccgtggtcatcgccacctggccggtgctgcttcgtttgcaaaagctgctgttcggcaaacgcgcgctggcggtgctggtgatgacgctactgctgtttttactattcgtcattcccattgccttactggtgaatagcctggtcgataatagcgccccgctgattaaaatcgtcagtaccggccaggtaacgctgccggatttcgcctggctgaactcgattccgctgatcggcgataaactctattccgcctggcatagcctgctggagatgggcggcgcggcgattatggccaaggtccgcccttatatcggcgccaccaccacctggtttgtcggccaggctgcgcatattggtaaactgctggtttactgcggactgatgctattgttcagcgccctgctttactggcgcggcgagcgggtcgcctatggtttccgctacttcgcgacccgtctggcctcaaagcgtggcgatgctgcggtggtcctagccggacaggcggtacgcgccgtggcgctgggcgtggttgtcaccgcgctggcgcaggcggttcttggcggtatcgggctggcgataagcggcgtaccttacgccgcgctgttgaccgtggtgatgattttcacctgtctggtacagctggggccgcttatcgtgctggtgccgtcgattatctggctgtactggaccggcgatacgacctggggcacggtgctgctggtatggagctgcgtggtgggtacgatggataacgtaattcgcccggtgctgattcgcatgggcgccgacctgccgatgattctgatcctctccggcgttatcggcggcctgatcgccttcggcatgattggcctgtttatcggtccggtgctgctggccgtctcctggcgcctttacgacgcctgggtgcaggaagttccagcgccgccgctggacccggatctggttctggcggagctcgccgaacttaatgccagccataacaaaagcgaaaagtaa

SEQ ID NO: 101299 - DNA, 2451 bp, Enterobacter aerogenes
atgtccgaagtgaatagcgcgccggtctggtatccaccatctttcccggagcagggccgccttccctctgttgcctctttgaccgggaaaaactgtcaccagcaggacagccgggagcgggcttaccataaagaactctgtctcgccgcaaaccgccgggtcgcgccgccctgctgcaaaaccctgcatatcagcctattctttgacggcaccggcaacaacctcaatcatgacctcaatatcgcagaccccaaacaccccaccaatatcgcccgcctgtttcgcgccaccgtgggacagggatatgccgccggactcggaaataagaattcggctctgacggacctcccggacacggccggcaacaagtattataagtattatatgcccggtgtcggcaccccgttcccggagattatggatctcgatttcaccatgggcgggctggcctttgcctctcacggggaagacaggattaactggggactactgcgcatcattgatgcgctgcgacgtaccaccggactcggtaaaatggacgacggggaatgctgggcatcggttcaggctatgtccaccaccatgatgtccttcgggctgaccggcggcggtaaccgctataatgagtttcagcgccttcttaaatctccgccgctgcacagcaggctgaagatggcgcttaatccgggtgaacccggaaaaatcaaactgctaggtatcaagctgtatatttacgggttttcgcggggagccgcggcggctcgcgcctttgtcaactggctcagcgaactgcttcctgccccgaaggagggccaggataaaccggagcagtgcctgatggccggcgaccttaaaatccctctcagcgttgagtttctcggtctgttcgataccgtcgcatcagtcggagtaccgcatatcgccccggttgccgaagggcatatgggctgggctgacggcaatcaggcactgccggaggaaaaaagatacggcggactgataaagcacggtgtgcatctggtttctgctcacgagcagcgtctgtgctttccgctggattccatccgccgcactgatggctcctatccggcccgctgcgtcgaggtactctatcccggcatgcactccgatctcggcggcggctatccgccgggggaccagggcaaggcgaacaggccggatgatgcccttctgctgtcgcagattgccctacatgacatgtatgccgccgctttcgccgccggtgcgccattcaagattccccttgaagccatccctgacgcgctgaaaaaagaccagtggcgggcgttgctgccggatgtacaggatgaatttatcattcatcctcagctaatccgtcgtttcaacgcgtggcgcaccctgaccctgaacctctcctcatcagaagaggataccagcccggagcaggcctctcagttaacacccatgcaggcaccgatgtccctggaaaaagccatggaaacccagatagcatggcttaccacctggcgcatcggtcgttacgccacaggtacctataaaacacagcgcttttaccttgatgccgccgccggcggcctggatgccgacagtgacccggaagtccgcaaagcccatgaacaggagcggacagacaaacagaaggccgtggaagatgaccgcaaaaacgagttaatcaaggcgccaaaaaacagttttatccttctacctcagggaccgaaagacttcgatgcaatgctcggtcagacccagctgcgacagggcgctgaagaattcagggaggattaccgggaactacagcgggacagtactcaagaatggtattacgaacccctttacgcccttaaaaataccctgtacctgctgaacaccgacgatgaatacgcagagtggatgcgcatgaaaactgccggcgaatccaggctaaaagtgctgtttcctgacaccggcgaagccggcaatacagaccggcctgctagtcttgtccgggcattgtttgacgatcagatccatgattcacgggcctggttcatgcacaatgcctttggctcccgtgaaccctggggcggttacttccgttaccggatggtctatttcggcaacaactgcaacaaatcactttccccccttatcgtggccggctgggtggtgggcgccgccacgttggcgggtggtgtagctctcgccatcaggcaaaaaagcgttcaggggaaaatactgggcgtcgccggtgccttcggtgccatcagtctggaagtggaagcgattgatattctgtccgggaaaccgatccccatgctccctggttccgaactgctgagagccttcacacagcaaccgggtgtggctgtcgcacagcaaaaagccgccatggcagagcagtatctcgcccagcataaagccacgattaacgccatctggctggagcttgcgcaggaaaccataaattaa

SEQ ID NO: 101300 - DNA, 474 bp, Enterobacter aerogenes
atgttatggcgggggtcaccgaaggattcgaccggcagcactgctgcggacacgtttattgacaacttacgctacgcggcggatcgagccaaagcgcataacatcactattttgcttgaaggtttatcgcccgccacccgtccgggttatttattttccagccaatatcaggcgatggaatatattcgccaggcggaccgcgacaatattcgactgcagcttgatattttccacgcccagcaggtcgatggcaatctaacttatttattgaaaaactataaagagtatatcggccatatccagattgcatctgtaccggcgcgccaggagccgattgacggcgaagtagattatcaatggattttcgccgtactcgagcaggaaaaatatgatggttacgtcgccgcggaatatagtccgcgcgccgggacgcaagccggactgcactgggcgcaggcctggttaaataattaa

SEQ ID NO: 101301 - DNA, 267 bp, Enterobacter aerogenes
atgtcgtttcgtgaatggaaagaggcgaacagaattggccgtaagacccacacctgccgcgcagagactgagcaatggctaaataaagagcctgctcgttatgttgagccactgccgccagacttccccggcgttcgcctggacgatgccacattgaaaccgcgcgagcacgccgtccccgaatcgacaaccggacagaatgcttttctcaaagcctgccgcgagttcctgatttgcgatgattccatcctgaaaagaatctgctaa

SEQ ID NO: 101302 - DNA, 273 bp, Enterobacter aerogenes
atgcctgacaacaaaaaacaagggcgttcaaacaagacgatgacgttctttgtctgtttcctcgccgcgctggccggcttactgttcggccttgatatcggcgttattgccggcgccttaccgttcattgccaatgaattccaaatcagcgcgcatacccaggagtgggtggtcagctccatgatgttcggcgccgccgtcggcgcagtgggcagcggctggctctctttcaaacttgggcgggctttgttgaataaatcgaacttttgctga

SEQ ID NO: 101303 - DNA, 690 bp, Enterobacter aerogenes
atggaaattcgttcgatatggctaaagcgtatgcgttacaaattttcctgtctcagtggagacaccattaaagcaatcattctggtatgcctggcggtcggcgtggttggcatgtcttacggttcattagcgatggcctacggttttccgctgtgggtgccgtttgtcctttccattacggtgctggccggtgcctctgagtttatgtttatcggtattgtcgccagcggcggtaacccgctcgccgcggcggcggcaggtttactggtgaacgcccgccacgttccttttggcgtcaccgtgcgcgatctggtcggcgcccgcgccgccagcctgctcggctgccacatcatgaatgatgagagcgtggtgttcggcctgtcgcagaaaacccaggagcaacgtaaagccgcctactggctctgcgggctgggcgtggcgctcatctggccgctcggtaccctgctgggtgccggcgtcggtaaattattacccgcaccggaaaccatcggcctggatgcggtattcccggctatcctgctggcgctggtggtaccggcttttaaaaaacgtaccacactgattcgtgcctgcagcggcgcggttatttcgcttgccgccgtgcccttcgcgccggttggattaccggttctgctctcattgtttggcttactggcgaggaaaaaataa

SEQ ID NO: 101304 - DNA, 825 bp, Enterobacter aerogenes
atgcacaacatcatcaattcatggttcgttcagggcatgatcaaagccacctccgacgcctggcttaaaggctgggacgagcgtaacggcggtaatttgacgctgcgcctggatgaagcggatatcgcgccattcaaagccgattttcacgctcagccgcgctatatcgccttaagccagccgatgccggaactggctaatcagccgtttatcgttaccggttccggtaaattcttccgtaatgtgcagctcgatcccgccgccaatctcggagtggtgaaaatagacaacgacggcgcgggctacttcattctgtgggggttaacggaagaagccgtgccgacgtcggaactgccggcgcatttcctgtcgcactgcgagcgcatcaaagccaccggcggcaaagatcgcgtgatcatgcactgccatgccaccaacctgatcgccctgacctacgtgctggagaacaacagcgatctgttcacccgcaagctttgggaaggcagcaccgaatgcctggtggtgttcccggacggcgtcggcattctgccgtggatggtgccgggcaccgacgagattggccaggcgaccgccggtgaaatgcagaaacactctctggtgctgtggccattccacggcgtcttcggcagcggaccgacgctggatgagactttcggcctaatcgataccgccgagaaatccgccgaggtgctggtgaaagtctattcgatgggcggcatgaaacagacgattagccgcgaagaattgattgcgttaggccaacgctttggcgtcacgccgctggccagcgcgctggcgctctaa

SEQ ID NO: 101305 - DNA, 1035 bp, Enterobacter aerogenes
atgaatcatgcgattacgatgggaattttttggcatttaatcggcgccgccagtgccgcctgtttttatgcccctttcaagaaggtgaaacactggtcgtgggaaaccatgtggtcgatcggcgggattgtttcctggctgattctgccgtgggcgataagcgccatgctgctgcccgatttctgggcctactatcgctcatttagcgcttccacgctgctgccggtgtttttgttcggcgcgatgtggggcatcggtaacatcaactatggcctgaccatgcgctatctgggtatgtcgatgggtatcggtatcgctatcggcattacgcttatcgtcggtaccttaatgacgccgatcctcaacggccactttgatgtgttgattcacaccaaaggcggacaaatgaccctactcggcgtgctggtagcggtgattggtgtgggtatcgtcacccgcgccggccagcttaaagagcgcaaaatgggcatcaaagcggaagagttcaacctgaaaaaagggctgatgctggcggtgatgtgcggtattttctccgccggcatgtcatttgcgatgaacgccgctaaaccaatgcatgaagccgccgcggcgctgggcgtcgacccgctgtataccgcgctgccaagctacgtggtgatcatgggcggcggcgcgctggttaacctcggcttctgctttattcgcctcgccaaagtgaaggatttgtcgctaaaagccgacttctcactggcaaaaccgcttatcatcagcaacattctgctttccgcattgggcgggctaatgtggtatctgcagttcttcttctatgcctggggccacgccagtatcccggcgcagtatgactacatgagctggatgctgcatatgagcttctacgtactgtgcggcgggctggttgggctggtgctgaaagagtggaacaacgccggacgccgcccggtcagcgtgctcagcctcggctgcgtggtgattatcatcgccgcgaatatcgtcggcctgggaatggctaactga

SEQ ID NO: 101306 - DNA, 351 bp, Enterobacter aerogenes
gtgacgttcctgaagaccaagaacgggaaaaagcgcactgttccaatctctgtcgaactggaaaagctgatcaagaaggaggcgagcgcgaaactgtttaaagtggattatgaaaaattttgtctgacgctgaaggcggtaaaaccagacataccgccaaaccaggcgacgcatattctacggcataccttcgcaagtcatttcatgatgaacggaggaaacattatcgcgttacaacagattttaggacatgccagcattcagcaaacgatggtttacgcgcatctgtcgccagactatctgcaaaatgccgtctcactaaatccgcttgccggtggcgtatcgctttaa

SEQ ID NO: 101307 - DNA, 597 bp, Enterobacter aerogenes
atgaagaccatcgcgccctggttgcgatgctttcacgcctctacaaccaggcaaaaatatgcactggatggtgaaagcgacgacgaaagcggacgcccactgaaggagacagcaaaacacgctactgcctgggcttcatgctggggcattcgtcagtttcagtttctgggtggcgctccggtgtctgtctggcgtgagttacgccgcctgaagaatcaggaaatggcagatcgtatcagtccggttttcggtgagttacaccgcgccgcccatgcagggaactggcaggactacatcaccttgcagggtggcccgttcgtaacacggaataggcttgttttgcgcgcctggtatcaatatcgggatgagccgagcagctacggcgagtttcagagggttatcaaaggggtggtcatgccagcatcgactgttcctccggttgaaacccgcctccattcttatcgcattgtcaaaaagaagccaaaagcagatgacgacgccggtcgaggttttgaccttaagggcgcgcccgcgccctcttggactcgtgtcaataactgtaccgagtataaaaaacatacagattcccccctttaa

SEQ ID NO: 101308 - DNA, 297 bp, Enterobacter aerogenes
atgaaggccgcacatgctattcgccaggaagaaagcgcggtgagcgaggaagttgaatccctggcccaggaaattatggggtgggcgaagctaagaaaaatttcaatcaacccggttcaggccctgaagctggctcaagggggagaggtgacggcacttgatactaaatatcgcgccaacccattaacgggtgaattgattgtgaccggtacagatatgcactggcgcaagacgctggcacggcacaaggcagaggcattgattagccgctggcgccaggctgcgagggaagtgtga

SEQ ID NO: 101309 - DNA, 1134 bp, Enterobacter aerogenes
atgggcgacttaagtggtattcagtcagatttagcccagctagttagactggtaatagctgaacagtatgatgatgttcggttgtatgtcgctcgcttggtgcgcaaatatcgggaaactatgcctgctctatctgagcagcttgatctttatttacggaacaaaccgcagaagcctgcccaaggtctgcgaaaggctacgatgccaaaaccgactcagtctcaggttatgcctgtggacgaggattcaaggttaactttactgaaagcaccaaatgaaaagattaccagtaagccattgctttctagtcagatagaagactcactggatcagattattcttgaacgtaagcacatagaccgtcttaagacccttggcttacaaccaacacgttccgcaatttttgttggcccaccaggtgtgggtaaaacgcttacggcaagttggttagcacagaaattaggtgttcctttctatgttctggatttaactgctgtaatgagtagttatcttgggaaaagcggaaataaccttcgtgcggctcttgatttcgcaaagagagggccgtgtgttcttctgttagatgaaattgactcaatagccaaaaaaagaagcgatgattctgatgtaggagaattaaagaggcttgttactgtgatacttcaagaggttgatgaatggccttcttcaagtctgttgcttgctgcaactaactttgctgagttgattgatccggcattatggagacgttttgatttggttctaaattttgagaaaccaaatagtgaaagcattaaagaggctattaagcgttttttaggccccgactatgccatttttgctcgttggatagatttgcttgtcatcatgttcaaagatgaatcattcagtaatattgagcgttctattaataaattccgccgctcagttgctttaggcatatcttcagatgaggagttgattgaatctttcattaaagatggtctatcagatttagaaaggaatgaacgtattgaaatagctgttaaccttaacagacattctaaactatcccaacatgccatatcagacttaactggggtcagcagggatacaattagaaaatatagttctaaaaagactaacgcagcatag

SEQ ID NO: 101310 - DNA, 2226 bp, Enterobacter aerogenes
atggcgaaaactaattttctgattggacgcggcgagttattaaccaatgatattcccggtccaaaaagagccccaggaaaagctgaggtgtactctctttatgaatcgaaacagcgcctgttaccgcaaattgcatctacgatagaaagttttgctaagttacctggtcgggcatgtcctgacgattatgcagtagcaaaggtaactatcaatccaagctatattgcgcgatcctttttccctgcgaagatgctgaaatcgaccggattaacgtcaattgggagcaggacggttagagttacgccgcaaagctggaaacgcaaagttgctgtttctgaggttacaacaacacagatgtttattgcgggtaaaagagaatcattcgaagagttacctcattgggtgtctgggcttaaagagttaactgatgaagcgattgattttgcgcgtatagaaaagtttgaagcttatttgcctgaagagcgtattgttaccgcaggtgatatggatacgtcgtattttgaggttggcgtacatctgttggctgaggatggacaagatttgatccagcaacaatttgttcgattcgcgtcaactctgaacatcaaagtacatacctctttagcttttaccgcaggtacgttgtggttcgtgccaattcaggcagatcgaattgctattgataagctcgcgaaatttacatttgtacgcgtaattagacctgtaccaaagttacgtggtattaggcctatacaaagggcttctgggccattggcccagtgtaaattgcctactgaagggccagtatcttcagaaataaaagtcgctattcttgatggtggtttaccatcagagcatgctatatctccgtggttaaaatcctatagggttttggacgatcatgcagaagatgatcctgatggtttagagcatggtttagccgtatcttcggcttttttattcgggccaattagtaacaagtcagaggtgcaaaggccatactcttatattgataacttaagggtactggataataagacctgccaagaagatcctctggagttatatcgaacgttgggcttcattgaagaagtattgctgtctcgtcagtatcaatttatcaacttaagtttagggccggatctaccaattgaagatacggaagttcacgcttggacctctgtaatagatgatttattaagtgatggcgaaacactaatgactgttgctgttgggaacaatggcgaaatggatcgtgagtcaggtaatgcaaggattcaagtaccatctgattgcgtgaatgccttggctgttggggcttgcgatagtgttaatgaaactgaatggaaacgagcaccatatagtgctattgggccgggtagaagtcctggcgtgatgaagcctgatttagttgcgtttggtggcgatatcgacgagtactttcatgtattgggaaaaggtaaaaaacctgtcatcacaccgcaacggggaacaagttttgcttctccttacgctttgcgtgcggccgttggtgttagggcgattttaggaagtgatttgagtcaactggcgataaaagctttattgattcatgcttcaaaaccgcttgatcacgcttgcgctgaagtgggttgggggaaactacctgaggacttaaacgacattattgtcagccctgatggtgttgctcgtattgtctatcaaggtgaattgaagccaggaaaatacttacgcgcttctcttcccattcctgaaggtggcttgaaaggtaaaataaacttaacggcaactttctgttatgccacaacaacagatccgcaagattcggcttcctacacaaaggctggtcttgaggttacattccgcccaaatgattcaagagttaaagatggtaaacagaatgctgaaactaaaggtttttttgagctagccaaatactcaactgaaagtgagcggcgctctgatatgggcaaatgggaaactgtgctgcacagttcaaagaacatgctgggagcaactttaaaaaatcctgtgtttgatattcactataacgctcgtgaagcaggggctagcatagcgagtcacaaggcggaaaagataaagtacgcccttatcatcaccgtgaaggcagcgaagcaccaagacctgtataacgaaattttacgtgcttacaatcaggtactggttccaattcaacctcaaacctccattccaattcgttcataa

SEQ ID NO: 101311 - DNA, 375 bp, Enterobacter aerogenes
gtgagtgtccgccgccgcgccacaactaaaaaagcggataagagcagcagcagggaaggcggctatattgaaggcgctgaaggtaacgtttttattatgcgtaaaaccttccagaatgaagacgccgccagacgcgcagcggcggcaaaatggcagcagttacagcgcggcgcggcggagttttcgatcaccctggcgcgcgggcgcgcggagttgtacccggaaatgcacgccacagtaacaggatttaaggccgatattgacgctcaggactggattatcagcaaggtacagcatgacgttgatgacaatggatttactacacagcttaactttgaagcaaaaatttctgactggattgcagaaactgaatag

SEQ ID NO: 101312 - DNA, 249 bp, Enterobacter aerogenes
atgttcaaatgcccacattgcggcgctacggcccgcacccgcaccagtaagcctctcagtgaagtaacgatccgtcagtaccatcagtgccagaacatggaatgtggcttgtcattcacgacgcttaacagcgttgaaaaaattgtcaccaagcgtgagcggcgcgataaattagcgcctgattttattcctgcgggtgtctttcccgcctcgcactatggacgcgatcaactaaatttagcgatttaa

SEQ ID NO: 101313 - DNA, 816 bp, Enterobacter aerogenes
atgtctgagtttgagcaacagcgccgacagaatctattacacgaagatttttatttttacattcaggagcgtgatgcatttcagctaactgaattcacaaatgaaataaatacattaaaagatccgtaccttgaaccgatggtggatatttattactcacaggcctgccttgattatacggctggaaaaccaataacaaacgtactcaatagtatgagccaggctattgagtacaccaaggcaaccatcagttatatcgaaagacataacaaaaaatatccccttaaaccgattgatgctacaatattcagtaaatttatggaaactgagttcttaccgaatatcattggactcagtatgttaagcggtagaagagactggttcgatactcttgttaccgccaccgatcttagcctgtgggacgatacggaaaaaactattgacagcctgattgcgttataccgcccgggttatccaatcacaacggcgacaacccccagagaacttagcttcagaacaccattatttaaagccattcatgccaaaaccgagaaaaccacattaaaaaatctcaatgattatctgcatggatggtatgacggattacgtaaagccggcgatggctatattgattctcatataatacagcacagcgattctcgcgactgctgctcttttcacggctattggtgctttgaagctgctgccgttgcttatttaaagggaattgatgacaccgcgttgcatcactatctttattatcctaaagatatggttaattatgcccggagtttgcgcgtcaacactcacgcataa

SEQ ID NO: 101314 - DNA, 816 bp, Enterobacter aerogenes
atgtctgaattcgagcaacagcgccgacagaatctattacacgaagatttttatttttacattcaggaagtgtataattggctgttggctgaatcaaagaaagcaatagatgaattagaagaccctaacactgagctacatgcaaaattatattattcactagctattcttgattatacagccggaaaacccataaccagtgtaatggatagtatgagcccggctgttgagtacacaaaatcagccatcagctgtatcgaaaagcataataaaagcaatcccagaaaaacgattgacctgacgatcttttgtagatttatggaaaatgagttcttacctaacttcattggattcagtatattaagcggtagaagagactggtttgatattattgttaccgccgctgaccttagtttgtatgacgatacggaaaaaactattgacagcctgattgcgttataccgtccgggttatccaatcacaacggcgacaacccccagagaacttagcttcagaaccccattatttaaagccattcatgccaaaaccgagaaaaccacattaaaaaatctcaatgattatctacatggatggtatgacggattacgtaaagccggcgatggctatattgattctcatataatacagcacggggattctcgcgactgctgctcttttcacggctattggtgctttgaagctgctgccgtagcttatttaaagggaattgatgacaccgcgttgcatcactatctttattatcctaaagatatggttaattatgcccggagtttgcgcgtgaaagatcacgcataa

SEQ ID NO: 101315 - DNA, 1167 bp, Enterobacter aerogenes
atgcgaaattacaaagtcattaccccattgtttccgacctacgaccaaacccgagcgatgatgaaagccgtaacaggatgctcagtaaaatcgctccgtaatatgatctccgccattcaggaacagaccggcaccccgcagaacccggtagactggtcagaaccggaccactggattaaggaacgactgagcggagaagatgccaaaatagcctggcaaatctggaataccgataaccatatacttaacccccgccacagctatggctgttatatgtttatcaataatccgctattcgatttgatgcagaccgatgaggatggaagctggcatcccagtgaacagggacgtttattcctcgctcacgatgaagcgacgctgcgtaaactggacgatatcgaaggcatgctgcagctattggaattgctcgccggtcgcgaacaggcccggcgtgccgatctgcttccggaatggcaggctttcttgcatcagcactctaaattcgcctctccaagttccgttaaaacaacgctctatgcccggctttacaatctggtcgagcgcgaacttattactcgtgaaggcatgagctacaaaatcaccgaagcaggaagaaagtggcttggcaaagcgctgccagaacggcaaaccgacccgcgcaaagaacttctggatgcagtgaagcgctacaatcaacagcaaaaagagctgttgcgtgaacagatctccacgatgaatccctacaagtttgagcatctggtcggccaactactggaagcgatgggctatgagcaagtcgaagtgaccaaagcctccggcgataaaggtgtggatgtggtcggtaaagtgcaggttggcatcaccaccattaccgaagtggtgcaggtgaagcggatgcaaaacaccattacccgcccgtttatcgatcagctgcgcggcgcattgccctaccacaaagctattcggggcacgcttatcaccaccggaaaatttgcggcgaaatgcgcagaggcggcgctattccccggagccgcgccgattacgctgatcgacggcgatcgcctgctggagctgttgattgaaaacaacgtcgggatcagacgcagtaatgccgttgaattactcgatgtagacttacagctgtttgatgagctggagattgagtag

SEQ ID NO: 101316 - DNA, 1620 bp, Enterobacter aerogenes
atggccaaagcaccaaccaaaaaagccaaagcaaagaaaggctttgaagacacattatgggataccgcgaaccagcttcgcggcagcgtagaatcctccgagtacaagcacgtggtgctgagcctcgtattcctcaaatttatcagcgataagtttgaagcccgccgtcagaagatgaaagacgagggacagggcgatttccttgagatggaagtcttctatcagcaggacaacatcttctatctgccggaagtggcgcgctggtcgttcatcaagcaaaatgccaagcaggacgatatcgccgtacgcattgataccgcgctctccaccattgagaagcgcaacccgacgctgaaaggcgcgctgccggacaactacttcagccgccagaatctggaaaccaagaagctggcgtcgcttatcgacaccatcgataacatcgaaacgctggctcacgaaaccgacgtcgaagcgctgtcgaaagaagatctggtcggtcgcgtgtacgaatacttcctcggcaagtttgccgccaccgaaggcaaaggcggcggcgagttctatacgccaaaatgcgtggtgacgctgctgaccgaaatgctcgaaccgttccagggcaaaatttatgacccgtgttgcggctcggcgggaatgtttgtccagtcggtgaaatttgtcgaaagccatcaggggaaaagccgtgatatcgccctgtacggtcaggaactgacggcgacgacctacaagctggcgaagatgaaccttgcgattcgcggtctttccgccaacctcggcgaacgcccggcggacaccttcttcagcgaccagcacccggacctgaaagccgactatattctggccaacccgccgtttaacctgaaagactggcgcaacgatgccgagctgaccaaagacccgcgcttcgccggttaccgcacgccgccgaccggtaacgccaactacggctggattctgcatatgctttccaagctgtcggccaacggcaccgccggttttgtgctggcgaacggctcgatgagttccaacaccagcggcgaaggcgagatccgcgcgcagatgatcgaaaacgatctgatcgattgcatgattgccctgcccggccagctgttcttcaccacccagatcccggtgtgcctgtggtttatgaccaagtcgaaagcggccgatccggccaaaggctatcgcaaccgtcagggtgagacgctgtttatcgatgcgcgtaaccttggcaccatgatcaaccgcaccaccaaagagctgacggcggatgatatcgccactatcgccgacacctatcatgcctggcgcagcacgccggaagagctggacaagcgcgtgaagcgcggcgacagcaagctggcgcagtacgaagaccaggccgggttctgcaaagttgcgactattgcagagatcaaggctaacgactatgtgctgaccccgggccgctacgtcggcgccgccgagcaggaagacgacggcgtggcgtttgaaaccaaaatgcgcgagctgtcgcagacgttgtttgcgcagatgaagcaggcggaagaactggataaagccattcgccagaacctggaggcgttgggttatggggagtaa

SEQ ID NO: 101317 - DNA, 1380 bp, Enterobacter aerogenes
atggggagtaagtggaaaacatcttttttaaccgaccattacattattagctcaggtctttccaagccagctaaagactttggcacgggttacccgttcttatcctttaaggatattttttataattatttcctacctgactcacttacgcaattagtgcagagtactgataaagaaagagccacttgctcagtaagacgcggtgatgtttttcttactcgcacaagcgaaacgatgcatgaattaggtatgagttctgtagcattaaaagattatgctgatgccacgttcaatggcttttgcaaaagattgcgcccgaaggaatcttctgaattagagccagagtatgttggttattatttgcgtagccctatatttagacagggcatgcttgccttttctacaatgtccacccgagctagcctcaataatgaaatgattagtcggctagaaataagttatcccgaccgtaaaacacaaaaaaagatagcaaataccctactttctcttgataaaaaaatagcactatcaagagcaatcaaccaaaccctggaacaaatgtcccaaaccctgttcaaatcctggtttgtggatttcgacccggtgattgataacgcgctggatgtgggaaacccaatcccggaagcgctacaatctcgcgctgagctgcgtcaaaaagtacgcaatagtgcagatttcaaaccacttccggcggatattcgtgcactattcccggctgaatttgaagaaacagagttgggctgggtgccacaaaactggaatattgaagcattagatagtattgctaattttcaaaacggcttagcattacaaaaatttagaccaagaaataatgaagaacaacatcttcctgttttaaaaatagctgatctacgtgctgggtatataaataatgacgaacgtgcaacggttgatattgttgatagctgcaaggtttatgacggcgatatgattttctcatggtcagggactttgatgattgatatttggactggtggaaatgcagcattgaatcagcatttatacaaagtaacatcacaaaaatatccccaatcattttattttatgtggacaaaacagcatctttcaagatttcaacatattgcagaagcaaaggcggtcacaatgggccacataaagaaaggtgatttaagtaactctttatgtttagttccatcatcattattagtcaataaatatgataatatcgttgagaaatatttcacccaaattaaaaaccaacgattattaaacaatcaactaaccgcccttcgcgacaccctgctccccaaacttatctccggcgagctgtccctggaggatctaccagatttagtaacccaaaccgaacccgcataa

SEQ ID NO: 101318 - DNA, 3264 bp, Enterobacter aerogenes
atgcatctctcattcagtgaagcgaagttagaacaagccattatcgaactgctacaggaacagggctatcagcacctgatcggtgatgatgtgccgcgttcaagcctcgatcacgtgattatcgaagaggatcttcgccactatctcgcctctcgctatcagattgacggcatcaccgaagcggaaatccagcggctgattaagcagttcaccacgctgcccgcctccgatctttacgaaagcaataaaaccttctgcgcctggctggcgaatggtttcttgtttaaacgcgacgatcgtcagcagaaagatctctatatcgaactgctcgataccaggcatctttctgcggcacttcgtgaattattcaatgccgaagaggttccgctgcaacaggcagcggaaccgtcggcgacctatcttgtcaagccgctgaaccgtcttaaggtcgtcaatcaactgaccatctccggcaaagaaaaccagccacgtatcccggacgccattctgtatattaatggcctgccgctggtggtctttgaatttaaaagcgcggtgcgcgagcaggaagccaatattggcgatgcgtataaacagctctgtacccgctatcgccgcgatattccgcagctgtttgtctataacgcgctgtgcattatcagcgacggcgtcaataaccgcatgggaaacttgtttgcgccgtatgagtatttctactcgtggcgcaaagttaccggcaatgaaaaccgcgagcaggacggcatcccctccctgcattcgatgattcaggggctgtttcatccggtccgcctgctggacgtgatcaaaaactttatctgcttcccggataaagccaaacacgaagtaaaaatttgctgccgctacccgcagtactatgcggcgcgcaagctgtactacagcatcgaacgggcgcgtaaacctttcggcgacggcaagggcggcacctactttggcgcgaccggctgcggcaagagctacaccatgcagttcttaacccgcctgctgatgaaaagcgtcgagttcgccagcccgacgatcgtgctgatcaccgatcgcaccgatctggacgatcagctctcggcgcaaatgtgcaatgccaaaaactatattggcgacgacaccgtggtgcccgtcaccagccgcgacgatctgcgggagaagctggctggtcgcaacagcggcggcgtcttcctgaccactatccataaatttactgaagataccgaactgctcaccgggcgcagcaatatcatctgtatttccgacgaagcgcaccgcagccaggtcaacctcgatcagaaagtgatcgtcgataaagaaaacggtaaggtgcgcaaaacttacggtttcgccaaatatctgcacgactcgctgccacaggccacctatgttggctttaccggtacccctatcgacgccacgatggaagtctttggcaacatcgttgacagctacaccatgaccgaatccgtgcaggatgagatcaccgtgcgcatcgtctatgaaggccgcgccgcgaaagtcatcctcgatgcccgcaagctggaagaggtggaaaagtattacgaagagtgcactaaagccggtaccaatgaatggcaaatcgacgaaagcaaaaaagccagcgccaccatgaacgccattctcggcgacgatgatcgccttgaagcactggcggaagactttgctaaacattatgaaaaacgcgtcaccgaaggctcaacggtgaaaggcaaagcgatgtttgtctgcgccagccgcgagattgcctgggatttctatcgccagttgaaagactgtcgtccggcatggtttgaagttaagcaggccccggatggggttgagctgaccgagcaggaagagaaagagctgccgccgtccgagatggtcaagatggtaatgacgcgcggcaaagacgatagcgcacaactgtacgatttgctgggcagtaaagagtaccgcaaagagctggataaacagttcaaaaacgcgaagtcgaatttcaaaatcgctatcgtggtggacatgtggctaaccggttttgacgtgccggagctggacactatttatatcgataagccgctgcaaaagcataacctgatccagaccatctcccgcgttaatcgcaagctggaaggcaaaagcaaagggctggtcgtcgactatatcggtattaagcgccagatgaaccaggcgctggcgatgtattcccgcattgacgccactaactttgaagatatccaacagtcagtgattgaggtgaaaaaccatctcgaactgctggcgaaggttttgcacgacttcgacagccgggcttacttcacaggagaaccgcaggcgcagctggcctgcctgaatcaggcggcagagtttgtcatgcgcactcagaagacagagcgccgctttatggggctggtgaagcgtctgaaagcggcctatgacgtctgctgcggcagcgaagcgcttgcgcaggccgagcgcgactacattcacttttatattgccgtgcgctccatcgtcttcaagctgaccaaaggcgacgcaccggacgtgacccaaatgaacgcccgcgtacgcgagatgattgccgatgcgctgaaggccgacggcgtggaggagctgtttttccttggcgacaaaaaagcggagtcgatcgatattttcgacgacgattatctggcgcgaatcaataagatcaaactgccggcaaccaaaattcagctgctgcaaaagctgctggaaaaagccattagcgactttaaaaaaatcaaccagcttcaggggatcaatttcacccgccgtttccagtcaattatggataaatataacgaacgccgggaagatgatgttctcaatggtgaagagttcgataccttcagtcaggaaatgaccgatattatctacgatattaaaaccgaaatgggtacctatgccgaaatggggattgatatcgaagagaaagctttttacgacattctggcgcatatgcgcgataagtatcaattcacctatgaggatgacaagatgctggcgctggcgaaagagatgaaggcggtggtcgataatacctcgaagtatccggactggagcaagcgtgatgatatcaaggcgaaactgaaggtggagttgatcctgctgctgcacaaacacaagttcccgccggtggcgaatgatgatgtatatatgggcgtgctggcgcaggcggagaattttaagcagcaccatagtcatacgctgcactaa

SEQ ID NO: 101319 - DNA, 2286 bp, Enterobacter aerogenes
atgatcaaattacacgatcgtgggatatatttatcccatcagcatgggattatcccagaacaggaatgcgccactcctgttgccaaagagattgcgcggaagggaaccatcgcctggtcaatattgtcatcgcataatacttctggcgatgaacggaaattaaaaattaaatatgattccatgacctcccatgatatcaccttcgtgggcatcatccagacggccaaggcctctggaatgacgcgctttcccttgccgtatgttttaaccaattgccacaattcactttgtgcagtgggcggaaccattaacagcgacgatcatatttttggtcttacatcagcacagaaatatggcggaatttatgtaccgccgcatatttcggttattcaccagtacatgcgggagatgatggccggcggcggccaaatgatactgggctcggatagccatacgcgttatggcgcgctggggacgatggccgtcggtgaagggggcggtgagctagttaaacaactattgggaagcacctgggatattgattaccccgaagttgtcgccgtttatctaaccggtaaacctgccgctggcgttggtcctcaggatattgcgctggcattaattggcgcggtattcaaaaacggttttgtgaagaacaaagtgatggaattcgttggtcccggcgtggccagtatgtcgaccgactacagaaacagtattgacgtcatgactactgagaccacctgtctgacttctatctggcagaccgatgaagagacgcggcattttttacggcttcatggtagagagaaagattatcgtgcgctgtcagcacaagagatggcttactacgatggctgcatcgagatcgatttaagcaccatcaagccgatgatcgcgctaccgtttcacccagccaatgtctatgaaattgatatgcttaatcagaatttgccggacattttacgtgaagttgaaattgaatctgagaaaatatcgctggggcgcgcgaagctgtctctgttggacaaaatagagaatggcaaattacgcgttcagcagggaatcattgcgggttgcgccggggggaactatgtcaacgtggcgcaggcggctaatgccctgcggcatcattcctgtggcgacaatattttctcgctttcagtttacccttcctcgcaaccggtgctgatggcgttaacgaaacagggaatgatcaatgatttaatgagcgcgggcgccattattcgtaccgcattctgcggcccttgctttggcgccggcgataccccgatgcataacggcttgagcatccgccatacgacgcgtaactttcccaaccgtgagggttccaagccaggaaatgggcaaatgtcggcggtggcattgatggatgcgcgttcaattgccgcgacggccgctaacgggggattgttaacctcggcggcggagctcgattgttggcacgaagcgccggaatatgaatttgatgtttccccctataaaaaccgggtataccaggggttcgttaaaggcgctacccagcagccgctaatctatggaccgaatataaaagactggccggaaatgaacgctttaacggataacattctgttagccgttacttcaaaaataatggatccggtgaccactaccgacgaactgataccatcaggtgaaacatcatcgtttcgttcaaacccgttaggcctggccgaatttacgctctctcgccgcgatccgcagtatgtggagcgggctaaaaaaattgccgctatggagcaacaacgcgttaagggtgaagatctttgccgtttaaatccacagctggaaaatatattttcccagatacggctgctgccgggtcaggaaaatattaccgcggcacagactgagataggtagcatgatctatgcggttaaacccggtgatggttcggcgcgagagcaggccgccagctgccagcgcgtgcttggcgggctggcaaatatttgccaggagttcgcgaccaagcgttatcgttctaatgtaattaactggggaatgctgccgctgcagatgaaagagacgcctgattttgaggtcggtgattttatctatatcccggcaataaaatctgcgttagcgggcgatctgagcgatattgccgcttttgtggtcagcaatagccgagctgtacggcagataacgctttatatggagaaattaacctcgtcggaacaggagattatcaaagccggtagcctcattaattataataaaaatcaattaatcctcgctaattaa

SEQ ID NO: 101320 - DNA, 345 bp, Enterobacter aerogenes
atgttaaccatacgttatttaagccgcgaaacacgcttgctgctggcgggcgtgctgggggttgcgctgctatgggccgccatgacgctgcatgcccattggggagcgtttattcagtggtgtctggcgatgcaaattaccctgcatcgctacctggtcatgtacctgttgcagctcaacgataaccagtacagtggcggcgtctggctgctggttggggcatttctctatggcgtgctgcacgcaattggaccagggcacggtaattcatcgtcaccacgtacctcagtaccaaccaggagagcgtggcggcagcgcggattgtcccgttccttggcagcctga

SEQ ID NO: 101321 - DNA, 1041 bp, Enterobacter aerogenes
atggcaaacaggattctggccggctttttaacgctcttcattagcgtgtccacgatggccgcggagaagggacttttcttcgaccacaatgactgggagctcgcctgtgataacacgcggacctgccgcgcagcaggttatgcagcagaagaaggggtaggctccgttttactcacccgcctggcgggaccaaacgccgtgatacgcggcgaaatcatgaaacttgaacctgaatccgacacggctctcaccgttccccaaccgtctttgtggatcgacggcctatttgtcggcaacctgcgtcagaaaggaaaaggagaagattattggttactgacgccaaaacaggccagcgcaatcgcccacgccattaaaggaaacggcaaggtcgaatttaaaggcggtagtagtacctttctactttccggtaaaggggcctatgccatctttctgaaaatggatgaattccaggggcgcatcggtacgcctggcgcattgacgagagttggcgataaaccggaagctggcgtcaaagcggcactccctgttcccgtcatccgcaaagcgagggtgataaaaagcgaatcgcgcaatcttacagaacaagagttaaccagattgctgcccgccttaacggctagtttatccgcagaggaaaactgtgacgtagggccatcaaatgacccggccgacggcgaggcggcacctattagcctgcagcaactggactcacgacactcgctactctccgttctctgctggcgcgccgcctataatgaaggctatggtttctggctgattgaccatcagctacaaaaaaaaccgcagctgatcaccacgtcaggctccatctatgaagatggtgaaatctttatgagccataaaggacgcggtccaggagactgctggggtatagagaactgggtgtgggatggaaaaatatttcgcaaaagcgaacaaaaaacaaccggacgctgtaacagccttatccttggcggtacctgggatttacctaccctggtcagcgaagtgaagcgctaa

SEQ ID NO: 101322 - DNA, 297 bp, Enterobacter aerogenes
atggaaaaaaaaggtaattggctggtcagaaacataggatgcatttcaacatttattgcattgtatccctggctttgcttactgctggtgcacttaatgaataatggcgttgcagcatttctcggctatttgatggttagctttttattagctatagccaacttaatcatttcaacaatcatcattattattgtaaaaatttccaagccaccactaagaaatggtgcaacattatattttttatgcatgaattcaatatctgtggcgtggatgatattaatgtcactaatttactaa

SEQ ID NO: 101323 - DNA, 222 bp, Enterobacter aerogenes
atgcataaatacctcacacctggcgaaaactcgtctttaaacgcgccaactggattggtcaccgtttcccatcggactggcaatgggctggatatcaaccttaccgcttttctactgactgcatcaggaaagacggaggatgatagcggcatggtgttttttaacgctcaaaagcatagctctggttgtgctatgtttataccacctgaacggctttgttga

SEQ ID NO: 101324 - DNA, 1368 bp, Enterobacter aerogenes
atgcataaattaaaattcggaattatccttacttcattgttatttattaacacttcagtatgctatgcgaaattttattcatgcaaggaatattggaacgatgatggcaagattgagaaaaaatcatgcaacagcagttacaaatcaataccagatagcccctatgtattaaaaaataataaagcctggcttgttgagactcattcttaccggaactatgatggagggcctggttgtgcaggtgtcatctgtggggcaccgaaacttaatatacgcccacaaattgaacgtgaaaaaaaatatttttactctctcaaccttgatatcaatagtgcacatgtaataaatcaaccaaataaaaattgcggatataaaagcacaaattatatagcagataacaacaacgtttactacggtaaaacaaaaataaaaaacgccgatcctcaatcattcaaaatatatgaaatgaaatataatgacatagcctctttgggatgtaatctggcatgggacaagaacagtatatatcaatttggtaaacccctgagtgttcaggtaaccggtgaagtcaatctgatcaatgaatcattaataagcactggaaaacaaatttttgaaatagaaaagcaacaggacaaattaatattcacgcctcgtaacgacatctctcccaatctctatgcgctgccaggtggtctggggttatctacagataatcggaaccttttttactatgggagggcttttgagacgctaccgggtatccctccgactctcgtaacgccagtttgcccggtccccggctttcctcatctggaatgtcaccttcctgataacaatctttctgaccgcatgaaaaatgaaggtaatactgtcattcgaaccggaaacagcatttgggtacaatcacgcaggcagttgcagcgaggagtatataaaataaacataagaccgcaagataaaatctatttttttattaaaggagatgattacggaaacgcttatctcattattaaccatacattatacaacctcggaaactataatataagcgataaatattatagccgtgaccccgtcgttttttcggatttcctaatgtcttataatttcatgtttgttgatcgctacggagttatttatgatgaagcgaatcaaagcatcgataatcgtagaacattgtttaaatgtggtaaaaaaaacaagaaaagattacattgggagaaagataaaaaaacaatcccaggaacatacatactgagcgataaagaataccgttactttatagttaagggtaaattagccaaagttcaggataaaaaaacaaagcagttcatcgataataacaaaggtgattgttcaaaatga

SEQ ID NO: 101325 - DNA, 1383 bp, Enterobacter aerogenes
atgggctactggatggtaaagaataacatttatggcctcgcggattattttcgccgtttgggcctcatcgatattgaggctgccgctcaattctttgcctggttattatgctggcatgactgtggaaagtttgcccgttccttccagcaactctataccaatgacaatcttgccgcggccgtcgaaagccgtcgggactatgaaacaataccgcattcaacgctgggttactggttatggaacacctgtctaagcgaatgccctgaactattccctaactcccggcttcctacgcgaaagcttaaacgcgttattgcaatgtggatgccgttaaccaccggacaccatgggcgtccaccggtggggatgcgcgatctggataattttcttcccactgatattgaagcggcgcacgactttctgttggccattaaggcactgtttccgcgcgttaatattccgccgtgctgggatgacgatgaaggtattgaacagttcaaccagctgtcgtggtttgtttccgccgcggtcgtgctggccgactggacgggctcctcgacccgctttttcccgcgagtttcccaacgcatgccgctggaagtttactggcggaaggcatactcgcaggcagaacaggcgatgcacgtttttccgcctgcagcggcggttgcgccatttaggggaatagacgcgttatttccttttattcagcaccctacgccgcttcagcaggcggtactggatctggatatcagtcaaccggggccgcagttgtttatccttgaggatgttaccggcgcaggtaaaacggaggcggcgttaatcctgacccaccgtttgatgtctgccgggaaggcgcaggggctgtttttcggtctgccgaccatggctacggccaatgccatgtttgagcgtttagctcaatcgtggctggcgctctatcaacccggcgcgcttccaagcctgatgctggcgcacagcgcacgcggcttgatggatagctttaatcagaccatctggtccggcgatttctccggttcggaagagcccgatgatgctcaaccttttagccagggctgcgccgcatggtttgccgatagcaataaaaaagcgctgctggcggaggtgggcgtcggtacgctcgaccaggccatgatggcggtgatgccttttaaacataataatctgcggttgctggggcttgacaataaagtgctgctggccgacgagatccacgcctacgatgcttatatgtcgcggatcctggaaagcctgattgaacaacaggcgcgcagtggcaattgcgtcattctgctttccgctacgctatcgcaacgtgttccccgcgtcagcggggataaaccggcaccatgggcaagctga

SEQ ID NO: 101326 - DNA, 2043 bp, Enterobacter aerogenes
atgcctttacgcaaattgtctctggctgtatttctgatcgccgcgcttggtgcagccagcggccacgcctgcgaatctccattgtcggaatgcccggactatttttttctgactaaccgcgaggcccgcctgctcgaattgccgcagggcaactttgcctttgtcagcagccacctgttaccgcccgacccgctcctgccgcaatggcgcgacaccgccaatgataagctcgccacttccgctcaggccgtccagctgaaagcgatcctcgatagcggctcagtaaaggccgccgagaagatgaccgcgaaccttcccgccgcccagcgcctgtacgcgctcggtgccgttgcgtatgacggcgatcgtgaactagcacgtgaatatttccgccagctgcttgcgctgccagcggagcggcaaggcgaatggggattgaaagcgctttttgcgctggggcaggatttaatacatgagaatccactagccagcttaagcgatctggaagccttgcccgacactagagatattgaggttagccgttctgaatcagcagaggcctttgctctctttcagcaaattatcgatgctgtacgtaacggccaggacgatccgcagttactttccctggctagtctagggcaacaggcccgtatcgcgagcgaaagcgaaacggacgcctttatcgatgaagcccatttttatgcccggctggcagcgcagggatcgctctccagcagcgtacggctatatcaagttgccgaaaatataagccatccggaaaatgaagtttttctgcaaaagcatattgctgacccgcttatccggcagttgcttattgcccatttgaacgccactcctgttgatgcttcagccaatgacggcatctttcagattggcgcttactaccctaaagtggtggcagcgctgttaaaaacggccaatgatgatttgccttcggatgttcatcttatcgccctggcctaccgttacgggcaatattctacggttacgcagctattacaacatgcggaagagaatatgctgacatcatggctgcgggctaaaatggcattgcgtgaaggtgatgtaaaaaaagcgacagtctggtacgaaaaagcggccagctcacttcccgtggaaggagagaattgggtaaacccattcttcaatatggcaatcgaggagtactcatatgagattccgagtgagcgaattagcgccgagcgagcattactggcgttaaaaaataataactaccctcaagcgatggagctgatgtatcgcccaacatactactggcgaggcccgttctggattggcgagcggctactcaccatagaagagttaacggcatttgtagacaaatattttccgccatcagactcgccacaaacgcaaaatccacagcgcgataaggaagatacatacggtatcgaatttcgcaccctcctcgcccatcgcctgatgcgcgatggccagtatcaaaaagccttaccctattttgataatcagcaggaccgccagcttgcacagtcatttgttgatacgcttcccgaaagcggctctaaaatcgaccaagccgagggctggtggcaggctgcggtcattctacgcgagcatggcgacaacctgatgagctattttttggagcctgaccaaaagtatttaagtgacgcaaatacgtacctgtcctgcgcagacgccataaacaatatctctggagtaaattcatgggttggtagcgaggagcaatatcgcatacagcaatcaggaaccaaaccgtttaaccatgtggagcattatcgctggagggcggcaaaatttgctgaaaaagcagccagtttgcttccgcgtaaatctcaggcctatgccgccatactttgcaatgccagcagctgggtctcgagcgaccaacaatcggttaagcggctgtaccagctttacgtgaaaaacggggcgccattcccctgggctgagaaatttggcaggcagtgcccatcaccggatttctctgagcgaaaggttagtgggaaaagctaa

SEQ ID NO: 101327 - DNA, 906 bp, Enterobacter aerogenes
atgaatttaaatattgatgagcgatatgatttcttaattgaaaagtcctttgaaaatgccagaggcatgattaaatacaaatacatagacaatataaacattcgaacattaaataaatggattgataattttcaaagtcgagacgaaaaatacttaagcgcggctattttaaactccttgatattcagaaatgaagagtcaattaagtctataggcgctgatatatttcaaatcatgttgcctcaacttctcgagcaagaaggaatatataaagtaagcaatataaaagactggatgaaactcttgaatggtcgcaattgtagaagtatcccaattagatttacagccattgatgatgtggataacaaagcagttaaaagtagtagtatcatcctgaatacattacaaaaattgttttttgatagcactctaggaatcaactcacatagtgtcacacaaaatcaaaataacaatataaaagctatcattttgtttgacgatataatcggaacgggatcacaactcgaaaacttcttcaccaaaagaaaatttcatgaaagtgatattaaatttatttacataccattctcagccgtaaataaaacatatcaagatcttgaaggtaaatttgataacctagtaattaagccagtagaaataatagacgaatcacatagtttttttactaaggaaaataaaatgctaggagcagttgaaggacttacagaggaagacttcaaaaaattctatcttcatgtgtgcaaaagcaaaggtataagtattaatggaaatcttggatatggcggttttgagttaacctatttattttcaaaatcaacacccaataacaatatttccatgatagtacataaagatgaaaactggaacgaattatttaagaggtaa

SEQ ID NO: 101328 - DNA, 573 bp, Enterobacter aerogenes
atgaatatctaccgtaatcagcgagctggtggggcaaccacttgcgaggccccgctcacgcaaactatcgcgctaagtggcgtattcgcggcgggggcgctgctattgagcgtttcctccatgattggcactctcggtactctggcgtcgctgctgacgctgacgggagcttttgctgttggctatgcaatcgcgcgttggcagccgtggccagcacgttttagccttgcactaatgtgctatgcacttttgctttcgatggttgggtggctgttgatgctgatcgcatggaacggctttcattattggttggcgatgctaccggggatcgtggttagcgcattggctctcggattcgtctggcgtaaaagcaaaatagagagagggttgccgggaagggcggtgaaaaacgcaatagctgcaagcaccatcggcgtgaccatggcggtcctggtaactgcttattgtgccgggccgggagggagtggcttcgcctacgcacttgcggtgctggcggacctgacgctgcttggggcgctggtggtgcgtatcagggaaatggacttcgagtaa

SEQ ID NO: 101329 - DNA, 132 bp, Enterobacter aerogenes
atgggcggcagcgataaaggcattcaccgcttgattgctctcctgggtacgatgaataagcaccaggttggcgaacagttcaggttcattaagctggcagtaacacatacctggaagctgaatttgttgtaa

SEQ ID NO: 101330 - DNA, 309 bp, Enterobacter aerogenes
atggacttacgtcatttacgctattttttagccgtctccgaggaagcgcattttggtcgtgcggcagagcgactgcacatcgtacaaccggcgctcagcatgcagattaaggcactcgaggccgagctaggcggccctctgtttatccgcaccagccgccgggttgagctcaccgaagcgggaaaactgttattaaccgaggctaaacgaacactcgagcaggttgaccacacccgccaggttgtggcgcgcgctccgcggcgaaacggggcgcgtccgcgttggcttcgccggcaatgctgtctttag

SEQ ID NO: 101331 - DNA, 663 bp, Enterobacter aerogenes
atggaaattgcttgtaaccttatcatgctaggatttatatcattagttgaaagctattgccgttgtattatacgcagagtattgattgttgataaacaagcaaggtcattcagtttcaaaaataacgtaagctatgctgcagctgtttatcatgaaaaaagcattttaccagaagctttattagaagatgccacattcatctctgaatcaaatatacttgacaccattaagatatttaccggattacgtatagatagacaaaaatcaccatctgtaatatctgctttgcagaagtatgaacaagtatgccaactacggcattgtatagttcaccgttcaggtttattaggtacaaaaaatgctttaaaacttggccttgaacaacattatacttttttagaaaaaccaattattattagttatgatgcaatacagtctattatttcagtatgtgataatgttgtaaaagaattaaatgatgaaattttcaacctccttcttgatgggattgctcaacaatttgaatggactggagaccttagaaaagataaaaaaacattctcaaaatattttgatgttttttattcttcaagcgcgaatgctaataaatctgctgaattaaaaaaatgttatcgttctttttgcagccattatggtttttag

SEQ ID NO: 101332 - DNA, 414 bp, Enterobacter aerogenes
atggatgtttttgagcgtgggattattaaatttttcaaaggattaagctgggactataaaaccaataacccctgtagtttcggtaagaagaatatcatcagcaatttagtgaaatacgataaatggggctataacctgaactggggctggcagcgtgacaggctggcggattttgaccgaatgctcatgatcctcgagggacaatctatccctgaccgtcgtgcggatgttatccgtcgtcttgacgattacatccgtgagaacaggcacagtactcattacgaagataagatgtttgtgatcaaatattttcaaaaaggaattgcacacatcatctttaatcgaccagagttggtcgataaactgaatgatattatcgcccggcactatcccggaatgctggctgcaagatga

SEQ ID NO: 101333 - DNA, 135 bp, Enterobacter aerogenes
atgatgagaaactacgggattgtaattgccactttgctgttcagcttaaatgcaactgcgaccacttatcgaactgattgcttcggcacgactcgcgatgataaaggtaatagcgctacctgcgataacacgtaa

SEQ ID NO: 101334 - DNA, 3240 bp, Enterobacter aerogenes
gtgttcaaaaaattgttaggtaaatttattaatgataataaagcagttcctgcttcacttgtgccgctttatgcaattaaggcggagggcttcgctttcccctttagtcttgccgacactcaggataactggcttatcacttcatgcctggaacaactccatgaagaggactatgtatcacactggtcggattgctggtttatcagttgggatgacttctatcgtattctgaataatgaagattatgccagcagtctggcaattttcagcttccctcaacagcgtaatctgaccgcccatcttgctgcgacagggagcatcagcgatgacacctttcgagttttcattgataaatggacccagcctgacgattatcgccccgtagaggtcactaacctgggggccagcttttcctccccggaaggcacttttgtgctcagcgaagaaaactggcagcttctggactcactacagcagctcagattacagcagcgacagacgccgggtgagacggtcaaccaaaccgggtgggcaaaaatacgtcgacaggcaaaaaaggcaggagcaaaactggatgattacctggctaaaacgatagttatcaggcccgagtcactgcagttaaagttgcggaaatcactggtggcggatacccgggtactggaaattgagccggtttttgacgaacagcctgcaaagtggctgcagagtttcgatcgcacgcaacaggtacaagatcggtatcgcgttttgggtgatgacggtgaattaagccacgtcattctttcacctgaagtcaaagatgtgctgacctctgtacatgccatcactggccgtcgagttgctggtgatgatgcgctctcgtttgttcgcaatccgtatacttggattggcgaagaagctagccaggtacttgatcccgatgtatatgagcagaatctacaggatgcagggatctatttttatgatttccgtctggagcctcgtgttgatgaaaacatgcaggttgagtctgtttcgctgatcctgatccccaggactgaacagcctgtgccagatgaaacatacgtgtttcatcggccgattgaattggctgcgttgattactgagttggaacaaaaattagcggcgcatcttcctgctggtgtctggcagggctatgacctcgagctgtccagactcactccgaatgaattgcaagagtatcaggcattgctggaagtctggcagcaacaggctgcgggattgaatttttctcacgtactcgatctcaacaagtacagcgacagagttatagggataggtgagtttgagaaaatcagttcaccgtatctggtcaaaagtgaaagtgaaaattggcttccagacaatctcgctaaggagatgtgtgaagctatgttctcgggctgggacctggataatcatcagcattttcatgagctagaaacgcgtctggaagatgcaaaagcctctgatgctcctgaagtcgctatgccctggaacgataaccttctaccacgagaagaagcagaggttttccacgaaaagtggaaaaagaaaatcgatgctgaaacaagtaataccgcgaatactgagccggtgagtcgcgctgtcctgctgatcgaacagaatattgagcaggcactgtatgtcaaacagcggcgaacctccttgctagaagcacacttggctgaagccgagcttccaatgattcttaaggactctattcacctacgtgagcatcagtgtaaaggcgttgcctggctccagcagttgtaccttaaatccccaacagagacagcgggatgtttgctggcagacgatatggggctggggaaaacgttacagattttaaccttcctcatctggcatcgtgagcgtttcccagatgctccgccctctctgattgttgccccggtgtcgctactcgacaactgggagcgcgaagttggtaattttttcctgcgcgagcaggtttcgattttaaagctttacggcaatgaactcagagagaaaaagtgcgctaaggagagtatccctttggcgttaaagagtaaggggattaaaaacctgctgcaaaatgactggattggagaagctcagatcgttctgaccacatacgaaacgttacgcgatcaggaattttctttggctcgccaaccctggtccatcatggtttgcgatgaggcacagaaaattaaaaatccggcagccctaattacccagtctgctaaggcaattcaggcgcaattcaaagttgcgtgtactggaacacctgttgaaaatacgcttgttgatctatggtgcttgtttgactttgttcagccaggtctcttgggggcactgaataattttggcaaagattacctgcggccgatcgagcaacagagtaatgataaggtgcttgaatctctcagaaaattgattgaaccacagacactgcggcgcactaaggaagaagtggcgaaagatcttccgaaaaaaattgaagataaatcctgtaagcagcttagtatgttgccgttgcagcgggacctctatactcactcggtagtgagttggcagaaccaacaggaaatcagcgacggtctggatcaacgtggtgcaggtatgcttggactactccaccgcctgaaactgatttgtgcatggccttattccgtgagtgctgatttacgcttacgtaacgatgccccgaaagtgaaatggcttttggatacattaaataatattcgccagtcatcagatgataaggtcattatctttactgaactgcgcgatattcaacgtgaattgcagcatctggtctctcagcattttggattcaagccttttatcattaatggtgataccagcacgaaatccggaagtgaccaaaaccgtcagagtttgatcgataactttcagtcatcgccaggttttaacgttatcatcctatcgacgatagccgttgggtttggtgtcaatgtacaaaaagcaaatcatgtcatccattttactcgctgttggaaccctgccaaagaagatcaggcaactgaccgggcttaccgcatagggcagcaaaaagatgtctacgtttactatccaactgtgcgtgatagtcagttaatgaccttcgaagagaccctggatgaattactgaatcgacgtagggctctggcaagagatatgctaaaagcttcagccgatctcactgctgctgattttgaagcggtacttacccgggctaatactaattaa

SEQ ID NO: 101335 - DNA, 1725 bp, Enterobacter aerogenes
gtgggtcacccatttacctatctacagcgtgtcatcagccaactcgaaaagaaggtagatgctcgcgcagtccagatggttccccctaaggagaaacgcagacaggcaatttcccggttgcgttcaggagtgacgccactgccatctgaatggaagatgatcttttttggcctcaatgacgttgcagaagatgatctgtttgatacagcactcattaatgatgctgcaaactttgccaaaatctcggctgaaattcagagcaaaattgcacagcaacgattaacgcgtagggagtggctggcgttatgtaccagctactttgggcatgccagcgatacgcccgaagaaaatccgcagtggcttcagctacgcatgcaaattgccgccgggtttgaacagctaaaggagagttcgcctcgctcgttatcatggatgacggtcatcgacacctatggagacatttttaccgataatgcgggctttcttcttgggcaacagctcggtcgtggggaaataaccgatatatctgtgctggaaaaagtggcacagatcccccagaccagttggctatggcgcaaaattgtgaaccatctggtgagcgagatttttcgtcagactgacgatgagtttgaacataaaattaatgaactgatcgcgttgagccgtcagctttctcgttttaaagataatatcctggccgctacacttacccgttattaccagtcaatttttaaacaccggactcaccttgaacttaagctgttagccctggagtattggggaaaccctcagttaaccagccgtaataaaggctggcaggttcatgtcgataacgcggtgctgcttatggtacaggggtggttcgctaaagatgacctgaaactgttctttgagttgcttaaaggtaaccgggatgtcgatcaggcgcgtctgttctactggctacgatatgctaatcagatgagttatacgcgaattgtgttgggtgaagatgctcagcgttcgaaagatatcgattatgttgattttcgggcaaaaaatgccggtcggttaagccgtctacaaggtcccggttctcgcgacaacaatgccatgatcatgaggattgggaattatctttttgtcgaattttcgaaagtaggagctatgtactcttatcatatcgataatgcaccatttaatccggaaacaggtattctcgacattgattacgatcttaaagataagcgtaataaccggcgtaaagtacgtctgcgtttaccgcatttgtctccagtaacgcactattcgcttaaccgtattgaagggtggatgagccgctatgatgaagaacttcgtagactaggcattagctacgttgcggaagattccaatcagccatcagccactatcgatatctcccgttttaatgcagatcaaagcggaggcaggtccgtatcttctcctgctaaatcagaagtcaatgaatcaaggtcaaacagagaagagcagatcaaaattattgcagcttctttaaaagccaaaaaagaaaaccaaaattttacgactcgagaacagcaaatcagggaagtgattcggtctgttgattgtaaagtgatggataaacgtggcatgggtggcgcaattcatattcagttcaacgaactagatcatgaggcagccaagaaattgttaagcctcgggtttaagcctgtgctgggtaaatttacttactggagcaaatag

SEQ ID NO: 101336 - DNA, 738 bp, Enterobacter aerogenes
atgtttaaccgggcattcaatggcaggcagcgtcgtagtgatgaagcggaaaaaccattctggatttcctatgccgacctgatgacagccatgatggtgctatttttggtcgtcatggtggcatcgcttagctccgtcacgcagaggatccagcaggcagaagcaggcgaaaagtcccgagggcatgatatcgcccgtctgtgtgaaaaacttgagttacaggcaaagaacctgaataaaacgatacatgtcgactgccatgataatcgtattagctttggtgaggcaggccgctttgagcataatcgcttttcgctcactcctgaaggcttgaaggctctacaggatgtggtgccgttagtcctggatgcggcaaatagcgatgaaggtaagaaatggtttaaacagatcgttattgaggggtttactgacacggacggctcgtatctctacaacttgcatctctctcttcagcgctcggaatgggtgatgtgcagtctgctggatagcagaagtgcgctacagcaaagaattaccgcagatcaacagttacagattcggaaattatttctggcgggtggcgtgtcgttcaacaatgcgaaagagagtaaagaagccagccgtcgtgtcgagttacgtatgcagttctttggcctgaaagataaaaaacaggacgaaagtatggatgtcgtccccggtattagtcaggaaacctgccaactgggtgcagtgcaatga

SEQ ID NO: 101337 - DNA, 2556 bp, Enterobacter aerogenes
atgttttcgctgacctcgttcctcgacacgttaacctctgttaatccagaaaatgtgccgaaatatgttgttcttgttgtcgcggtgcttctggtatgcttcattgcccgctatgccattccttcttttgtgatttcagcccgctttaaacagaaagcgagagcgattcaactgattgcaaaagataaaccggctcagcaacttgaaaaactggatgctttattttccggaaaatttttcgtgcatccctggagcgagtttaaagagtcgctgcatcgtcagtttgagttagatgaagacagcgggcagaaacggatccatagcattcgttctaccgctccagcttccgcctggttctctgaacctttactggtggagattccactctatacggaagcctttaagcatttgcctggtatcctgactgggattgggataatcgggaccttctcaggcctaatgatcggcttgcaccactttgaccccagcactccagaacaagtgagcgccagcgtagctaaccttttgcgtgatgttctttacgcatttttaggctccgcctttgccatcgctttttccatcctggtcaccatctttgaaaaatggcgtctggcgagatgctataaaaatcttgagttgctgaccgccagcatcgaccaactttttgaaggtggcgtcggtgaagattacctttctcagctcctctccagcaccaaagaaaacaccactcatgctaaacaactgaaagatggtctggtcagcgatttaagagagatgctgcagaacctggtggatagccaggttcgagaaaaccagaaactggcagagacgttgtcttccacctatcgggaatcaggccagcagattgcggagcaggttagcggcgctattgaaaccagtctgaaaagtccgttggacaaaattgcgggcgtagtgcaaaccgcctccggcgatcagagccatcaagtgcagtcgatgcttgagaacgtccttactgcttttatgaacaaaatggataatacgtttggtcagcagttcaccacgatgcaggagatgatgggccgttctgtggaggcgatccagagcatgcaaagcggtttttctaccctgctgcaggatatgcgtcaggctggggatgattcgcgtcagggcagtgcccaactgatctctcagttactcagcgaaatgaaaagcggccagcaagagatgcaggcaggtatgaatgacatgctacgaagcctgcaggaatctgtagcccgcattggcgcagaaggtgaaggcgctggcgaacgcatggcccaacagctggaaaaaatctttgccgacagtgaagcgcgtgaaaaagcgatggcggaacagatgcgtgcctttattgaagccattcagtccagtgttcaacagggacaaaacgaaactatggagaaaatggcggcctctgtggatacgcttggcagccatatggcaaccttgttcgcacaactggaaaatggtcagcaacaacttaatcagcagcaaaatcaggcacaaaatctgttgatgagcaatatgagcaaaggtgtagaagatctgactcaaaacctggcaggtgtatttagtcagcttgagtccggacaaaaacagatgagccagacccaggaacaaggtcagcgtgctctgtatgaagagacccaacaactattagcccgtagtgaagctcgcgaacaggcggccgccgagcaacaacaagattttatggccgctctgcaacaaactatgcactccggccaggatgccctacgtgagaaaatgaccagcggtatcgatcaattaggtagccaattgggcaccctgtttgggcaactggaagaaggtcagaaatcccttagccagcaacagcaatcggctcagaatgctctgcaacaggaagctcagcgaatcattggccagcttgagagtcaggttcaggcgttaatgcagatgctgcgtgagcagcaatccgcatcaggtgatttactgcaacggatggcgcaaaacacgacgcgtcacctggaagaaattcaggctggtgccgataaaatgcgggtcgctgccgatcgctttgaaacagcggggaatcgtgtcgccgaagctaataatctgactgcagaagttctgaatggcacccagcaagcaggcagaaccctttccagtgccagcgctgagctaggcgcattgatcgctgactaccgcaatacccgcgaggtggtggcgaatgccattagcgcactggaaacactgatcaatagcagccatgacgagcaaacatcccgcaaccggtttgtggaagatctgaagtcgtattccgaacgtctgcagcaatacaaccgtgaagcccaagagtttctccacaacgtcgctgaggtgatgggcaccagctttgagtccttcaccaccggggtagaaagcggtctgaaccgttcgctccaggagatggatacacaactgacaaaagcggcgggggcgttaagttcttctgttgaaattatcggtgaaagcgttgatacgctggaaaccgtgctccgtagtcgtcgcgcgtaa

SEQ ID NO: 101338 - DNA, 198 bp, Enterobacter aerogenes
atgacgcgaagctacaaagatatcgcccaatttacggcaggctcgcacattagccgtatccagcaaagcgcaggtgggcacgcctttcggttctatgcgaccgagcagtttctggtcggtgactggcagtcaagtcttgtgactgggatacttacatacggaacgttggaagaagcccatagcgacatttttgaataa

SEQ ID NO: 101339 - DNA, 288 bp, Enterobacter aerogenes
atggccagtaaacagtacacactcgaattccgcgatgaagctctgaaactcgctgaacgtatcggtgtcgctgccgctgcccgtgaattcagtctgtatgaatcgcagctttatgctgggcgcagcaagctaaagaatgaccattgttcttccgaacgtgagcaggaaatgtctgttcgtaatacgttaaatgccatggtggaggccaataataaaaccatagcagctagcggcaaaagaatatatccaaacagcgtccattatattttttgcgtgagagttttctga

SEQ ID NO: 101340 - DNA, 228 bp, Enterobacter aerogenes
atgaaagttaattttcacaaacatcctgccgtcgatttttctctgagactgacgctgacggtaattatcatatctccggtgatttatttctcctgggatgccgtcaaagggacatcggggagtgattatgttgagagtgtggtctttattctctgcatgggcggtgtcgggcttatgaattatctgtttttttcggcgctgaccagacttttacagaagggaaaataa

SEQ ID NO: 101341 - DNA, 282 bp, Enterobacter aerogenes
atggctgcgtccttgatggtcgttgttttgcttgtgctctttcttttcattccggcctgtatcgccctgttcatgtcaggccgcagtctgctcctgatattcctgggggccgtggcgtgccaggcggctgttgccgttgcgtttgcaggactgtctgcccggggatggtctgagtcgatggggatgggggcggcatcactcattttctacgttatcgggctgcacaaggctgacggtgtaaaacagaatactcataacgggagagaaaagaatgaaagttaa

SEQ ID NO: 101342 - DNA, 648 bp, Enterobacter aerogenes
atgaataaagaaatcaccgggctggcctgggggctgagtctgctctgtgcgacggcgtcagccgctgacaatatgaatacgcccggggaccagcagtggctgaaacagcaggagaacctcagcgaacagctgcgccagcatccggataaacagctgcagcaggagcttgaggcgcaaatcagccgcaatcctttgcccaaatctgaccgccagtttatcgataatctggtcagccagcagaaagcggcgaatcaggaaaagccggcagaaggggcgctgtactttgtctccttctcgatacctgaagaggggctgaagcggatgctgcacgaaacccggcagtacggcattccggcgacactgcgtgggctcatcaataacgacatgaggaccaccactgacgcggtgctgcagctggtgaaggatggcgtgaccgacggggtgcagatcgacccgacactgtacacgcagtacggcatccggagtgtgccgtctctggtggtacggtgtcaggccgggtatgacgtggtacgcggtaacattcacgtcaaacaggcgctggagaaagtcgcacaaaccggtgactgcgcacaggtggccctgcagatgcttgatgcgccctcaaatgccgccgggagccagccatga

SEQ ID NO: 101343 - DNA, 612 bp, Enterobacter aerogenes
atgaaaatatcaaacatgtatgattgtgaccctgtaaatgaattcgcttatgttcgtgagaggttaaatggcatttttcttcgcctctcggaagaaccctttatccgactgagtaaaacaagaatcatgcaacgccatctctcggacatacagtggatgttgaaccacaaccattaccctacaccaggacaggtcgatttttttatcagcctgttgcgggatgataaattcagtgtggtcagagaggaagggcgatacacaaaaggtgcagcagatattcagctgatgatcgatgcactaaaggatatccgggattttttaaaactgattacccagtatgaaacagagggggatattatcaggctcacatcgtgttcagcctggaaaaatacagcgttatatctctgtcttgctgctttctttgctttgtttatagctcaggttgttatattttcaggctattcccccctggctgtttactttagtggttttgccttgttttttataacatctctggctctcgaaaatgaagtgctgatattttctttcatcggtctggttgtctttactctgtgtatccttttggcatggacaggtcattatcccggataa

SEQ ID NO: 101344 - DNA, 543 bp, Enterobacter aerogenes
atgttgaaggactatgcgtttgtgaaaacgtcgatacatacagtcggtatgaccctgaagtctccccctctggcatcgataccgggtatatcagacgcctctcaggcatgtgataaaatctctgccaggctgcgttatggcatcattccccgaccgggggggatcaaccgtctgaatgccatattgtggcttgcaagaatgcgagaggtcgagattcatgggcagtcatcagcgacggcacatgaacttcggcggctgaatgctttgctcgggcaggtcagcggtgtgctcaaagcatgctggatttaccggggatgggaggcctcgcgtgcatcgactatagtgtccattctgctgattatccctgcattcctggtattttggctggcgctatatgtcgggggggcgattctgttctgttctgtcagtatggcgttgtttcttggtgttggcgtcgtggttaacgtatggatcaaagatcctgtggggctgttctggtcgctgtacagctatatccctttatatgccatcatctatatgtga

SEQ ID NO: 101345 - DNA, 177 bp, Enterobacter aerogenes
atggaaaaaaaacagaaacaatacgactcacaaccggttcagtctcagaagacttctccatgtacatcacgggtcactttcagcatggaagaaaaggtactaacggctgagcaatacagagactggcaattcattggcgaaaccctcagagataaaatcagccgatacgcggaataa

SEQ ID NO: 101346 - DNA, 603 bp, Enterobacter aerogenes
atgactgatatcagtacaaaaaaggatattgaatacataaaggccgtttttaatgacctcagtgaagcgttaacgcagatggcatatggacaggttgttctgcccgtcgatatcaaagggttgctttctgacattcaggcgtctctgattaaaggacgtctgccatgtgccctggaagtcgactgttttgaggaaagccttcttttgttcctccgaagtgtcaggcagcaacggcaaagcattgtctgcaccactgaggtggacaggcaaatggccagactcagggatgtcagatactttcttgttgtgttaacaggatatcctgagagagtacaagaaccaccccggttactgtggagatggcgggatattaaaacgctgtccgtgctcttcctcagtgtagtactgtctttttgttctgtcctttatctcgcctcaggtaataatggtgctgtgcatggtgtttattgtattgcgataattttattttctatttcaatatatgcattagaagagtctggggttggtggtgtggtgttttctctctcgggggtgaccatttttactgttgctgctctttgcgaatacttaccgcctcaataa

SEQ ID NO: 101347 - DNA, 549 bp, Enterobacter aerogenes
atgaagcataagcatctggattgtttgatgcaggacttacacaatatcagccagatgattgccgatgatatcctgcaacgttcggaggctgccagggaggtacaggaagtgctcgataccatgcgaatgacactattaaacaaaaaatgcccctcttcgcgcctggctgagtatgcggtctgtctcctgcgggcagaacgatatcgacaggtgcggatttacggtaaatcgttaagagaagtcagggatctcagcctgtggattacaggactgaaagccttcagacggagactggagaaaacagaggaaacctggcggtaccgccagtgggaagcaagccgtgctgcatattcgctggccggattatttattctgccagcgtaccttattttctcccttgcggtaggtgtcggttgcgacttatggataagctcggtcatcctggggggatatcttttctgtttaactggcgtggctgtccgggccaaagactgcgtagccatttactggtcgttgtacagtttcattcctctggtaatgctgaattga

SEQ ID NO: 101348 - DNA, 2640 bp, Enterobacter aerogenes
atgagtaataacattatcgatgccgtcacccaggctgtgaattcactggtgtcagcactgaagctgccagacgaatccgcgaaagccaatgacacgctgggcagcatgaatttcccacagttcagccgtattctgccctataaggattatgattccgcgaccggtctgtttattaataacaaaaccgtcggttttatgtttgaggcgcgtcctttacccggtgcggataaaagtatcgtcgccacactggagcatttactgcgcagcaaacttcccaggggcgtcccggtcagttttcatctggtctccagcaaactggtcggcaatgatatcgactatggtctgcgtgaattccgctggagcggtaaacaggctaaaaagtttaattccatcacccgcgcctactatctccgggcggcggaaacacaatttcccctgccggacaatctggatttgcccctgacgctgcgaaactaccgcgtgtacatctcctgctgcgtgccccggaagaagaactccaccacgcaaatcgtggagctggagaatcagattaaagtgttacgggcatcgctcggcggggcttacatcccgacgcgtatcctcgatgcggccgggatggtcgaactgatgcgggagctgattaacccggatccgcatgagatgtaccgggtgccgtacaagctggacccgtatcaggacctgaactatcagtgcgtggatgacagctttgatatgcaggtcaccgccggtcatctgaaaattggccgcctggggcgtgacgggaaagagtgcgtgacccgggtgacgaactaccacctggagtgtgatccggaaatcgcctttctctggaccgctgcagacaactacgccaacctgctgaacccggagctctccatctcctgcccctttgtcatcacgctgacgctgatggtggaggaccaggtgaagacccagaacgaagccaacctgaaattcatggacgtggagaagaaaagcaaaacctcctacgcgaagtactttccgaacgtgataaaggaaatgcaggagtggggcgatatccgccagcgactggcgaccaaccagacctctctggtgtcctacttctttaacatcaccacgtataccgccgataacgcagaggcctctctcgctaccgagcagcaggtgctcaacagttaccgtaagggtggcttccagcttatcccggcccgctatcatcacctgcgtaattttctggccatgatgccgttcaaatgcggcgaaggcctgttcaaagagctgcaggcggcaggtgtggtgaagcgtgcggagacgttccaggtggccaaccttctgccgattgtcgctgacagtccgctggcgccggcaggactcctggcccccacctaccgtaaccagctggcgttcatcgacctgttctatgagggaatgaacaataccaattttaacatggcggtctgcggcacctccggggcgggcaaaaccggtctgattcagccccttattcgcagcgtgctcgactccggcgggtttgcctgggtgttcgacatgggcgacggctacaagtccctgtgtgaaaacatgggcggcgtgtatctcgacggcgactcgctgaagtttaatccgttcgccaatattctcgacgacgctaactttgacctgtccgccgagcgtatccgcgaccagatgtcggtgatggccagtcccaacggcaacctggatgaagtgcacgaaggtcttctcctgcaggcggtccgggcggcctggctgagtaagcgcaacaaggcgcgtatcgatgatgtggtggcctttctccggagcgagaaagacagtgaggaatacgccgactccccgggagtgcgcagccgtcttgatgacatgattatcctgctcgaccagtacacggtgaacgggctgtacggggaatacttcaactccgatgagccgtccctgcacgacgatgcccggatggtggtccttgagctgggcgggctggagtcgcgccagtccctgctggtcgcggtgatgttctcgctcatcatctatatcgaaaaccggatgtaccagtccccgcgcagcctgaaaaaactcaacgttatcgatgaaggctggcgactgctggacttcaaaaacgaaaaggtggggacctttatcgagaagggctaccggacggcgcgccggcataccggggcctatatcaccatcacccagaatatcgtggatttcgactccccgaccgcatcgagcgccgcacgcgctgcctgggggaactcctcgtacaaggccattctgaaacagtcagcgaaggaatttgccaaatataaccagctgtaccccgaccagttcagcaagctggagaaagacatgattaacggcttcggttcggcaaaagagcagtggttctcctcctttatgctgcaggtggaagcgaactgctcctggcaccgcctgttcgtcgacccgctcagccgggcgatgtactcctcaaaaggcccggattttgagtacatgaaagcgcgccggcaggagggggttgatatccacgatgcggtgtacggcctcgcgtgtcgcaactttaaagaagaaatggctgagcttgaatcccgaataccggtgaatgacatggaggataaacagtga

SEQ ID NO: 101349 - DNA, 390 bp, Enterobacter aerogenes
atggacagacaacaagaaattgaagagcgctcccgggatttaataagaaaggccgatgaaaaagaaaggcaagaattgaaacgttttaaactgcgatatggtatttttttggtttttctttttcttgtgccagctggatgtttttttgtgcagtatgaagattttcgcgatatgcagcccgccactccagaacaactgcaaagtattattcatgacacaccttgcgcgggtgaggcttttcggatggctcttcaaactaatactgtcacttcgtcagcgacattaacttttggtgacgcaaaaaagatggcatcagaatgcaaggataaagaagagattaaagcagtacgtgaaaaacaacttaacgcactgaacgctatgagcaaataa

SEQ ID NO: 101350 - DNA, 291 bp, Enterobacter aerogenes
atgaaagtaaacgtcgcgagcgcggttaaaaacattgttaactgggcctttccactcttttttttgggtggtctgctgtatcttgtttacgatgattacagagataacggtacagcgactgaagaacagttattaatgatttctcatgaaataccctgtgccggtgaggattttcgaacggcactccgtaatagcccgggaccattaacccttcgcgatgcgaagaaaattgccgctaaatgtaacgagaaatataaacaacttaacgcactgaacaatgtgagcaaatga

SEQ ID NO: 101351 - DNA, 285 bp, Enterobacter aerogenes
atggatgaattattcaaatggctgcttgcttttgtattttcagtatatctcttgctgtttgtattcagtaatgaccctgtaccagaaacgctcgcacaccactggactcatgactgccgcttgctggagaagaatattgataaaggtttattgtctcccacgcaaaaccggcttcagtgtggtgatgtcattgaaaatgtcagtgcagatgagtatgaacaggcgataagcgggaataagccggttaccttacaggagttaatcgaagggatattcagtcgttaa

SEQ ID NO: 101352 - DNA, 411 bp, Enterobacter aerogenes
atgactgactcaataaaatatctatggctgcttttgcgcgaagattcgtcatatatttttatgttgatgttgattgttggcactgccgtagtaatgtctttctttttgcagaggttgtttgtgtcatggtggggtaagtcaatcattctgataatgtgtattgtcgtcgcgattacagaagtttttggctttcttgagcctgagtcaacatataaacagattcaaaccagaaaacaggatgtcatctatacgctgaaaaactgcagaatctccgcatttgaagcgcagcaggcagggtttctggctaaagcgaaagatggctggtcttgtccggatggcgtaacacggtatatggatgtgagatacagggataaggcagaggttaataaacttagcacggagggtaagtaa

SEQ ID NO: 101353 - DNA, 486 bp, Enterobacter aerogenes
atggctcaggaatcacagactgaacagtctcgcgcttacttttaccgcaactttacgtacacaatcgaacatctgacccgggattatcaggctgaactgcagcgttattctgattattcgtgggaactgcctcagcgagccgcacgcctcagcgcagcagttaagcgctataaaacgtaccggatgctgagttttatttttgagatagctgacagcatcgatctggacttaaccccgcttattgtaaagcgcctttgtatgcgccttttcggccgctcgggtagccaggacataattgttgccacttttgggcagaagggtcgccagcaccgcagccgcgataatacgcctgccatcctggatgaaatagcttcccgctaccgtcttgccgcatactcctgtcaggcctccaccctgagtgatattgcaagtgtgaaaaagcactatcagacaggcatccgtgcagcacggaacagggaaaaataa

SEQ ID NO: 101354 - DNA, 924 bp, Enterobacter aerogenes
atgactaaaacaaaagggttacctcgtccgctgacgcactacgcttggctttccattgccacggctattgccactatcggactcaaaggtgtggcgtggaaaatgaccggttcggtcggtctgctatctgatgccatcgaatccgtagttaacctcgcaggagccctaatggcgctctggatgctgaccttggctgcgcttccggccgatgagaaccatgcatatgggcacggcaaagccgaatatttctcgagtgctttcgaaggatttctgatcctattggcggcagccagtatcgcctataccgcagttgagcggatgttaactccacagccgcttgaggagattggtctcggattactggtttcaacagtcgcatcaatccttaattttgtgacggctctcattttgttaagggctggcaggcagcacaactctatcactcttgaggcagatgctcatcacctgctgaccgatgtctggacgtcggtcggtgtcatttttggtgtcggactggtttatctgaccggctggttttgggtcgatccgatcgttgcattgctggtcgcagccaacatcgtttggactggttatcagcttatgagtcgttcagctgcaggtctgatggacgtatcgctacccacggaagaactcaaaaaaatcgagtcactgctggcaggatatcgtgaacaggggcttgatttccatgcactacgtacacgccaggctggcgggcgggcgtttatgacaatgcacatcctagttcctgggcgatggactgttcaatatgggcacgactgggccgagcgtatagagaatgatatccgcaccgcactgccttttatccatatcaccactcatgtggaaccgttggaagatcccgcgtcaatgaacgaccaaacgctcgacatttctgatcactaa

SEQ ID NO: 101355 - DNA, 573 bp, Enterobacter aerogenes; identical to SEQ ID NO: 26658

SEQ ID NO: 101356 - DNA, 261 bp, Enterobacter aerogenes
atgcatatgtcaaagtggaatatcgcctctttttcaaaggaggagcaggacaaagttgccgtcgataaggtggctgctgctgttgcctggcaggagcgcatgaacaagcccgtcgtgccggaacttgttgaacgggaacagcctgaacacctgcgcgaatatttccatgaacggctccgcgtacatcgactgaacagtcagcagctgccgcgcgcaaatgcgcccgaatataataaacccggagatgagcagcagaagtga

SEQ ID NO: 101357 - DNA, 276 bp, Enterobacter aerogenes
gtggcttctgtttctatcagctgtccctcctgttcagctactgacggggtggtgcgtaacggcaaaagcaccgccggacatcagcgctatctctgctctcactgccgtaaaacatggcaactgcagttcacttacaccgcttctcaacccggtacgcaccagaaaatcattgatatggccatgaatggcgttggatgccgggcaactgcccgcattatgggcgttggcctcaacacgattttacgtcacttaaaaaactccggccgcagtcggtaa

SEQ ID NO: 101358 - DNA, 192 bp, Enterobacter aerogenes
atgaaacttgcaccacaaagccgcggtatcctgcgacagtacaaagccctgattaatgcccgctgccgtgatggcggtcagcgggaactgaccaccacccaggtgatggatgaaatctgtgaatacatgatctgtcagtgtgccgtctatattggcggccatttcatccttcaggggggaaaggcacgataa

SEQ ID NO: 101359 - DNA, 429 bp, Enterobacter aerogenes
atgcagtatgtgaatacatgcccagccctgaatgttgaagagtctgaccgcctgtccttcatgccgtacctgttcggcacggattttatgctcgcagaattacaggtgtacgccctggccaaaaaatggatgcccggatatgagggcggcttatggcatttcatccgcctgccggaggggggcagctacatgatgccagacagtgggagggtacatctggttagtggcgaaaactggtttgatcgcatggtctgcgccgacgcagcgggcattattctgaccagcctggcgattaatcgccgtctggcggcccatcctgacagcagtaatccggcactgacccgcctttatatgctgcgtgatgcccagctctggaatcacatcacctttcacccgaaatgcagtgctatttacgccgcgctggactga

SEQ ID NO: 101360 - DNA, 549 bp, Enterobacter aerogenes
atgacccgtcatcatccgagtgatccgcgcactgcgctcttgcaacaccgctggctcaaccgcctgcagaccgggctgttggtcctgaccctggtcgggatcgcagccgcagcagggagactgccatttggggaaggctgcctgtggctcgcgctgtttgccgttgcaggtgcgttgctgctggaaccggtagccgcgtcggcgctgagcttgcgcctgtaccgcgtacgggccttgcacccgcaacaagcccacgagatgtgggccctgttgcgcgagctgcccgcccgtgccggtttgcccgccacgccggtgccgcactatgtgcccagtgccgtcgtcaacgccttcgccaccggatcgaagcaggaggcatcgatcgccctcaccgatggcctgctgcgcagcctgagcccacgcgagctggcgggtgtgttcgcgcacgaggtcgcgcacatcgctaatgaggatctgcgtgtcatggggctggcggattccgtcagtcgcctcacgtgcctacccggcccggtttccgtgccttttgagtga

SEQ ID NO: 101361 - DNA, 498 bp, Enterobacter aerogenes
atgaaatcaaaacgccttaacccatttcaggtcttgcgtgaccaattggccatcatgagtttttacgagcgcttcgagcaggtcgtcgcgctcgtgctgtcggcggtgatcgccgtcatcatcatggtgtcgctgttccagctcatctccatcgtcttcacgctgctggttctcgatgccttcaatcccctggaccacaaggtattccagagcgtgttcggcatgatcatgacgctcttgatcgcgatggagttcaagcattccatcgtgcgcgtggcgctgcgtcgggacagcatcatccaggttaagacggtggtcctgatcgcggtgatcgcactctcccgcaagttcgtgatcctcgactccgacgcgagccccgcaaagatagccgcgctggcaggcgccacgctggctctgggtgcgacctactggctgctgcgcaagcgcggcgaccgcgccgccgagacctctgagcatgacccgtcatcatccgagtga

SEQ ID NO: 101362 - DNA, 1710 bp, Enterobacter aerogenes
atgcagggcttgctcggcactacgctaatcctgctggcggcttgcagcctggcggcgatggcgacggcggcgttcagagtgcccgccttgctggggtatctctctgtcggcgttgtactgggcccctcagtcatcggcgtgatcgcgccgggggagacgctgagctttctgtccgagctgggcgtggcgctgctgttgttcatggtcggactggaattctccctcggagacttctggctcgcccgcaggacggtgctgatggcgggcgctctgcagatgatcgccgtggccccgccgctgatcctgctattgatgtggctggggcagcccggccagagcgccgcgctgctcggcactgcggcggccatgtcgtccacggcgctggtcagccgacaactggccgaccaaggcgagctcaccacccgccacggacgcagtgccatcgccgtgctggtctttcaggacctggccagcgtgcccctgctggccttgctggcgatctgggcgcgcggcgagtcgccgaagatcgagcatgtgctgctcgaagtattcggtgtgctgctgctgttcgcggcagcggccctcgtctcgcgccgtctgttgcatggcctgctgggctgggtggcgcggcggggccacgaggaatcgttcgtgctcgtctccttgtgcgtggtggtggctgccgccgctgctgcgcacgcggtcggcgtatccgccgccctgggggccttcctcgccgggatggtgctgggcgagagcgacttccggcaccacatggaaagccacctcaggccgtttcgcgatgtgttgtcgggcgtgttcttcgtgaccatcggcctgcaactggacgcagcacagattctttcggcaccgctggcggtgctggcgtggctggtggtgctggtactggtcaagatcctgctcaatacgctggccttgcgggcgacgcgcctgtccgccctcgatgcctggcgcacgggcatagcgttggggcacggcggcgagttcgccctgctgttgttgggcacggtcttgcagcagcatctgatccccgcgaccgtcgtccaacccatgctggtcgcgctggtgctcagcatggccctggcaccgctactgatccgccatcacgatgtacttgcccggttcttgagccgcaccggcggcgtcattcagccaccccaggctgaagaagtcgagatcgccgcgcagacgacgcgatatcgagaccatgtcatcgtttgcggcgcgggcgagcttggcctgacagtcagcgagattcttcgccacgccggcgtggcgcatctgctgctggaggcggacgcgcagaaggtagaggccgcgcgtgccgccggcgcgccggtgttccatggcgatgccagtcggcccgataccttgctggctgccggcttgacgcatgcgcacttggtggtgctaacgttcgcccatgcccagcaagcgttgcgcatcgcccaggcgattgccgagcgccgtccggcgctaaccttgtgggtgtcatgcagaagtacgaccgcggccgatgcatttcgcgccatgcctaacgtgcgcgtgtatcagcaatcctttgccgcagctattgggctggcggaacaggtgatgtcgacgcttggcatgtcgaccgagttgattgaaggacacatcagcgcaatgcgccgccgtctcgacagcagccgttttccagggagttcatag

SEQ ID NO: 101363 - DNA, 441 bp, Enterobacter aerogenes
atgaagaatgatcttcacctcgtctgcccgcattgccagtccatcaaccgcgtaccgactgcgaagctatcggaacatcccaactgtggccgctgccagcagcccttgttcacgggcgagcccatcgagttgaccacggcgacgttctcgcgccacgtggagcgcagcgatctgccgctgctggtcgatttctgggcgccatggtgcgggccgtgcaagatgatggcgccacagttccagcaagcggcgcaccagctcgaaccgaggatccggctggcgaaggtgaataccgaggctgagccccacctggccgcgcagttcggtatccgcagcatcccgacgctcgccctgttccagggtgggcgggagatcgcccgtcaggccggcgtgatgggcgcgcaggacatcgtgcgctggacgtcgacgcaagtgggacgctga

SEQ ID NO: 101364 - DNA, 1146 bp, Enterobacter aerogenes
atgcagatacaatatagctatcgagctatcgacaaagagtttcatgaaccttggcagagagctttgggaaatgtgatcgagcacgccctcaagccattgctcgacaaacacactaaagattcagcgcgacttcaaatcgtccttgatcgcgacaagatcaagcggcaatttctggccagtggctatatgcacctgcccggcaaaaagattgtcagcgttactgcatcacatgacgagctgacgcccctcgcgcagatgctcgcacagtcgttgttccgtcaggccaagaagcattttgaccgactgcatgctcaggatcaaatcaagcgcaaagcacgacgcgagcgcttgcgcgagctcaaggtgcggattgccgcaaaacccgcatcagccgcccatgaggccgaggtgacccgaatgcctctactgtcgaaacttgaggctgtcgcaaggcgtgagctggcttatctgcgggccgtcggcgatttaccgcgcgattatccgacgctgcgcgacgtggtggatgaagcgattgtccgagctaaggtggaatggcaatccgtgccgggggaaaaagaggcttacaccggtcttttgaagcatctgttcgccgtcctggataacgaagtggcaagcagccggcaatttggcgaattcgtttctctggacgcgccggtcgaaccggatgcccaagacgtggccgaggccatggtggaagaggaaatcttcgaattttatcagcacgatgacacactcaagctggccgatattttcgctggcagtcagcatcccgatgtcgcaacgatcgcggaacaggaggagctgattgatcggtcgagcgagttcgcttttgcatttgacctgctgaaggacatgccgcgtttgtggcggcgcatttttctgcttatccgtgtggacgggctgaatgccagcagcgtctctgaaatcctgctgattcctagtaaggaagatgctgtccgaaggtggctcatgcaggccgaagcattcatcgctgctcatctggaagaggccggagtaagcaaaaacgggaacgattggctccaaggcgttgattggtcggcattgtctgtgacccgaagcgaggcagcctcactgtggtccaaggaggcgaaccatgaagaatga

SEQ ID NO: 101365 - DNA, 612 bp, Enterobacter aerogenes
atgaaaacagacaccatcgccaattccaatgcggatgaccccaccaaagcactgtgttcgctgagccaaaattggtggctttttgtgctgcgcggtgtcttggcattgatttttgcagccctcgcgttctggatgccacaatcggctctgttggccatgaccatcatgttcggcgcattttccttggtcaatggcgcgttcaacttgtttgcagcggtgcgccatatccagaaaaaagagcgctggggctggctgctgttcagcggcattgtcggcatacttacgggcgtcgtcgtcctggttgctccttgggtcgccacgatagtcttggcttcttttttatgggctagcgtgggcttctgggcgattttcaccggtgtgctggagatatccgccgccgttcggctgcgtcgggaaatcaagggtgaaatctggcttgccctcagtggactgctctcgattatccttggtgctatcgtcttgtggatattttttacccgtccggtcgagtcattcgtggccgcaggctggctgttgggtttccatgcggcagtctatggcgtcacgcttttgttcttgagttggagtcttcgcaaaacgcgcctggggtaa

SEQ ID NO: 101366 - DNA, 888 bp, Enterobacter aerogenes
atgaatgagcaaacaccgaatcccaatgcgacgaacgaaggaaaaaacgaacaggccgcggtaagcagccttcctgtcagtccagagtccaagcctgaagtcgtcacggaggtacagcctgaggttcagaaagaaacggactcgcaggcggcagacaaacgtaaacaagtcctcgatgaggcagtctcggccttgtcgctgaccaaatcagcgctggccgcacttgacggcaaggacactgcacgcgcattggcaacgctggccgaagtgacgggaaagctggagctgatcgtcgcgcgcgaacccacgctcgccctggccggcgttgatgtgcgcaccatcgtgcacgacttgttcgccaacacggaaaccattgaggcgatgaccgacgaggcgctggatgccctcaaacatggcgaggtgcaacaggctcgccacgtgctggctttgctggccagtgaaatcgtgatcacggtcaccagcatccctttggcgtcctatcccgcagccgtgaaggcagtcgtgccgctgatcgatcagggcaagatcgaagaagccaaagccgcgctgcagtcagcgctcagcacgctggtcgaggagcgcagcgtgcttccgctgcccgtcctgcgtgcgaagctgctcctgaagcgcgccgagcccctggtagaagatggtcagcgcagcgaagcatccaatgagcgcctcgagacattgttgaacgaagcccggcagcagttggaaatggcagaactgctgggctatggaaaaaggaaggactttgagcccctgtacgctgaactcaagaaaatcaaggaaaagacgggagggggaggctgcggaaaaggctggctcgatgaagtcaaggcaaaactgtccaggttgttctga

SEQ ID NO: 101367 - DNA, 915 bp, Enterobacter aerogenes
atgaatatcaaacagccacaatacaccttctccgcacttgccctggcggtcgtcgtcggactgagcggaccggctctggcccaatcggcggcaggttctagcccaggtgctgcagcaccctctgccgcatccaaggcggcacagccacaggtagatgacaaggccgcccgggaagccgataaaaagcgtgccgagctcactcaagacgccatcacggcgctcaccaagacccaggaggctttgaccctccttgatgcaaacaagaccaaggaggcgcttgctgcgctggaactggccagcggaaagctggaactggtattggcacgcgacgccaaacttgctttggcgccggtcgatgtacgcgtcatcacccacgatatccacgccaacgtggaatcggtaaagaaagcggtcaagttgtctcgggagttgttgggtgatggcgaggtgcaaaaggcccggcccatcgttgccaatctggccagcgaaatcgtaatccaaaccgacaaccttccgatggcaacgtacccggcagcgatcaagtcggccgcacggctcatcgacagcggcaagatcgacaacgccaaagcggaactcgcccgagcactgaacacgctggtggtgacctcggtcgcctttcctctgcccgtgctacgggccgaagccgcgatggcaaaagctgaaaagctggccgagaccgacaggcgcgatgccaggcagaacgaggagctcagcaccttgctgtcgtccgtgcgcacggagatcgagatggcgcagatcctgggttatggcaagaaggcggacttcaaacccatcttcgatcaggtgaagtccattgagcaaaagtcggctggtggcaaaagcggcaagggatggttcgacgagttgaagacgcgcatccaaaagctgttttga

SEQ ID NO: 101368 - DNA, 459 bp, Enterobacter aerogenes
atgtctgcattgactccgtgggaccccttccgggaactggatgaattgcaaaaccgcctggcgacgatgttcggacgaataccccagcgacagggcgcccgtaccggcaacgaagccaagaccacggcggactgggctctaatggcggacatcagcgaggatgagaacgcattcctcctcaagctggatctgccggaggtccccagggatgccgtgcgcgtcagcgcggaaaacggtgtgctcaccatcagcggcgagcgcaaactggaaaaagaggagcagggcaagaagttccaccgcatagaacgtgcctatggccgctttgtgcgcagctttgtcttgcctgacaacgttgatccgaccaaggtgacgacttccatgaaagacggcgtgctggaagtgcggcttgtcaaggccgagcaagccaaaccgaaacagattgaaatctcagtcaactaa

SEQ ID NO: 101369 - DNA, 528 bp, Enterobacter aerogenes
atggaaaaaaagaatcaatggaataccggctactggatcgttgccctcctgctgttgctgagtttgcagagctactggcagacggcgaaaaccgtcgagccggtgccctacagcgagttcgagaaggcgctggacgaggggcgcgtggccgaagtgctggtgtcggatcgtacggtgaccgggcgcctgaagtcgccggacagccggggcaagacgacgatcgtggcaacgagggtcgaacccgatcttgccgatcgcctgtcgaagtacgacgtaccctatgcctgcgtgttggagagcacctggctgagcgatgtgctgtcgtggatcctgccagcggtatccttctttggcgtctggttcttcctgttccgccgcttcgccgagaagcagggcatgggcgggtttctcaacatcggtaagagccgcgccaaggtgttcgtggaaaagaacaccggtgtgacgttcgccgatgtggcgggggggatgaggccaaggcggagctggtcgcgatcgtcgatttcctga

SEQ ID NO: 101370 - DNA, 192 bp, Enterobacter aerogenes
atggcgggcgaggctgccgtgtccgaccccatcggcctggcatgggcagcctccctggcatcgatcgcggtggcggttgtggccgcgggtcacgcggtcgtctacaagcgtgatccgcggtcggccacgccgtgggggctgctcatcagcggcggcactgccctcccgctcgctggtcatccgtttgcgtga

SEQ ID NO: 101371 - DNA, 2850 bp, Enterobacter aerogenes
atggccagaaaacaatgccaggtctgcggccaacccgccaccgtgcgggtggaagccaatctcaacggtcgtaacagcaccatgctgttgtgcgacgaccattaccggcaattagtgcgccagcaaaagcgcaccgtttcgccgctggaagccttgttcggctcgcgcagcggcctgttcgaggacttcctcggcagtgacttcttccgcatcggcgaagacgcgacgccagttgccgccgataccgatgacgtggtcgatgcctcgtttggcgagcccgccaccgcaggttcgggtgcgccgcgccgtcgcggcagtgggttggccagccgcatcagcgaacagtcggaagccttgctgcaggaggccgccaaacacgctgccgaatttggccgctccgaggtggataccgaacatctgctgctggcgctggccgacagcgacgtggtcaagaccatcctgggtcagttcaagatcaaggtcgatgacctcaagcggcagatcgagtctgaggccaagcgcggggacaagcccttcgagggcgagatcggcgtgtcgccgcgcgtgaaggatgcgctcagccgcgccttcgtggcctccaatgaactcggccattcttatgtcggtccagagcatttcctgatcggtctggccgaggaaggcgaagggctggccgccaacctgctgcgccgctacggcctgacgccgcaggcgctgcgccaacaggtcagcaaggtggtcggcaagggcgccgaggatggccgcgctgagacgccgaccaacacgccagaactcgacaagtactcgcgcgacctgaccaagatggcgcgcgacggcaagctcgacccggtgatcggccgcgcgcaggagatcgaaaccaccatcgaggtgctggcccggcgcaagaagaacaacccggtgctgatcggcgagccgggtgtgggcaagaccgccatcgtcgaagggctggcgcagcgcatggtggcgggtgaagtgcccgagaccttgcgcgacaagcgcctggtggaactcaacatcaacgccatggtggccggcgccaaatatcgcggcgagttcgaggagcgcgtgcagaaggtgctgaaggaggtgaccgagcaccagggcgagctgattttgttcatcgacgaggtgcacaccatcgtcggtgccggccagggcggtggcgaaggcgggctggacgtggccaacgtgttcaaaccgatgatggcgcgcggtgaactcaacctgatcggcgccacgacgctgaacgagtaccagaaatacatcgagaaggatgccgcactggagcggcgcttccagccggtgacggtgcccgagccgacggtggcccagaccatcatgattctgcgcggcctgcgcgacaccttcgaggcgcaccacaaggtcagcatctccgaagacgcgatcatcgcggcggccgagttgtccgaccgctacatcacggcgcgcttcctgccggacaaggcgatcgacctgctcgaccaggcggccgcgcgcgtgaagctgtcggccacggcccggccggtggccgtgcaggagctggagtccgaactgcaccagctacggcgtgaacaggattacgtggccgcgcgcaagcagtacgaccaggccgccgagctcggcaagcgcatcgaagccaaggaggccgagctcaagaagctcgtcgaggactgggagcgggagcgggcctccggcagtgccgaggtcaaggcggaacacgtggcgcaggttgtctcgcgcctgaccggcatcccggtcaacgagttgacggtggaagagcgcgaaaagctgctgcacctggaacaacggctgcacgagcgcctggtgggacaagacgaggcggtccgtgccgtggccgatgccgtgcggctatcccgcgccggcctgcgcgaaggcagtaaaccggtggctaccttcctgtttctgggcccgaccggggtgggcaagaccgagctcgccaaggcattggccgaatcgatctacggcgatgagcacgccctgttgcgcatcgacatgtcggaatatggcgaacgccataccgtggcgcggctggtgggcgcgcctccgggctatgtcggttacgacgaaggcggtcagctcaccgagaaggtgcggcgcaagccctacagcgtgctgctgctcgacgagatcgagaaggcacaccctgacgtctacaacatcctgctgcaagtgttcgacgacggtcgcctcaccgacggcaagggccgggtggtggatttcaccaacaccatcatcatcgccacgtccaacctgggttcggacatcatccagcgacggctgaaggcgcgtgaggcggctggcgaggagtacgaaaagaccaaggccgaggtcatggacgtgctgcgcggccacttccggcccgagttcctcaaccgcatcgacgagatcatcgtcttccatgcgctgggcaaggaggagatccgccacatcgtcggcctgcagctcgatcgcgtggcgcgcagcgccgccagccagggcgtgacgctcactttcgatcagacgctgatcgaccatttcgcggaagaaggctacaagcccgagttcggtgcgcgtgaactcaagcgcctgatccgcagcgagctggaaactgcgctggcgcgcgagatgctcggtggcggcatcggcaagggcgatcacgccagcgcacgctgggacgacaaggccgaacgcgtggtgttcgaacgcaaagagccaccgcagaccccggccgagccggagcagccggatgtcgcgaaggcgaccgagacgccgcacggcgacgctggcaaagactcgagcaagaagaagtcggcgagcgacgcatcttga

SEQ ID NO: 101372 - DNA, 570 bp, Enterobacter aerogenes
atggacatcgatttcaagaagttggctccctggaactggttcaagaacgagcagcaagagcagcagaccgcctcttccctgccggtgcagcgcaatgacctgccagcggcgagcgggccagtcagcccgatcctgcaactgcatcgggaaatcgaccggctgttcgatgacgcattccggggcttcggttttccggcgttgaacatgccgcagtggccatccgattggtcgggcatgctgaagccggccctggacatccaggaaaccgacaagcagtacaagattaccctggaagtgcccggtgtcgaggagaaggacatccagatcactctcgacaacgacgtgctgatggtgcgtggcgagaagcgccaggaacaggagaagaaggaaggtggcttccaccgtgtggagcgctcctacggcagctttcagcgtgccttgaacctgcctgacgacgccaaccaggattcgatcaaggcatcgttcaagaacggggtgctcacggtcacgatcgacaagcgcgaggtcagcgcgccgaagcagggacgctcgatcccgatcaacggctga

SEQ ID NO: 101373 - DNA, 282 bp, Enterobacter aerogenes
atgaaagcgcacctacaggtgattttcacgctcgatgaattggctgcgtacttgaaagtcggcaagcggacgatttatcggctcgccgcacacggggaaattccggctttcaaggtgggcgggacgtggcggcttcgtcaaagtgaaatcgatcagtgcatcaatgatcagacccgagccggagcaaagaaggaggtgatgcgcaagcgtgaacagcagaagtcatccgagcagcccgtgtcgcctgggcgcactacccgtcgcagcaggcaaagggcttga

SEQ ID NO: 101374 - DNA, 264 bp, Enterobacter aerogenes
atgggccatggccttcggcggcggtgtcgggaaggtgtgctggccggacggatactgttgaactacgttgtctggggcaacggaagtgtttcggcccgactctggaacgcgatccgcagcgacgactgggcaattccgcacgttagcctgagcagcctcggggaaatcgtcgtctgggcgcgcccagacgagtttccgccaaggaacatgcagacgagcaaggggctgcgggcactcggctacaacgtgaggatcggtgtttga

SEQ ID NO: 101375 - DNA, 264 bp, Enterobacter aerogenes
atgcgccctcagcgccgtacctacagcaaatctttcaaggctcaggtcattcaggagtgttctgaacccggtgcctccatcgcaaacatcgccttgggctacagcctcaatgccaacctcgaccacaaatggattcggctgcctacccagaaaaccacggctatccagccagcgttcatcccgttgccttctcaaatgctcggcgtgggttcgcatactcaagcgcgctgctgcgatcatgagtttgatccagtcggcccgtaa

SEQ ID NO: 101376 - DNA, 924 bp, Enterobacter aerogenes
gtggcaaagcaaaagttcaaaatcaccaactggcccacctacaataaagccctcatcaaccgtggctccataactttctggctggatgatgaagctattcaggcctggtatgagtcggcaacgccttcatcacggggaagacctcagcgctattctgatctcgccatcaccaccgttctggtcattaaacgcgtgttcaggttgaccctgcgggctgcgcagggttttattgattccatttttacactgatgaatgttccgttgcgctgcccggattacaccagtgtcagcaagcgcgcaaagtcggttaatgtcagtttcaaaacgtccacccggggtgaaatcgcgcatctggtgattgattccaccgggctgaaggtctttggtgaaggcgaatggaaagtcaaaaaacacggcaaagaacgccgtcgtatatggcgaaagttgcatctggcagttgacagcaacacacatgaaatcatctgtgcagacctgtcgctgaacaacgttacggactcagaggccttccccgggttaatctggcaaacccaccggaaaatcaggtcagccgccgccgatggcgcttacgatacccggctatgtcacgatgaactgcggcgtaagaaaatcagcgcgcttatccctccccaaaaaggtgcgggttactggcccggtgaatatgcagaccgtaaccgtgcagtggctaatcagcgaatgaccgggagtaatgcgcggtggaaatggacaacagactacaaccgtcgctcgatagcggaaacggcgatgtaccgggtaaaacagctgttcgggggttcactgacgctgcgtgactacgatggtcaggttgcggaggctatggccctggtacgagcgctgaacaaaatgacgaaagcaggtatgcctgaaagcgtgcgtattgcctga

SEQ ID NO: 101377 - DNA, 213 bp, Enterobacter aerogenes
atgaataacatgattggctttctgtacgttaacaccgaaaccgactgcaaccgtagagagaataatcaccccaaatccaggatgaacctggaaatcatcgatcagcctctggcggctattctgactattacttttagtgctggtatcaccgttaataatgacagggcggataccaaacttttgatggatcgcatgctgaagttcacgctgtaa

SEQ ID NO: 101378 - DNA, 1074 bp, Enterobacter aerogenes
ttgcattggttagttcgtctacgcctggcctggcgccaaatcaccactggatttccttcacgtgcgaggctggcagcgcgcgatgcgcttgctacggcactggcctgcctgctggcatggttactggcggtatggctgttaggacatgagcatcctacgtttgccatcgtcagcgccgtggtatgtcttgctccgggtgtacccagtcacctgaaacaggccagaaatctggttattggctgtacgttcggtatcgtgatgggggagttgatgtggcagctccccgatactcatccactggtgcggatgagcattggtatgttcttcgctattttgttgggcgccgccatcggcccggctccggtggtccccatccaggctggagtatcggtggctctggttcttgccatggggcctgaaagcgcgggcggtacacgtttagtggacgttctgctgggagcctctgtcggattattattcagccaggtgctctttacgtctaatccattcagcgacattgggcgttcaacctccgacttcctgcgtcagattggtaatggactggatcgaatgctacgagcctgtgaggtgcaaagcagtaagggagcagaggccgctttgagtcagctttcagaggctcaggccgctctggccgctcttcgcgccgctgtagctgaagcacaggtcagtaaacgctggtcactacggggtcggctaaacgccgggcggcttgccaccgtcacacagcgttacgaccgccatgcaatccgggtatacgcgacttcccttttattagcggaaagtctcagccgggccatgtcacacacccatactccaccaccaactgtcgtgatgacgtattgtcagtggttgtcggatagctgcatggtactagcccgtcaatccgccgttgttgcgcttaaagaaagtgacccacaggcttgtatgggaacaccacctcagtccaccgctgaccagcgccatgaactaccgccagaatggctcacggtagaagataatgcacggcaactggagcatgccttacaggcactgctgggctcacgtgacgcatga

SEQ ID NO: 101379 - DNA, 387 bp, Enterobacter aerogenes
atgaagccgaccgcaggcccggttccggcgggtaaatactggattgttaatcgtcctgaaggtggactccgatcgcacgttaatgccggtgttcgggatcgttacaaccaggtcatgaatggtgcgacgttcaggcacaggcgggatgattggggaatcgacgatgacacatggaatgagggggttaaacgcggtaacttccgtttgcatcctggcgcgctatcaaaagggggtatcactctgctacatgcttcagattttgccatgttgcacaatgcgttactaaaaacaccgcaggtggatgttccttgtatgagtaaactcaaggcatacggcacaattgaggtgatcttgaccctccatctccggacagcttttgtatcttaa

SEQ ID NO: 101380 - DNA, 834 bp, Enterobacter aerogenes
atggtctgccggaccatgggcgtgtcgcgtgcgcaactgtcactgcggattaaccgttctgccgactggcaggacaggcgctgtaaccggcgtaatgaagaagcagacgcagaaatactgtcggctatcctcaacattatcagcgatatgccgagttatggttatcgacgcgtgtggggcatcctgcgcaagcaacgtcgcacagagggacagccacctgtgaatgccaaacggctttacaggataatgcgtgagcatcacctgttgttgcatgacaaatcagcgcggccaaagcgtgagcataagggcaaaatcgcggtggcagaaagcgatatgcgctggtgttcagacggcttcgagttcaactgcgacaacggtgaaaaactgcgggtcacgttctcgctggactgctgtgacagagaggccatagactgggcagcgagcacgggaggctacgacagttcgaccgtgcaggatgtgatgctgaggtcggtggaaaagcgcttcggcgacaggctaccggaaacaccagtgcagtggctgacggataacggttcagcgtataccgcgtatgaaacgcggaggttcgcgagagagctgaatctggagccctgcacaacagcggtgagcagcccgcagagtaatggcatggccgaacggttcgtgaaaacgatgaaagaagactatatcgcgttcatgccaaaaccggatgtgagaacagcactgcgaaaccttgcagtagcgttcacgcattacaatgaaaaccacccgcacagcgcgctgggatatcactccccgagggaataccggcggcagcggacatcgttaacttaa

SEQ ID NO: 101381 - DNA, 273 bp, Enterobacter aerogenes
atgtgcgaaaggacgtttgaaaaagaactttattctgagtgggttatacgcaatagcctatactggatgactccacttactcgatggaaactccttgaggagttgtcctcttggacgatctcttttgaaaacgatagtcccgaatgcctctatgaattcgagagactgctgaatgattacgctttgcgagaaaagctacagcataaaacaggggcgttgagagattctattgtccataaagtgcttcgcagcgtagatgaaaggctttcgtaa

SEQ ID NO: 101382 - DNA, 1389 bp, Enterobacter aerogenes
atggaattgatgccattcaattttgacagattgcctaatggacgggtttttataagcaacctcgcaggctttcatcacttcattaatgagcaagagctgcttgatctttctgatgagcaaatcagtgcggagcaatcaaacccactagaaagcaagctgttcataaccaacgaaagctcatcagctattgctccctatgctttaagttctgcttttgcaaaaagattgatgaatgaactggcgatcaggccaattttcatgattgtgcccacattgcgttgcgaccatacctgcaagtattgtcaggtcagtagagcttcagtgaacgcctctggttatgatctagatcccgatctcatccctcatatcatttcgactatcaaaaaactatcgataccaccttacaagatagagatacagggtggagagccactcttgcggttcgatttaattcagtctatctatgagcaatgtactgaaacgttgggaagctccgattttgagatggtgatagcatcaagcctgtctgtcttgaatgaggatatgcttcaatggtcgagaggcaggaacataacgttctctgtttcgcttgatggtgaggaggttgttcacaacagtaatcgaattcttggtcatgggcttgcttacagtagaacagtatcaggagtagaggctatcaaacggtctttaggcgctggtcgcgttgcaacggttactacagttactaaagatcttatcaggcatcctgaatcgattgtccaggctcacttgtctcttggcctcaaggacatgtttatccgacctgttagtccctatgggtttgcacaaaaagcatcgttcacattttctatggaggaatacttcagtttctatgcctcgttgatagatgaaatccttaagatgaataatgaagggataagggttgtggaacattcggcctccattcatctgaaaaggatcttcaatcccggctttagtggttatgcggatttaaagtcgccaagcggggtcgtgcttaacagtattcttttcaattatgacggtcgagtatatggtagcgatgagagccgtatgttgcagaaggtgaaccctgaaacggagttcagtgcgggtgaggttaaaacgctatcattttctaagagtccttactataacgcagtgttgagttcatcgttcaattttgctctgccgggttgtgatacatgtgcatatcaaccattttgcggtgcagatccatgccagaacataagtgtacagggtgagcctgtcggtgataggagtcgttcaacgttttgtcagtatcacaaggggatgttcaggtatctgatgaactgcatctcagaaggtggtccgaaggctgagatgctaaaaggatgggcatatgtctga

SEQ ID NO: 101383 - DNA, 621 bp, Enterobacter aerogenes
gtgctacaggcggatgcgtacgccgggttcaacgagctgtaccgcgatggccggttaacggaagccgcctgctgggctcacgcccgccgtaaaatccacgatgtgcacgttcgcacgccgtcagccctgacggaggaagccctgaagcgtatcggcgaactgtatgccgtggaggcggaaataagaggaatgctggcggaacaacggcttgctgaacgtcagcggaaaacgaaaccgctgcttagtaccctggaaagctggttgcgtgaaaaaatgaaaacgctgtcgcgacactcggagctggcaaaggcgttcacgtacaccctgaaccagtggccggccctgacgtactatgcagaaaacggctgggccgaagccgataataacatcgctgaaaatgcgctgcggatggtcagtctgggtcgtaaaaactggttgttcttcggctcagaccacggtggtgagcggggagcgttgctgtacagtctgatcgggacgtgcaaactgaacggcgtggatccagaaagctaccttcgccatgtccttgacgtcatagctgactggccggtcaaccgggtcagcgagctgctaccctggcgcatcacactgccaactgaataa

SEQ ID NO: 101384 - DNA, 378 bp, Enterobacter aerogenes
atgcagaaaaatatgactcccggcaggcgtaaaggctgccctaattattctcctgagtttaaacagcaactcgttgctgcctcctgcgaacccgggatatccatctcaaaactggcgcttgaaaatggcattaatgccaatctgctctttaaatggcgccagcagtggcgcgagggaaagctgctattaccttcctctgagagtcctcagttacttcctgtgactctcgatgccaccgccgtacaaccagaaccgcccgctgaggactcagagctcagcatctgctgtgaggtaacgttccggcacgggacactccgcctcaacggcactgtcagcgaaaagcttctgactctgctgatacaggaactgaagcgatga

SEQ ID NO: 101385 - DNA, 840 bp, Enterobacter aerogenes
gtgctggaattatatgtgcataatggtcaattcaaagcccgatccgtatggcagggattttcctccggcctggccgggctttgtaatatgtatggtgtcgaggtagaaagtgaaccggcgccagcaacagcggacgtacaaaaacctagtataaacaatgcgatagtttcgctcaaaaaaccagaagataaacaccgtgtttcgcttataaagggaagcgatgcccccaaaaaaattacgattagcgccacatgggtagataacggcgatggtcgtgataatgatgacctggatttacgagtaggaattctgtggcctgatggaaatatgtccctcattcaggcgccggataaatcaggtgcgtttaataaaaaaccctgggtttaccatacgggtgacgtcgttagcgcaagtctttctgcgcctggcgttgaaaaggtagaaattaaccctgaaatttcccgactggcgggtgggaaaattgcgctggtatgtagtgtctattccgccgtcagtaacggtgtggtagccgtagcgtcattaaaaccgaaaatgcgcatggagtatggggacaagattgtagaatgctcttttgatttcactaaaaagaaaggtttcttcagtaactgtatttatacctacgttattggcctgattgaaatagatcaggatgctatcgaattatatccatcaggtatgacatctaaaccgatgagtgaatctactccatggttaacccgccgacaagacaacagcctggaaatcacgatgaatggccctgccgtatttaaaggcagacctaacaaacgtagcggaagcaaacaatatatcggattctaa

SEQ ID NO: 101386 - DNA, 528 bp, Enterobacter aerogenes
atgaaattcaacattcagtacctacatgctgctgtagtgctggtacttgccggcatacagccacagcccaaagcggctgaatgccagccgttgattgttgaaaaagtcactcagatgggtgcgacctttaatcacaaagacattctggaagttactattgcgcttaacgatctggtcagacagctacgtgatgcgcgcatgcaactttcaaactttgccagtgcaaatctggaaaaggcgatcgttgtctcggaaacgacaaaaaatgatgcagctcatatggctgctctaactgattcgttagtcgtgatgctaccagaaaagcacatcattctgtcctacagcaagaattcgcctgaatttatgcttttcaaagctgtaaaacagatggataacgaggctaaaaactacatcagccttattgaacaactaacccataaaactgaagcgcgtgattcaggtatcaattcagcggcagtggctcacctcgcaaaaacaggagaagaggctgcccgtaaatggctataa

SEQ ID NO: 101387 - DNA, 417 bp, Enterobacter aerogenes
atggctataactgctgaatatagtcaggagacatggggcgatttttttgccccaacctttcaagagttccctgaactacaagaacaattattaacagagttccttaccttcaaacaaacaggctcgccctcgaatcttcttgggcgagatgccccttttgacttcccaacatttgcgtcggacgcaaatgtccatcatgttcatataaatctacgttacgaacgaacctggacagaacgccaggaaaactttcgtcgtacgtcaaatcactacttagtctacaccgaacatatgtgggagaccggacgctatctgctcatgggcgttgtcacgccagctcatgaaagaatgccagcgcacgataatcgccttttaagctatttttcagaagtagcagaacgcttccacagttcataa

SEQ ID NO: 101388 - DNA, 183 bp, Enterobacter aerogenes
atgaaagccagcatccgtgccaaggtggagcacccgtttcgcatcatcaagcggcagttcggcttcgtgaaagccagatacaaggggctgctgaaaaacgataaccaactggcgatgttattcaccctggccaacctgtttcgggtggaccaaatgatacgtcagtgggagagatctcagtaa

SEQ ID NO: 101389 - DNA, 261 bp, Enterobacter aerogenes
atgttgaaaattctcaaaactccggaagggaaaaagtttcttattgctgtggcttgtgtgtttatcgttgcggtatgcgtggtgtcaaaagccgcgttccagggcgtggaagaccagtacaatctgccgatggatacctgggacacatccctgtttatcatccagggcgcatgggtggccatttacagctttatgttcaccattgtgggggcgctgcctttcgggttttactttctcggccctaaagatgattcagaataa

SEQ ID NO: 101390 - DNA, 2064 bp, Enterobacter aerogenes
atgaaaactcaacgctttgtacgtacccctcttgcagttctgattatggcattccagacgaatgccgttaatgctcaggagagtcacgatcacgcaacgatggaggatgattccgttatggttgttacggctcctgcctcatcgccgctggaagttgtcacgtccccaaaaagacctcgtcagcctgtcccggcaagtgatggttccgattacctgaaaaccatccccggtttttcacagatacgggccggtggcacgaatggcgacccggttttccgcggtatgttcggatcgcgtctgcgtatcctgaccaataatggcgaaatgctgggtgcctgcccggcccgaatggatgcccccagctcttatatctccccggaaagttttgaccttctgacgttgaccaaaggaccgcaaacggtcctttgggggccgggtaactctgcagggacaattcgtttcgatcgcgagcagccgcgttttgataaacccggcgtacagggaaatgccagcctgcttgctgcctcgaacaatcgctgggatgagaatgcggatatcagcctgggtagcgaagatggatatttgcgcctcatgggtaacaaatcacgttccgatgactataaggatggtaatggcgatcgcgtcccctcaaaatgggataaatggaacggcgatatggcgctcggctggacgcctgataaagataccctgattgaactgacggcagggaaaggggacggggaatcgcgttatgcgggtcgcagtatggacggctcccagttcaggcgagaaagcctgggtgccaggttcgaaaaatcaaatatcggggaggtattccagaaatttgaagcgaatgtctattacaactacgccgaccacattatggataactattcacttcgttcacccgacggtggtatgtcaggaggtatgtcggatggaatgacagacagcggcatgggtgactcaatggatgcaggcatgtcaatggatatgaatatgccaatggcgatggaagtcgacagacgtactgttggcggtcgtatgatgggcacatgggagtgggcggatgtggagctgagaagcggcgccgatacccagctgaatacccatcgtaataaaatggataacagctgggtcaaagatgcccgtttccatgattatggtctcttcagtgaactcacctggaatacctctgattcaagcaagttagtggggggcgctcgccttgatcgtgtcctcgtggataatttttccgggaaaggctcctcagagcgaacggacacccttcctgccgggtttgtacgtttcgagcataccctcgcagaaatgccgctaatgctgtatgccgggcttgggtatacagaacgtttcccggactactgggaactgttttcccccacctacgggcctgacggcacctcagacgcgtttgataaagtgaaaactgaaaaaacgacccagcttgatattggcgcacagtattccggcaaacgtacaaacgcctgggtttctgcttatgtcggtcacgtaaatgattttatccttttccgctacgatcccaacgatgcatatatcagccaggtcgataacatcaacgccaccatcatgggaggcgaagccggtgtcagctataagttgaccgacagctggaaaaccgacgccagtctggcctattcctggggcaggaacatggaagatggtaaaccccttccgcaaatgcctcctctcgaagcccgtctgggattatcctgggaaagtggtaactggagcagtaccgggctggtacgtctggtcagtagccagcatcgggtggcgattaatgaaggtaatgtggtgggcaaagattttgacagcagcgccggttttgccgtggtttccgccaatgccgcttaccgcgtgaacaagtactttaaagtgagcgccggtgtcgataatcttctggacaaagattacagcgagcatctcaacctggcgggtaacagtagctttggctactccgccaatacctccgttaacgaaccaggaagaacattctggggcaaaattaatgtgacattctga

SEQ ID NO: 101391 - DNA, 276 bp, Enterobacter aerogenes
atggctatgccggaacactgcgaacaaaacctcaccatggtttatcccatgatggcgggacacgctatgtccccgatggaagaaattgcctgtgggtactgtcatttactgattcatctgcctttcgtccagttcgtgctgacgataatgctctggctgatgttactctgcgttcatctgtctcttcctctacaggccattttctcaccgattttccgcgcctgggcacctcagcgtgcccgcgcccctcctgctgcttttctttctgcgaattaa

SEQ ID NO: 101392 - DNA, 516 bp, Enterobacter aerogenes
atgaaaaaaagaaatttcagcgcagagtttaaacgcgaatccgctcaactggtcgttgaccagaactacaccgtggcagatgcagccagcgctatggatgtcggcctttccacattcacagcgcttgatggaaccagcgtgaatgctacaggtttctcatctatcgatgtggtgggcctggcaacatcgacgggcgcactcaatgttcaatttgaccttggtattggggtcagttcgagtaggcgcaaaggcggggctttctctaccgaaattattatcgatatttcaggaagagatttttccggaaaagctctgcgcacaagccatgcagtggtacacccgggtggcgcagcgccattgaccggattggggattgctttaattattgaacgactcgtgggattagatggcaagccgccagtatccccgggcctgtatttcccttaccaggtcctggattcgtcaagctatctggcacgtctggagcaagaggggggacaggtcctgaagctgtaa

SEQ ID NO: 101393 - DNA, 312 bp, Enterobacter aerogenes
atggggttttgggaaacagccggtaaaattgcaaaaggcccagctaacgcattggacgaaaaagctcatgagcttcaggcaaccaaaatgcgcttagaaagcaaaagcagtgaagaactaaagcgcctcattaaatcggatggtttttttggctcagctagtaacactgaaaaaagcatggcgatgaaaattctcagagagcgcggagtgaagtggtttactgaatttggccacctgaacagaggtgatatgctcacctcagaacaacacaggtgtcataatgaaaaaaagaaatttcagcgcagagtttaa

SEQ ID NO: 101394 - DNA, 534 bp, Enterobacter aerogenes
atgagccgtttaacttccgtacaacctgaaaatgctactggcaagactgcagatctcttcagcgccattaaacgagcgatgggtaaagtcccgaatgcctaccagaccatcgggatcgcccccgacattctgggtcaggcattgtcacacaacgccacgctggcgaaaagccagctgaataaacaggaaattgaagccgttaaccttgtggtcagtgaagtgtcaggatgtgattactgtctggcggcgcatacgttaaccgggaaaatggcaggttacagcgttgagcaaattaaggcattacgccggggagagttcccggaagatccgcatattgatgcattggtcaaatttgtaaaaactctggtgacgacccgcaacaccttaccagaagaaacagtcagtcgttttctggcagcaggctttagcgatcgacaggtagtagaagtcatcagtgcagtcagtgcgattctgtttacgaatatggtcaaccgtgtgaatgacaccgtggtggactttccaaaagtaaactga

SEQ ID NO: 101395 - DNA, 909 bp, Enterobacter aerogenes
gtggacaacctcagtcgtttgctttccttatttactccagcatgtagcgttaatcttcactgccgttttgccgggcgctgggatgtcgaccacccgcaacaagccgccggtattgtgccctggcatgtcattcttcgtggcgaaacgcggctcattgttgaaggaaagacgttcgatgtgcgcgccggtgatatcattctgttcccgcacggatccccgcatttattgcaaagcctggtggactgggggcaggttgttcctgctcaggtcaacaataatggcattgtcactgatgtgtggacggaaggaccggggcctgcggtcgaggtattgtgtggagagtttcatttcgggccgggttatcgctggatgttcgccgatgaaacggtactgatccatctccgtgccgatgagcaacacgattgccctgagctggaaacgctgctggtaatgctggtacgcgaaagtctgggtggtttaccgggcggtgcgagtatcgttaaggggctggcagatacgttgctcgcgctaatcctgcgtattttgctgtcgctgcacgagcctcctgcgggtgttttacggctactgagcgacaaacgtcttgctcctgccgttctggccgttatcgctgatcctgcattgccatggacgatggagtcgatggcgcaacgctgttttctctcacgcgccaccttcgcccgccacttttcacacagctatcatcagacgccccaagtctggctcaaccagttacgtatggtgttagcggcaagactgctttcagaagagaaaaatctgacagcagagagagtggctgaacagtgtggttttttgtctctgtcgtctttttctaaagcgttcaaaaaaacctatggcataacgcctgctctgcaccgtaaacgtgggtag

SEQ ID NO: 101396 - DNA, 936 bp, Enterobacter aerogenes
atgcaccgtttaggactcatcattgccgaccatttccagatgctggcgctgtctacgctgacggtatttgagtttgccaatctggtgactgaaagtccgttttatcaacccgaggtctactccgaacacggtgggactgtacgttcttcttcgggtattggtgtagactcggcaaaattgagcgaggaaacgcaggtggatacctggctggtggcgggcgtattatcgccagtggatgaaccggctagcccgggtgtcattcactttctgcaagccaccgcccgccagacgcgccggattgccgggatctgcaccggggcatttgtactggcacaggccgggctgctggagcaaaaacgcgccactacgcactgggcacactcacacagcctggcttcgcgacatcccactattcagcttgaagatgatcgtatttttattattgatgacactatctggacatcggctggcatgacagccgggctggatatggcactcggcatggtggagaaagatctcggcgcagacattgcccgtactgtggcacatcgtctggtaatgaaccagcgccgttccggcggtcagacgcagcattcagaaattcttgccctggcaccccgctcagaccgtctgcaaactgcgctggaatatgcccgtaataatctgcacaaaacactgacggtggaactgctggcagatgcggtacatatcagtgcccgccaacttagccgcctttttcgtcaggagacgggtaaatctccggcaaaagccattgaaggactccgacttgaggctgccagattaatgattgaacaaagccgcctatcactggatgccattgcccgcgagtccggttttcgcgacagacgacatatgcgggaggtgtttattcgcgggtatggcattccacctcagtcgcttcgcgcagggcgttaa

SEQ ID NO: 101397 - DNA, 327 bp, Enterobacter aerogenes
atgacgtttgatgagatcaaagaacgatttgctggagcaggtacgggaactgatgctttccgcgggctgtacaacgagaccttcgagttaatgaacgcagataaggaaaatgccgcggtttatttcttaatcggcgtggcagcacggtcatacgttctcagatatgacgaccaggccgtcgaccccaattttgcggaacaatctaaacaaacgatgagcgctttagtcgacaaaattgcctttgcacttcatcaaccagcggaagacaaaataaaaatcgccagtgaagtcgcgtctgagtatcactggaaagtcaccagtttctga

SEQ ID NO: 101398 - DNA, 897 bp, Enterobacter aerogenes
atggctgataactggaattcatcgattgattatgttgcgataggcgagcgtctcaaagcataccggattggcgcatcgctccaggctgaagacgttgcggaacagttgggtgtttcccgggcggtgatctaccgtattgaacggggggatattgtcaaaattgagacgctggatcgactggctcaggttctggaaacgtctttggcatcactgttgggggtggaatcggaatactaccccacggcgctggggttgtttgaaagaatgcgccagttggaaagcgtgagcgacagaattttagcccacttcgaacctgtttcattgctgctgacgtcggacagttatctcgacgtcctcaggaaaatgttaaaagagagcaaaaccagtaaaagtcatggtgaggctgacgaaaagaatattgatgcgatcattagtattctgattgaacgccgtacttactttgagcaacgtaaaccccacatcatcagcttagttgggttacgtgaactggagcgatttattcacacaggtatggtagggcgacttgatttaccagaagatatctattcacaacgggtaaaagcggcacgccatgaagtgataaagctggccgatctgatggaaagtgagccactggatatccagattggcatcattgatgaggccatgccgtcttcatcgtttcaggtattgtcaggcccctcgcacagcgtgatggtaacaagtcccttcagattgggggaaatgccaaatgtttacaatggcataggtactgtaacctatgcgccagaagcggtaaaaaaacatgaagatctgatgatcagattatggagaaaagcccataagggacgagagggggccgatctattgagaaaactgttaaaggatatctgctaa

SEQ ID NO: 101399 - DNA, 1077 bp, Enterobacter aerogenes
atgaacaaaactcctatatcagcagagaaaaacggattattgacgttgcgacggcctgacgattttcacctccatctacgtgacggtgaaatactaaaggctgttctgccctttactacaaagcagtttgcccgtgcggtggttatgcctaacctgaatccgcctgtcacaacagtggctgcaatggaagcctatcgcgaaatcatccttgccgcggtgccgcaaggccatgattttacgcctttgatgacgctatatctctgcgatgacactctgccggaagtcatacgtgtcgggcatcagaagggcattctgaccgccgtgaaatggtatcccgcaggggcgacgacccatgcagaatacggtgtcacgtctgttagtagaatacgcggctgtctcgatatacttcaggcgttggggatcccacttctcatccacggtgagagcactcgcccggacgtggacatttttgaccgggaacgcgtttttattgaagatacggtgatggaactacggtgcaattatccacagttaaaaatagtgcttgagcatattaccacccaggatgctgttcgctacatacaagagcaagaggatggcctgactgcggcaactatcacgcctcagcacctgcttttcaaccgcaatgtgctgtttaacggggggattcggccccactattactgtctgccggtcttgaaaagagagtatcaccgtcagtcgttgttgaaggccgcaacctctggtgaccgtcgtttttttgccggcacggattccgcccctcatcctcgtacggccaaactagccgcttgtggttgtgccggtattttcaatgctccatcagcactcgaatgttatgccacggcgtttgaagcggcgggtgcactgccacatctgcaagccttcgtcagtgaatatggggcaaggttttacggactgccgttaaacacggggacggtcaccttagcgcgacaaccgttgattctgcctgaaccgctggtagtgactgagcatgttcagatagacccatttcccggcgaggtctccttaaactggcgtctggtcggcaacgaataa

SEQ ID NO: 101400 - DNA, 1257 bp, Enterobacter aerogenes
atgtttatttctgattaccgacagttagcaacgaatttattctcagatatttaccagctgagcttcgatggtgtgggcgtcactcggcaaagttacgggccaggcgagacggccgtagcagattatcttagccggttcgccagagaagaagggctgagcgtccacatcgatcgtgccgctaatctgattttcagtcagaagggcgtcaatgaggatactcctgcagtctggatcggctctcacatcgattctgtccctcaggggggaaatttcgatggtcttgcgggcgttattgctggactgctgattctggttgccagccagcgagagaaccgccggctgcctgtgccggttaaagtggcggcctttcgaggggaagaaagtgcctggtatggtcgggcttatatgggatccagtgcgatatttggccgcttaacggcggaagatctacaacgtcagcagcgaatcagtggtgagacgcttggcaacagccttggaaagctgggcgctgatatcgaggctatctgcgcccagcaaccgttggttgagacaaaaaatattctcgcctggcttgagttacatatcgagcaggggccggtactggttgaaaaatcgctgccgcttgccgtggtcaacgggattcgggggaatgtccgctttaacactattcactgttttggggatgcccagcattcaggcaccgttcctcgcgatcttcgccacgatgcggtctgcggcgtctccgacttaattatgcgtctggatgcacgctggcagtcacggttatctgcgggggacgaccttgttgtcacgtccgggatctttcagaccgatgtgcaagaacatgcggtgacccgaatttcagggcatgtcagtttcagcctcgaggcgcgaagtcttaattcctacaccctgactgcgtttgctgaggagattatggctacggcacatcaagtgagtgaggcgcgaggcgtgacattcaggtttgacagcccggtactcacggagcccgctacgttagaccattccgtgtttgccgccctcaaacatagctgtgaggcgctggcagtcaatcacctggaattagccagcggcgcgggccatgactccgcaatttttgctcgccaggggatcccgagcggcatggtgtttgtccggaatcagaacgggtcgcacaatccgcatgaggcaatggaaatggacgattttctgctgggtgtcggagtcattcagcagacgcttgaggagtggaaatga

SEQ ID NO: 101401 - DNA, 942 bp, Enterobacter aerogenes
ttgcctgaacttaatgtgagcctcggcgcactggcgctcaaaaatcctgtgatgcctgcttccggctgttttgctattgagtacagtgaagcgctcgattttaaccaactgggtgcaatggtgttgaagagcgtttccccgatatcacgcccgggtaaccctgtacctcgtgtctgtgagactcggggtggcatgatgaatgcgatcggcattcccagtcaggggcttgaatatcaccggtcgcagatcattcctgcctattcggccttttccacaccgctgatcgtgtctatttccgccgacacctcagaatcatttgccagcgcagtcgctgagatggcgctaccttcggttgcggcaattgaagtgaacatctcctgccccaacctcgaagcagacggaatggcctttgccatgtctccagacacaacctttgacgtcatcagcactatccgacggaaaagtgattttccgctttgggccaaactcaccccgaacgccggtaacgtggttgacatcgcgctggccgcagaagctgcaggagccgacgcggtggtgatggggaatacgatgttggctatggcaattgatatccacactcgcagaccccgtcttgggaatgtgatggggggattatcggggccggcgataaagcctgtcgcactgcgcatggttcatcagtgttatcgcgctttgaagatcccggtcattggctgcggggggatcgcctgcgccgacgatgcgattgaattcatgttggctggcgccacggcagtccaggtgggaactgcatcttttatcgatccggggataatgcagaaaatcattcatggcattgaggattattgcaccgaacaccgcatcagccgcgtccgcgacatcatcggtcaggtcaatattgatgaacaactcgcctcccgctggtatgaatttgcgcagtga

SEQ ID NO: 101402 - DNA, 849 bp, Enterobacter aerogenes
atgggtgacacaagctgtttcaatcgtcatgcccgccaggtagcgtcacatcgctgcctggtgtcagagcatcgctgggttaacaaacgctataaatatttgcgcctctccgcagcggtggatctccatagcgcgaccctgcctgggcagttttatatgcttaaatgccccaatgtgaagtcgttacatcctttcctgctcaggcccatgagcgtttacggtaccgggcctgcgcctggaaccatcgagtttttgtacaatgtcgcaggggcggggacacaagggctggctgagttgcctgaaggtagtgagatggagattgtcgggccgctcggtaataccttcactctaaagcctgaattccgtcgggttatggtggttgcacgtggtgtgggccttgccactatggctcctttgctgcagcaagctgctcgtgccggtatcgttctcaccattgttatgtcggcacgaacgccggaagacctgatgcgtaatgcgttcctgcgcggcatcgatgctgatgttcattgcctttatgacagcgatggcacctcggcaatgagtgcgctggataagttactgcatgatattcttggcaagcatcaccacgacatgatttatacctgcggctcacaccgtatacttcgcctgcttcagtccatcctggaggtgttccctgatactggaggcgaggtcgcgcttgaacaacgcatggcgtgtggaatgggcgtttgtctctcttgcgtgaggccgatccagcagaacggacggattgaatttctgcgtgtctgccgtgaaggccccgtctttcctattcgttctgttgtcggggaggtggagtttgcctga

SEQ ID NO: 101403 - DNA, 1257 bp, Enterobacter aerogenes
gtggattcaatgaataatgttcgttcgtcggagggatgcggaacggcttcctcagaggaaattaccggttacagctggaaagcgctgcttggctcggcgatcggttatgcaatggatggttttgacctgctgatcctggggttcatgctgcatgctatttcagcagatcttaacctgacccctacacaatcaggttccctggtaacatggacgctgattggcgctgttgcgggaggcattatttttggcgctctgagcgatcgctatggccgcgtccgcgttctgacctggacaattgtgctatttgctacctttaccggattatgcgcttttgccaccggttactgggacctactgatttaccgcaccattgcagggatcggccttggtggcgagttcggcatcgggatggcgctggctgccgaagcatggccagcacgtcaccgctcacgcgtttcgtcatatgttgcgttaggctggcaggccggcgtcctgcttgccgccgtgcttacgccgatgctcctgccgtttatcggttggcgcggcatgttcattgtgggtgtaattccggcattgattgcctggtttatccgccaccgtctgcatgagcctgatgtttttgttaaccagagcgctgcagaaaaaacctccatgcttgagtcgttccgtttactggtaaaagacaaggcaacgaccaaaattagcgcagggattgcgatcctgacctcagtccagaacctgggctattacgggataatgatctggatgccagcctatctcgccaaacagctgggttttggtctgacaaaatcggcaatgtggaccacggtcactatactcgggatgatggcggggatttgggtttttggccagcttgccgaccgtatcggaagaaaacctgcttttattcttttccaggccggtgctgcggtatctattgtgttttatgcacagcttaccgatcctttaactatgttatgggccggcgctcttctggggatgtttgttaacggcatgcttggcggatatggggcgttgatttctgaagcatatcctaccgctgcccgtgcaaccgcccaaaacgtattatttaatattggccgaggtgttggtggatttggcccggtgctgatcggtgcgattgccgcaatgtactctttccatctggcgattgcccttctggcatcgatttatgttatcgatattattgccacgatattccttatccctgagttgaaaggtaaggaactggattaa

SEQ ID NO: 101404 - DNA, 1266 bp, Enterobacter aerogenes
atgcgctataaaatgatatcggcagctgtatttttttctatatatatgcagggagcggttgcggatcctgttgacagtaatgcgtgctcaacaactaatagccagagcctgattcaggctattggttgtggcagtattcacggcagcgcccgactgttttcttactcaacccacaacgcctatttcgcacgtggactcaatcaggactccaccactcttggcggatatatcacgtataccacagcacctttttatggttttcaggctgccgtgggagtagaaggacaaaccaacctgctggcaggctcggactcggtcgctgaactggcccatgacagtgggggcgttgatgaagcttacctcaaatggcgccagggactgttgtcgatcaccgccggtaaccagcatcttaacttgcctttcctcggcgactattccaatgcccgggtactaccttacctttatcgtgcagttgacgtgaagtatggtaatgacactgattttatccgcgtgacacgggttttcagttataaaagttatgctgattcaacattcacccgcacatcacgtctggctcaggacaataccttcagcggaaaaactgatggcctgatcgcgctggggctcgcgaaaaaacgcgatcttggtcaacgctacttcacttctcagctatggggtgagaaatacgctgatattaccaatattgtctgggctgaagtgcattacgtagcccctgatattctgtggaaaccagatctggggatacagggattttatggcaaaaataccggtgacagtgtgctaggaaaaattgagaaccgcacgctcgggatgcaactggtcgtttacccgctgaacactctcagttggcaggtgggctacgataaaatatttcccgaagccgacgcttacaagaatggcgcgttggttacgccttatgcctacaaaacctcttccgacccttattttgcaaaaccctatttcaccagcaccccgatgaccggtgccggaaatgctttttcgacgcaacttacatggtcttattctgataaatggacgctaggatctcgttattcctttctggatgtcaaacccgcgaaagatgccaaaagcatcaaccagtctgaatatctgctatttgcacgttataactttggcaatgagttgaaggggctgagtatttcagattacttcggcatccagacatcgccattatatgagcgcgagtttattcaaaatagagtgcaattagcatatgatttttga

SEQ ID NO: 101405 - DNA, 816 bp, Enterobacter aerogenes
atgagtgtcgcaacacaaccgggtaaaggcactgccgtaatcactggtgcatccaccggcatcggtgccgtttacgccagtcgactggcgcgcatgggatacgaccttatcattatcgcccgtaatcataaccgcctaaatcagatggcgagtcacatcactgctgacaccgcccgcaatgtggaagtgctggcaaccgatctgggtgatgcccaacagcttgctgctctggagaaaaaactgcgtgccgatgccagcattactctcctggtgaacaatgccggtgtcggaactcatacgccgttgttgtcgagcgatgtcgatcaaatgcaggcgatgattaatctcaatgtcgttgctctgacccgtctgacttacagcgtggttcccggatttgtcgcgcgaggtgtgggtgccatcatcaatatctcatcgattgtcagccttgcgccggaactgcttaacggcgtgtacggcggcacaaaagcctttgttctggcattcactcagtcactgcatcatgaactctctgaaaagggcatccattttcaggccgtgctgccgggcgcgacagcaacgccgttctgggataacggtggtttaccccttgaccaactcgataagtcaatagtaatgagcgcttacgatctggtggacgcggcgcttacgggttttcttaacggggaatttgtcaccatcccgtcactgcataacgaagcttactggcaggcgatggaaagtagtcgccaggctatgatcccgcacctctccagcaatgtacccgccggccgttatcgtgccggacttactcactag

SEQ ID NO: 101406 - DNA, 762 bp, Enterobacter aerogenes
atgaaactgacaagcaacactatttttatcactggcggcacgtcgggtattggccgcgagatggcagaaaaatttcatcaaatgggtaatcaggtgatcatttcaggccgtcgtaaagctcttcttgacacggttacgtccgccaatccgggaatggattccgtggtactggatgtcaccgatgtatccagcattaaatcggcggcgaaagaggtgctctcccgctatccggccctgaatgtggtgatcaataacgctggcattatgcccttcgataatccagctgccgaactggatgacgatatggccaccaccttactggacacgaacctgttgggcactgttcgggtcagttcagcctttgttgagcacctgaaacaacaaccggatgcggtattgatcaacaacagttcgattctggcttttttacccttggtgacgaatgcactctactcagcaaccaaagcagcgattcattcttataccctgtcgcagcgttttttactgcgcgatgccggtgtgaatgtgatcgagatttcaccgccttgggtcgataccgatttgatctacaaaagcggtgattcccgtgcgatgccggtagctgattttatccagcaaacttttgacaaactggcgacagattccattgaagtgattgtagatagtgtgctccctgcacgtgcgaatccgggtgtgaacgaacacgagatggtgaacgcgtttaatcagtcaatggtagataaccccattccggttgcctga

SEQ ID NO: 101407 - DNA, 1008 bp, Enterobacter aerogenes
atgcaaaatcatctgacaacatctcaaaggcgcgcgttatgggcgctaagtctggcgtattttattcaggcgacgggttcactttccgtggcgggcagcctgggttcgatttctcaggagtgggggataagcgatgcacaaagtgcccgcctgctctctatttttggtctgacatttgcgctgggcgcaccgctggcgcaggtactgttcggcaagctgatgcgcagaacacaggtgctggcaggcatgctggtatttgggctcggggcctttatatttgccattgctccagactacaaggtgctggtggcttcgcggattgtgatggggctgggggcatcgttgataggcccagttctggtcgcgctcggcgctgagctggtcgcgccgaaagagcgtggcagtgccattgccactattctgctcggggtgtcgatggccagcatggtcggtattccgcttgcgacatgggtagccagcgcctggggggctcgcttgctgttcatgcttgtcacactggtcagcctggtgacggcggcgggagtgtggattctggttccgaacgaggtcaaaggtgccgatattcatttgcggcaggtcgcccgggtacttacagaggggaaaacgctgacagcctttctggtggtcttttttatcacctccggtgtatacgatatgtatgcctttatctctccgattatccgagatcgctggcagggggatatatcttccgtatcgatagcgctggctgttatcggcattgcgggtattgtggggaatctttttgttactcgcgccgcacgccactacagtgcagagcaattactggttgccggtctgaccttactggttgcggatatgctgattattattctgctacctgctcagttgtcattgttgtatatcctgctggtggtctgggccttctccactgacctgttagcgttagtacccctaatggcatcagagcctaatggcatcgagaaactcagagagttggcagtttaa

SEQ ID NO: 101408 - DNA, 336 bp, Enterobacter aerogenes
  misc_feature (315)..(324): n is a, c, g, or t
atgattgatttaattaatactacgagaaaccatcatttcatatcacaagttgaacaaagatggaacgcatcctcaaatcctgataatccttctttagcaagaatttgcaagtacgaaatcgttgataagtcttcttttgaggtgcacgctactaatcggcctctcattaaaaacacttcagccaaagatgatctctatactttagaattatttgaatcaggaaaaagattaaatctagaaaaattttttggtgtttgggaggataagtataataaaagaatttcttcttttcatagttcgattatgtacaaaatnnnnnnnnnngtacaaaattga

SEQ ID NO: 101409 - DNA, 606 bp, Enterobacter aerogenes
atgacagataccgcagcaaatgagatagaacggcacttacccttaatctttgaaaatgaagccaatgggattcttcaggatctgatcggtactcccactctgatggggatgatgatgtttgcgaccgaggaagaagtaatggccgctcgtaactacatcattggcgtatttgaagagtgttaccgtgtcggacatttacgcatcatgggggccgctgatgaaggaaccttgtttgggtattccttaatttttgggcatccatcggcaaactattcgttgtactgccataaaatttatgtgtatgagcaatatcgtggtaatggaattggtagccagatgctgaccggaattcttagccttccaaatgaagttggcctggtttgctcgcctgatctgattccgttttacgaatctgccggtatgcactttaaaggaaatttcactacgccatcagacgcgggtttcacgaaaactcgcggtatgtatgaaggtctttgcgtaatgagcactgataatagtggcgagactaatggcttgcccatcttcatgctgaacgatagcgacattgataacatcatacaggccatagtatcagccaaaaaatga

SEQ ID NO: 101410 - DNA, 339 bp, Enterobacter aerogenes
atgacggtagcaatcaccacccaagtaacagaacaaactttatcagtaattgagtcctataaagcggtaacaatgtcagacgatgatgctcgcgattttgcgactgatttgttggaacaagctatcgtcgatattgaggctaatccccttcaatatccgtttgaacaaaacgcgctggccaacggcgtaaagttgcgccgctggttagatccaaccgggaaatacatctgtcttttccgctataaccaacagactgacgaggcgattctcgacatttttgccagcacacgtcaggactggttatcacttctctatctcgtccagatctcccgcccataa

SEQ ID NO: 101411 - DNA, 270 bp, Enterobacter aerogenes
atgactaccatttcgcagaagtctgctcgggagatgcttggcacccctcagaacttcagaggcggtgtgtatgtgacaaaaaatggtgcagctgagctgtttattcagaccgcagaagaacgtgaagcggaactggttgaacgccaccagcagcagcaagtaaacgccatgctgaaactggttagcctgtctcagcatgattttgagaacggccgccacgaaaccgcccgtgagctattagcacggaggcgagcagagcggcataaataa

SEQ ID NO: 101412 - DNA, 300 bp, Enterobacter aerogenes
gtggtggtagcccacgttttcggtgaacgcactatggccacactggagcgtcttctgagcctgctgtcagtttttgacgtggtggtatggatgacggacggctggccgatgtatgagtcacgtctgaagggaaaactgcacgtcatcagtaagcgttacacgcagcgaattgagcgacacaacctgaatctgagacagcatctggcaaggctgggcaggaagtccctgtcgttctccaaatcggtggagctgcatgacaaagtcatcgggcactatctgaacataaaacactatcagtaa

SEQ ID NO: 101413 - DNA, 225 bp, Enterobacter aerogenes
atgcgtaatggcaaaagtactgccgggcatcaacgttatctctgctctcactgccgtaaaacatggcagctcaccttcacttatgccgcttctcagcccggtacacaccagaaaatcattgatatggctatgaacggcgtcggttgccgtgccaccgcacgactaatgggcgtgggcctcaacaccattttgcgccatttaaaaaactcaggccgcagtcagtaa

SEQ ID NO: 101414 - DNA, 2043 bp, Enterobacter aerogenes
atgaatgatgcaggcgttcgccccttttccattcgtgcactgcttgaagatcgcgcccgctatctggtgcccatgtaccagcgcaactatgcctggggtgagggagagatcacccagctgctgcaggatgtgctggattatcagcaaaaattggtcagtggtaaggggccgcaaacctactatatcggcaccctggtggtgtttgcccgggacgatggcagtttcgaggtaatcgatggccagcagcgctttactaccctctctctgctggccaattggctcaaacatcacgcgatagattcggtggatatgagctggtatcagaccatcaacctcgattttgagagtcgcccgatatcgagccataccttcgagcgcttatggcagggtgttgccccctacgatttgcgggggagtaccttcaatgaaggtttggtgaacggttttgagctgattgacaaggcaatggcggatcttggtttggtaggggctaaactgacggccttttgcgactacctcttcaagcatgtgcagatctctcgtatcgaagtacccaaggataccgatctcaatcacttcttcgaggcgatgaacaatcgcggcgagcagttggaaaagcatgaagtgatcaaggcgcggctgatggagacgctgaaccagatacccgaggaagagcatcgtcgccaaagtattcatatcctgacccgggtatgggatgcctgcgccaatatggagcgctatatccagtacggctttaccccgcaagagcgccaccgtctgtttggtgagagcgactggggtcagtttgtgccccgtgattttgcccatctgcttgatctgctaggatccccaaacacggccgacgctgccgataaaagccgtgcagctgccggtagccaagggcgcaccttgttggccattttgcaggatgacaagcttgatggtgagcagacggtggaggaggagagcccaggctccgagcgctttaacagcgtcatcaacttctccaacttcttgctccatgtgctgcgactcgtgagccgcgacccgggtgatacggagggggtgccgcttgatgataaacaactggtcgatcagtttgagctgcgagtgataaggcaaccggatccagtagcggcagttcagcgttttatctatggcctgttaaagagcaagtatctgtttgatcagttcatcatcaagcgcgagtttgccgatggcaaggatagttggagtctgaagcggctgcactggtattcggaaaagagcgtcagttacatcaatacctttgacaaggatgaaaatgagaatggtttctctggtgttaaccggcgggtcctgatgttgctgtcagcgtttcatgtgtcgaccccgaccctggtttacaaacattggctgaatggtgcactgagatatctgttcgacaattgtcaccctgatcaaccggtggatgccggggcttatctgtcctatctggagagtcaggctcgccgctttgtcttccagcgctttttggcgcctggtgaaggggcttcctattaccagatgctctaccttgataacgccctgttgcccgccatcaatgtggatgagagttggcacaaggtgattacatccaaacttcgcttcggtcatatcgagaacaactttgtcttcaacttcctcgactatctgctgtgggtacgagatcggaatagcgacaaagttgctggctcctttgagttcactttccgcagctcggtggagcacttctcaccccagcatccgatggatggctataaaccggttgagcagagtgcactccattcgtttggcaacctttgccttatcagccacagcaagaactcgcgcttgagtaacttccagccgcaacagaagcaggagcactttgaagcaagccttgccaataaccagactgatagtcttaaattgcttgctatgattcggctgatgaaagataaaggtcgttggctggaagatgagatagctgtgcatcaacaagatatgttgcaggtcttactatccaatcaaattcagcaataa

SEQ ID NO: 101415 - DNA, 1452 bp, Enterobacter aerogenes
atggagagcattaataatcaagtgcagtcggtacgccagttgctggccattccccaactggccatcccaagctatcagcgaccttaccgctggggctccaagaatatctcggatctctttaccgatttggcaacccatcaggacaagagcgcctaccggctgggctcggtggtgtttcatcagcacaccgatagtgagcagggcgagatgcttgatatcgtcgatggtcagcaacgcaccctgaccctgatgttgaccgtcaaggcgctgatcgaggtgctggataacgaaaatcgcagtggcaaagagaagagtatccggtttcaacgtcaggatctgcgtgagcaattgcaggtcttgcgtggacctatcgatgcgtttatgcagcgccagcgcttccccagccgggattcggagttcaacctcagacgcaactatctggagttgcgtcggctggtggcccgccctgagtttgacgagcagcaaattgactttctgctcaaccgctgtcaggtggtctgctttgtgctgcaggatatctcggaggcgttccagttcttcgattcgcaaaatgcccgggggcgcgatctggctcctcacgatctgctcaaggcatttcacctgcgcgagtttgccggtcatgaggccaatctcaaggccgaggcggtcgcccattgggagcgcctgccaagcgacgagctggccaatctgttcgccctctatctctatcgggtacgccagtgggccgagggcaagtcggcccgctactttggcaagggggaggtggatctcttcaagggggtcaacctagatcgggtagggcattatccttacgtggagtcgctgcgcatcgcccaccactttgtcgatgagtacaacagccagtaccagcgcaagattgacggccagtacatgacgtttccctttcatctcgaccagatgatcatcaatggtcggcgctttttcgagatggccgagtactaccagacgcgggtggccgccatcgtggccgaggagtctgattccggcaaggcgcaatctgccaccctgctcggcgaaacgctgacaccgatggccagcaaggtgctatcgaccctgggcagttacgagcgacgccaccgcaccggggatcgttatgtgcgggccatgttcgactgcgccctgatcttctatatcgacaagttcggcagccaagggctgtcactggccatcgagaagtgctttatctgggcctatcgctgccgcatccgccagcaggtagtgcagttggcaaccatggataactatgtgctggagcacaatctgatccgtgccattcgtgatgctcgtctgccgggagatctgcacggcttccctttgcctagcatgagcagtcgagagaacaagaacaatcgcaatggtgccgaagatgagctggtcgggctgtttcgggagatgaaatattatgaatga

SEQ ID NO: 101416 - DNA, 204 bp, Enterobacter aerogenes
gtggcttctgtttctatcagctgtccctcccgttcagctactgacggggtggtgcgtaacggcaaaagcactgccggacatcagcgctatctctgctctcactgccgtaaaacatggcaactgcagttcacttacaccgcttctcaacccggtacgcaccagaaaatcattgatatggccatgaacgaaccgttaccgacttaa

SEQ ID NO: 101417 - DNA, 756 bp, Enterobacter aerogenes
atgagtgaaaaagaatcgccatcaatgaaagcgttacgcattgtctatggtgatgaggtcatcgtcgtacagtgtgttccgcgtcaggtcgtaaagggcagggtgctcatcaaggtgcatccggactgccgggttattgtctctgtacctccagaaacaccggagcacgagctgttgtctgcgctgaaaaaaagagggcgctggatataccagcaactgcgtgatttcagggagcaacagacacacattgttccgcgtcagtatgtcagcggagaaagccattattatctcggtaagcaatatcagttgaaagtgacagaagacgctactgtgccgcaacgagtgaaaatgttgcgtgggcgtctggaagtgactgtcagacacaaatcggcagaaaagattaaagccttgctggctgaatggtatcgggaacgtgccagagatgtttttcagcgcaggcttgatttactgattccgcagaccctttgggtcagtgagcgtcctccgatacgtctgcgggcgatgcaaacgcaatggggcaactgttcagcaaaaggctgtctgaccctgaatccatggctggttaaggcatcctcagaatgtatcgattatgttttgctacatgagttatgccatgtggctgagcacaaccacagcgagaagttttaccgtctgatggggcaggttatgccgggctgggaaaaggttaagaagcgactggatggtatggctgggatgttgttggcagatatgtag

SEQ ID NO: 101418 - DNA, 3285 bp, Enterobacter aerogenes
atgaaccagacgtacacgccaaaattccaggaagaatacagcgccaaaattccggcactgacgttactgaccagcctcggctggacgtttttatctccgaaacagattatggattaccggggctataaacaggatgaggtggtgctgcgtccggttctgcgtgaagagctgtcgaagcgttcctttatggcgggtggcaaaacctgccagttatcggaaaaagcactggataacctgatatcacaggtctgttctccggcgctgaatgaagggctgctcaaagccaatgaacggatgtataaccatctgctctacggtatcgccgtcacggagtttgtcgatggcaagaaggtcaaccccaccattgcgctgatcgactgggaacatccggaaaataaccagttccattttaccgaagaatttacggtattgcggtcaggcggtgtcgaaacccgcagaccggatattgtgtgttttgtgaatggtatcccgctggctgttattgaagcgaaaagcccggcgggtcacggcaagaaagggccaaccattgacgaagggatatcccagagtatccgcaatcagctcaacgacgaaatcccgcagctgtttgtctacagccagttattactttcgattaacggtcatgacgggcgctacggtacctgccatacgccaatgaaattctgggcggcatggcgcgaagaagatattaccgatccgcagatgtatgcgctgcgcaaccatcctttatcgactgaacaaattcatgcgttgtttgatcatcgtccttcagtcgatctcaaatggtatcaacagttaatcgatgggggggaactggcagtcagcgggcaggataagctgctcatcagtctgctttcaccggaacgtctgctggagatgacccgcttcttcaccctgtttgataaaaaaaccggaaaaattgttgcccgctatcagcaggtgttcgggataaaaagactgctggaacgcatcagtacccgcagaccagacgggggcagggaaggtggggtgatctggcataccacggggtcaggtaaatcttacaccatggtattcctcagcaaggcgctgattcttcatgacagcctgaagcagtgtcgtattgtggtggtgacggaccgcgtggaccttgaagggcagctcagcggcacttttgtttctggtggcgaactggcagggaaggatgataaggccaaagcgatggcgacctcaggtcagaagctggcacagcagattggctctggtaaagaacgtataatctttacccttatccagaaatttaactcagcgacaaaattgcctgaatgcgtcaacaccagccccgacatcatcgttctgattgatgaaggacaccgtagccagggtggtgagaaccatgtgcgaatgaaactggcactgccgaacgccgcctttgtggcatttactggtacgccattgctaaaagaagataagaccaccaataaattcggaccgattgtccacgcttataccatgcagcgagcagtagaagataaagccgttacacctttgctgtatgaagaacgtattcccgaccttgaggttaacgatcgggcaatagatgcctggtttgatcgtattaccgatgggttaagcgaagcgcaaaaagccgaccttaagcgtaaatatgcccgtaaaggtgaggtttatagtgcagatgatcgcatccgtctgatcgcactcgatatcgccacgcacttctcgaagaatattgatgagggactgaaaggccagcttgcctgcgacagcaagatttccgccatcaaatataaaaagtatcttgatgaagccgggttgtttgagtcagctgtagttatcagcccgccggatacccgggaagggaatactgaggtggatgaaagcaaactgccggaagtgacgaaatggtggaaagataacgtcggcacgcaggatgagtctgtgtatacccgcaatatcatcagtcgtttcgataccgatgagaagctcaaattgctgatagtcgttgataaactgctcaccgggtttgatgagccgaagaataccgtgctgtatatcgacaagccgcttaagtcccacaaccttatccaggcgattgcgcgggtgaaccgactgcatccactaaaaaagttcggtctgctgattgattatcgcggtattctggctgagctggacacgactatcggcaaatatcaggacctcgcctcccgaactcagggcggatacgatatcaaagatattgacgggctgtacagcgccatgagctctgaatacaagcgtctaccgcatctgtataaccagctgtgggccatatttgccggtgttaaaaacaaaaatgatactgagcagttacgtgcggtactggtgcctaaaatggaagaacgtgacggagagatggtcgatatccatcagaaaacccgtgatgatttcttcgaggcgttaacggcctttgccggatgcctgaaagtggcactgcagtccgccaccttcttcaccgacaagagctttacggaacaagaccgaaacctctataaagaaaccgtaaaacagatgtccagcctgcgccagtgggcgatgcaggtaagtggagagcaggtcaattatgacgactacgctgagcaggtgaaaaaattgctggataagcatgtcaccggcgttgaggttcgtgaaccggatggcgtgtatgaagtcggtaaaatgggcaagagcgaaaaacccgaagagtgggataacaataaaacccgcaatgaaaccgacatcattaaaacccgcgtgacgaagatgattgagcaggaattgcgtgatgacccgtatgctcaggaggcattttcaaaactcctgcgtatggctatcgaagaggctgaaaaactgtttgaccatccgctgaaacagtaccttttgttccgtgaatttgaagaacaggttgaagcccgtaagctcagcgatatcccggatgcactggcggtaaacaagcatgctcaggcgtattacggtgtatttaaaaaagagctacctgaggtttttgcggtaaacgacgttcaggtgcaggataagtggacgaagctggcttttgaagtggacaacattatcgtcaaagcggtggcagaaaactccctgaacccccaggacattgagaaagtcgttaagacaagtctgctaccactgctgtttacggcctgccgggaaattggtgccggaatgaatcaggttaaccgtattgttgaaaccatcatccagatactgcgcgttggtttgatgaaatcatga

SEQ ID NO: 101419 - DNA, 684 bp, Enterobacter aerogenes
atgaaactgacgaaaagcgggccgctgattgaccgggaaatcgactggctggaagaggtgttgctgaaatacggcaatgatgactctgtgctctgtttctctgagctggatggctttctgacagcgattgtctctggcccgaatacgatttcccctaatacctggctcagtgctatctgggggcgaggtgattaccaccctcgctggaccactgaaaaagagatgacgcgttttgtggggctgtgttttcagcatatgaacgatatcgctggttgcctttatgacgcccctgaactgtttgagccgattttcaatgagcgtgaggtaaagggggaaaaatataccattgtggaagagtggtgttttggttatatgaaaggaaagtcactggatgactggtctggtcttcccggtgagttacggccttctctggaagtgatcgctcttcatggcgtggagaagaattttcctgtacttgagaaaatgaccggagagcagtttgagaaaagtatttcccttattcagcctgctgcactggcactttatcagtactggttgtcagtgagaatgtcagaggcatcatcccggcctgttccagtgaagggggcagaaaacatgcccgggcgaaatgacccgtgtccgtgtggcagcggtaaaaaatttaagaagtgctgtctgcattga

SEQ ID NO: 101420 - DNA, 1275 bp, Enterobacter aerogenes
atggctcgtgattcgctttacccagtgagcgttaaagctggaaaaccgatccttggaatgctacctacaggatggcaaaagttatcattagaaaagtgcttaaatatagaggcaagaaaggcatatatacaagataatcaagagtatgacttagttacagtaaagcgctccagaggtggcgtaataagacgtgagcatcttaaaggaaaagatatctccgtaaaaagtcaattctatattaaagaaggcgactttctcatatcaaaacgacaaattgtgcacggtgcttgcggtcttgtacctaaagaactttctggctcaattgtatcgaatgaatattgtgtgcttacagggaagtccggtttttatcttccttatatggaatttctatcggagtctctatatttccagcaaacctgcttccactctagcattggtgtgcacatagagaaaatgatttttaagttagatagttggtttaagtggccatttaatatccccccactgtctgaacaaaagagaatcgttaaaatcctgtcaacctgggataaggcgatttcggtgacggaaaagctgctcgccaatagtcagcagcagaaaaaagccctgatgcagcaattagttaccgggaagaaacgcttgctggatgagaatggggtgaggtttagtggggagtggaagagagtaaaactgggtgcgatagccgatatgaacagtggaggtactccgaaatcaacggttgaagagtattatggcgggaatatcccatgggtatctatttctgatatgacatctaatggaaagtggattgctacaactgaaaaatatctgactgaattaggattgaacagttcatccgcaagaatatatccaaaaaactcggttctttatgctatgtatgcttctataggtgaatgcagcattgctgctgtaaatttaacatcttcgcaggcaatcttgggtattagaccaaaagattgtttaaattatgagtttttatatttctatcttacatcattaaaagaaaaaataaaactgcaaggccagcaaggtacacagtccaacctaaacgccggaatggttaaagagtttgaactagacttacccagtataagagaacaacaaaaaatcgccgccgtcctgtccgctgctgatgctgaaatctccacgctggagaaaaaactcgcctgcctgagagatgagaaaaaagccctgatgcaacagctactgactggcaaacgtcgtgttaaggtcgatgaggcggttgccgaatga

SEQ ID NO: 101421 - DNA, 1524 bp, Enterobacter aerogenes
atgaacgacaaaatcagtcaggacacgatcaacaaagccctgtgggccgcgtgtgatacgttccgtggcaccatcagtgctgatacctataaagactttatccttaccatgctgttccttaagtacatttcggatgtctggcaggatcattacgatgaatataaaaaacagtatggtgatgcaccagaactcattgaagccatgatggccaacgagcgttttgtactgccaaaaagtgccagcttttatgcgctgtacgaacgccgccatgagccgggtaacggtgagcgtatcgatcaggctctgcatgcgattgaagaagctaatggcaccaaactgaaagacgccgggaaaagcgtgttccaggatatttcgtttaacaccgatcgcctaggtgaagaaaaacagaagaacaccatcctgcgtcagctgctggaagactttgccggtcaagatcttaacctgaagccgagccgtgtcggtacgctggacgttatcggtaatgcctacgaatatctgatcaaaaactttgctgccagcggtgggcagaaagccggggaattctataccccgccggaagtttcggacctgattgcagaactgctcgatccgcaaccgggtgataccatctgcgatccagcctgtggttccggttcattattgatgaagtgtgggcgtaaaattgtctccgggcatgatagtcgtaactatgcattgttcggtcaggaagcgatcggttctacgtggtcgctggcgaaaatgaatatgttcctgcacggggaagacaaccataaaatcgagtggggcgataccattcgtaacccgaagctgctcgataaaaatggcgacctgatgctgtttgatatcgtgaccgctaacccaccgttcagcctcgataagtggggccatgacgaggccgagaacgataagtttggccgttttcgtcgcggtgtaccgccgaagactaaaggagattacgcttttatctcgcatatgatcgaaaccctgaaaccgggaactggccgtatgggcgtagttgtgccacacggtgtgcttttccgtggctccagcgaaggtaaaattcgccagaaactgatcgacgaaaatttgctggatgcggtaattggtctgccggaaaaactgttctacggtacggggattccggctgcgattctgattttcaaaaagcagaaagttgatgacaaggtgctgtttatcgatgccagccgtgaattcaaggcaggtaaaaaccagaaccagcttagcgaagaaaacattaagaaaatcgtcaagacctaccgtgatggcgataacgtcgagaaatacgcctatctcgccagcctgaaagagattcaggacaacgactataacctcaatatcccgcgctatgtcgatacctttgaagaagaggatgagattgacctgctggcggtgcgagcagaacgcgagcaactgaaggcggaattggcgaagctggaaacggagatggctggatatttgaaggagttgggttatggctcgtga

SEQ ID NO: 101422 - DNA, 528 bp, Enterobacter aerogenes
atgaaacatttaattcttgctgctctgattgcttctgttagtgttggtgctgtggctgctgacacacacgatggccattgggagtgtcataactcctacggtgaatcaatctctattgatgttcagtatgggatgatgaaaatcaatggtgattgggcgcaacaaagtcagaaaatgacctctgcatattacaatcatctaacaagaaagaattactctgtaggctatcctgctacctattacggaattgtttatgactctgaaaatgaaatattaggtgctgttgattacacagaggggattattgccgctaacggttctgggcaaatttctggcgcttggataaattcacatattgctgcttgtcacaatccacaagaagcagcagacagggcagcaaggaaagcagaagaacagcttgaaaagaaagaggctattgctgcacaggctgaacaggaacgtgagcagaaagagcttgatgcagctttagcagcacagaagaaagaagaagctagcaaaagttggtag

SEQ ID NO: 101423 - DNA, 663 bp, Enterobacter aerogenes
atgaaaactgtatacaatattgcagctaaggctgcgggtgtaatggtgctttgtggtggttgcttatgggcttcttcttatttttctgatacggaggcatatcaaactgcatcgcttgcgcaagctaataatgcccttaacgaaaagggtaacatgtggcaggtgattaacaagcctgtaaacggtcttaaaactgttacagatggcacgggtacagtttttaaaaacatccccgcatcaatgactgataaagatattatcaagcatttcgaacagcgcccggaatggaaaaatcataatttctatcctgataaatatgttatgcacatctttaatgatgatggtaagcctgttccaaataatgactttggttgtatgacttggacggaatacgcaacacttaataaaatatctcaatgggatttaactaaagaacgcaatgattttattaaggcgtgtggatggaatgatagtgtaaatatggatattgatgctcctttttggggggagtggatgattgattttgaacggcgtacagatacgttagcgccgtgggtatttggaattggcttcttgtgctgtattcctgctttgtgggttggcttctggcgtctgttaggcgtggctttccgttcagctaaaaaatcaatgaagggtgaataa

SEQ ID NO: 101424 - DNA, 195 bp, Enterobacter aerogenes
atgaagaaggttttacagtgggttcactttcaggtgaacggggttacaggttttgtagaaattgaacctgctggctctatgtggatgcattttggtggctcacgtatggcctatagcatgatgcaaggcaaactgaagaatgttgttcatagcgtaatggttcagcattcaattatttctggctggcgtaattaa

SEQ ID NO: 101425 - DNA, 759 bp, Enterobacter aerogenes
atgactattgagcaagttgtgcaggtattaaaaaacgctggtgttaatctggctactattggcagtgaagcagaccgtgaagcacgtattgaagaagttaagagggctgaatctgtacgtgttcagtatgggtacacgaaagggcagatatatgaagctgtaaaaagtgttagtaatgattccactatttctaatgtgacatataacaagcttctcaatactaagacgacagcaagcaatcttacaggctctactgtaatgtctcctgtgggtgtgcagcattcacacaatattagccacggagattatcttctcttcactgtgcttaaagatatgtgctctcctgctgatttagaggaagcaatgaaacaggttgataaaaagcttgaagaggaatttatgaaaacaatgaaagcacagcaagaagcttacattgcttcacaacgccctcaaatcctgaagcctgtagaatctaatgaagacgcattatttagaattaaagaatacgtttccagtgatgaatataagggtaatggcattcttccagatggtgatgaattaacactgaaaaggcttgtggatgagcacaccgctggcgcaaaagagttttgggatagtttccagctagataagcaaaaagcaatagtagcgtctgacccatttgcagctaatgaagctttaccagaagcacaggaagaagcacctactgaagttgaacaggaagcatcacagggtaagaaggtctgtagccctgattga

SEQ ID NO: 101426 - DNA, 1455 bp, Enterobacter aerogenes
atgagtaaaaacataatgcaaaatcgcaatgatgaatatcataaattaactcgcggggaacgtattggctacggtatgggcgattttgcgcaaaacctggtttttggcacgatcggcggctttcttgctctacatatgttgacggtaaatacgatcagtacagccactgcggggttcatttttctttttgtccgaatcatcaatgttttttgggatccgatggttggaacctatgtggacaaaaggacatccgcggcagggaaatatcgtccctggctattaagagccggcgtgccgctagtgatcctttccgctttgctttttgcccctattccgggcgtcagaggctccgtaccgtttgcttttatcatctatttagcgctggatttagtttattccctggtcaatattccttacggttctcttaatgcctctctaacaagagacccggagtcgattgataaattaaccagtacgcgaatgatgctggctaatagcgccaatcttctggtgtatactctattcccaatgttcgtgcaaatggcgtcaccaaaagatcgtagcctaaaggatactggtttttttggcatagaactcaatctgggaaactataccgacccatccgcggattacgcatggttcggcgtctactccgtttatatgttattaggcgcggtggcactttttatttgctataaattcactaaagaacgtgtcgttgcaaccgcagagcagacggcaaatgtcaaagcaaccgatttgttccttgagctcaaaaataaccgtccccttgtcattcttggattattttttatgctggcctttaccttcatgttctttatgaacacggttaatggctttttcaatcaatatgtggttggtcactctgagtggatgggtgccgttggcctggtcgcctcaattccgggtattgcgttccccattttttggccaaaactcaagaaaatttttggaaagaaaggcttcttccacattttcctggggatgtttattgtcggtgagttattaacgtatgtctggtcacgggaaggtatgcacgatgcgctgtggcttgcttatatcgccacatttattaaacagtggggcttaacctcagccaccggatttatgtgggcactggtacctgaagttattgcctatggcgaattaaagtctggtaagcgaaatgcggcaatcatcaacgccattatgggactctttttcaagattggctttaccatcggcggagccattcctctgtggctgctggccgtctatggttttaatgaaaccggcgcacaacaaagcgcgagcgctatcgacgggatcatgatgacagcggtttggatccccatcgccttagcggttgtctcgatgatcgtcatgcaaatttatcctatctcagacaaacacgtcggcgacattaaccgccagcttgatgagattcgagtataa

SEQ ID NO: 101427 - DNA, 936 bp, Enterobacter aerogenes
atgaacaaaagtacaattgcattgatgatggccatgctttcaggtactgcttatgctgactctacgcagttaacgccaaatttctcaccggaaagtgtaagtgtatctacctccgccgggatgttaagcggtaaatctcatgaaatggtttatgatactggtacaggaagaaaggtcagccagctggactggaagatcaagaatgtagccattttaaaaggcgacatttcctgggatgcatattcgtttctgacactgaatgcacgaggctggacatccctggcttccggggctggtcatatggacgactatgactggatgaacgataatcaatcgggatggactgaccactcatcccaccccagcacgaacgtcaactatgccaatgaattcgatatgaacgcaaaaggctgggttttccagaatgaaaactataaagcgggtgtaatggctggttatcaggagactcgattcagctggactgcaaccggtggttcctataactacgataatggtgcatatactggagaattccctgctggtgaacgtggaattggctatagccagcggttttccatgccgtacattggccttgtaggtcagtatcgtattaatgattttgagttcaatgcattgtttaaattcagtgactgggttcgggcgcacgataacgatgagcactacatgcgggatttaactttccgtgagaagacgaccagttcacgttactatggcacttcaattgatgccggatattacgtaactccaaacgccaaagtatttgctgagttcacctacagtaaatatgaggaggctaagggagggactcagattattgatactaacagtggcgagtccgcctccattgggggagatgccgccgggatatcaaataaaaactatacgattacagcgggcctgcaatatcgattctaa

SEQ ID NO: 101428 - DNA, 384 bp, Enterobacter aerogenes
atggcaaaggtgtcgttagcggtgtttgtgaaatctgcgtttatctccagagctgtgctgtttgttgtggcctttgccatgatgagcgctttgctgctggcaaaaccgcagtcctctcagatgtcatcgatgcagaccaccgaagcacatcagcacgataatgatgcttcccctgatgagcacaacacgctcttatttcattcccacggcaatgtgcatcacctgaatgccgatcattctcatgacatcaataagctttttgcactgacggaattctatgtctggcagggcaaaaacagagctgtgtatggtcatggaagtccccgtcattatttcgtttccctgtctactcctgagcgtcccccaaggtccgggcttgtctga

SEQ ID NO: 101429 - DNA, 738 bp, Enterobacter aerogenes
atgttcacgaaccttgcattacgtggcggggtgtatgacggcctgttttccgccagaatgcgctctgcctatctgttttttgtacttttattgcttttctacagccagggtgcatctgcacacggcgtagccgaaggcgacaaagggtacattcaggaaattaccgggataaacatcctcccgtttatctaccttggtgcaaagcacatggtgaccggttacgatcacctgctgtttctgttcgtggtgattttctttctctacaaaatgcgcgacatcggtttgtacgtcagcctgtttgccattggtcactccagcacgctgctgattggcgttttctttgatatcagcgtcagcgcgtatctcattgatgccatcatcggtctgtcggtggtctataaggcgctcgataatcttggggcgttccagcgctggtttggtttccagccggataccagactggcaacgctcatctttggtttcttccacggctttggtctggcgacgaaaataaaggaattcgagatctcccctgatggcctgttcgttaatctgatcgcgttcaatgtgggggtggagataggccagttactggctctcagcgccattctgatcgtgatgagttactggcgtcagaccgcgagctttttccgtcatgcctacaccgctaacgttgtgatgatgagcgccggtttcctgctgatgagctaccagctttgtggctatatccttgcctga

SEQ ID NO: 101430 - DNA, 690 bp, Enterobacter aerogenes
atgtacaacactgatttacctacccgcgctgagcttccttcttcactgaagctgatgcagtccaccctgatggccgccatcgttgccctgacattactcattaccgtggtgatgccgtctgaatatgctatagacccaaccggcataggccgggttctcgggttaaaacaaatgggagagatcaaaacgcagctggctgaagaagcggagtcggaccaacaggccgtcgtcaatattcaggccccggttgcccgcccagcgacggtaagcacggttcctgataatcccccggtgatagcgcaaaacagtgctccggagcgggataccccgtccgtcataccgtcacaggaaacgaaggcggcgggtgttcaacgcaaccagatggtgattacgcttaagccaaacgaagccgcagagattaaactcgacatgcgtaaggatgcgcaggtgagttatcaatggacaagctccggaccggttaacgttgatgcccatggtgatccgaccaatgcgccgaaggggttctatcacggttacgggaaagatcgccagatcaccgccaaagaggggattatccaggcggctttcgacggaaagcatggctggttctggcgcaaccgtggcacgaagagcgtcacgatccgtctggataccaacggccagtacatgacgattaaacgcgttatttaa

SEQ ID NO: 101431 - DNA, 270 bp, Enterobacter aerogenes
atgtcagttcacacttcacaccccgacatcattaaaaggctgaaacgtgccgcagggcatctgaagagcactatccagatgctcgaagacgaaaaaccgtgcctggatatcgcccagcagttgtccgctgtggaaaaggcgataacgaatgccaagcgaacgcttattcatgatcacctggaccattgtctggaacatgccctggaagacagccagcatgcatctgacacgtcgctcagcgaatttaaagagataaccaggtacctttag

SEQ ID NO: 101432 - DNA, 1125 bp, Enterobacter aerogenes
atgaccgatttttctgcgttgttacagcagggcgtggccaacgcatggctgtttgttcccagcgccattttgctcggtgcgcttcacggtcttgagccgggacattccaaaaccatgatggccgcttttattgtcgctatccggggaaccgtcagacaggctgtcatgctgggcctggctgccacgctttcccatacggccatcgtctggatgattgcgctgggcgggatgtatatcagccggaaattcaccgctgaatcagccgaaccctggtttcagctgatttccgccgtcattattctcggcactgcggcatggatgttctggcggacatggagcggtgaacgtctgtggaaactggagcaggaagaagaacatgcgcacgggcatcatgagcatgacgaaacgcggattattgataccggccacggtaaagtcgaactctctatttttgaagaaggccagctgccgcactggcgttttcgtaccctgagcggtcagaactggcaaacccgggatgtctcactggtgacaaaccggggtaaaggcaccttttcgcaggtcttcgattttgtcgagaaagacggcttcatggagtccacacaggctatcccggagccgcacagctttgaggttcgtctgacgttaggtcatcgcggtcatgttcatgactacgacgtgacatttcatgaacacgaacacgaacattcagcgctcgaaggactggatgcctcctcaaaggaataccaggatgcgcatgaaaaagcccatgctaacgatattaaaaaacgcttcgccaaccggaatgtgaccaccggtcagataatcctgtttgggctgacaggcgggctgatcccgtgtccggctgccattacggtccttctgctttgtattcaggtgaaagagttttcactcggggccgcgctggttttatgcttcagtattggcctggcaatcacgctggtcacggtgggtgccgcagcggcctacagtgtgcgacaggccacaaagcgctggcgtggatttgataccctggcgcgtcgggctccctatttctccagcgtgctgattgccctggtgggaatttatatgggctatcacggctggtcagggattatgcaataa

SEQ ID NO: 101433 - DNA, 594 bp, Enterobacter aerogenes
atggagaaggtaagaatagggattttcttgggtttattggcaatgcagccgcaagctgtccctgcggaattatcacttgaagagaccgccagacaggtaatgatcggatttgaaaatgaagatgccgaactaatcaactcattcatcgataaagatatgggattgtatgtattgtttcgccgtggagcctctgcaaattatgagcgtttaatgcaaatcaattttaatcaaccggtaccggaatatttatcctggccaacgggggggaatcacattccaagtaataaagaatttgagcgtcgaataatcccgctctttgaatgtgaggagggctgggatcgagaaggatattttatcagtggatatgattctaatcataaactatcagcaacgatggtctggacgaaactgaatgacaactcggtttctgatgctgatatttcggcggcaagaaaactggagttcgacagcgtgcgcgtagtggcagtgccgtataagtcaagcactggtttggtgttttatctgagtcagcttcatgaacaaaataattggtcgttaacggttgtcgatcaggttatagattgcggtgcgtga

SEQ ID NO: 101434 - DNA, 939 bp, Enterobacter aerogenes
atgccccggatgttcggggatgcaggtcaggaagcgataggctggttgctgattgatgaagccggacaggcacaacctcagcatgcgattggggctgtctggagagcaaaacgaacggttctggtaggtgacccaaaacaactggaatcggtcagcagtattccgtccactgtagagggggcgctggcaaaacactataagatcccttcctgctggtggcccggaaaagtctcagcacagatactggcagatcagacgatggatgttggcacctatctgcccgacccggagtctgaacagatttgggtgggctgtccattacgggttcaccggcgctgtgatgaaccaatgttcagtatcagtaaccatattgcctatgacgggctcatggtccacgggaaaatgccgggcctggcggattttcctgaaagtggatggctggatgtgaaagggaggacatgcgaaggaaactgggtagcggaggaaggggtggtggtggaaaagttacttttggcgttgcgtcaccagcattcactcacacctgacgacgtgtttctgatctcgccattccgggattgcgctaagcagcttagtcggatcgcaaagagactgggattcaggatggacagaacgggcactgtacataaaacacagggtaaggaagctgcagtggttatcctcgtgctgggaggcaacataaaaagccagggggcgaaagcctgggcggcggaaaaacccaatcttctgaacgtcgctgtaagcagggcgaaacaacgcatttacgtcatcggcgagcgtgcattatgggagaagcaaccttacttttccacgctgtcccgggcactgggaagttacacgacaacaaaaaaattttttttccataccggtgggaaaatgcctcctggtcggaaaaatattttgttccgtttgatacagtaa

SEQ ID NO: 101435 - DNA, 681 bp, Enterobacter aerogenes
gtgaatgaatcagtaataaaaaccgaaaatgtgttcctcttctggagagccattgaagcattaacccctcaggatattgataaggaaaatgcccgggacaaactcaacccggtttacaaagtaggcgcaggagccatgcttccctgggatgacccggctcatacccgtaaggatgttgggcctggcaaagtgtggcgctactccgctcaggcgggggtttatcatttaagtgtgattaccaaaatgctggaggataaaatcggtgcccatgaagcggtacctgaagaacgcaaatcagggaaatgcaggctttttgatattggtttcaatgaagaaggcatcccccagccagccacattcatgttatccctgtctgcatggtcggcggctcagatactcaggcatgatcgcggcgtttatgctcttcatgctcccctttgctccgatgtgtcagacctgcccgcaccaaacgacagcctcccgctggtggatagcggtttttacgattttgataatctgacccttcatctcatgcagtgggtggacattgaggcttatcgattacaggaggagggacagaaggccgatacaggatggttgaagacgcttgagaaactttgcatccatgccccggatgttcggggatgcaggtcaggaagcgataggctggttgctgattga

SEQ ID NO: 101436 - DNA, 636 bp, Enterobacter aerogenes
atgtcacaacgttgggtttttgatgctcttgttaaagatcgcgaagataaaattggtttaatcgcttattcactgtataaattcgaaaaaaacgaacttgctaacagactaaacagcgaggggaaaacccctacgcaaattagaagtgaactaagaacctttcataatcatgcgctaggtgattctcgaattgaaggctttagggaccatgcggaagtaatcatccgcgatttaatggaccaaattgaagaagaccttagggcagaataccaacttcaatttgataatgtaaatacacttcttgatgactatgatagtttacaagctacgattaaggacttccctaacgtaataaaaagagagcgagaaaacgccattctcgattttcacagagccgttacaagaaaggaatcgagagaaactggacgtataattcgtgcgataaaatgggttagggatggctttcagggtgtgattgcagctatcctgttagcattgtttatatatggtctttgtgctctggcgctctcaccagatgacagacagggtattgttgataaagcgtataataattttaaggcttctttcttccagcaagctaacactcccattgttaactctctcgatggacaatag

SEQ ID NO: 101437 - DNA, 168 bp, Enterobacter aerogenes
atgaagcgttcagatcagtttgagaactctgttattgataatgattacatagccgagccggaaagcatcaaagcttggttaagagagtttaaggacttgccaccagctccccctgaactgatagaagcgcttaacaacatgtcaggtaacggtactacccaaaactga

SEQ ID NO: 101438 - DNA, 243 bp, Enterobacter aerogenes
atgccagttaaaccggttcacctggcttcctcaacaccccatacaggagctcagcgtaaagaaaagagagatatcgccagcaagcatttatctcactgtatcgctgtgctggaggaactggtagacacatatgaccctgataccgagggtccattcagtgcatgccatcctcgcacaggtgccgcgagcatgaagcgacagcttgagaacatcctcaaggcgctgaaaacggcaaaagtttga

SEQ ID NO: 101439 - DNA, 1194 bp, Enterobacter aerogenes
atgcctgcctgccgagtatgtcagaatttcttccgggatgctttagctccgtttcacaaataccgacaaaatgcccttcttgacgccacgcttgccttaatcaacggcgcgtcactgacgctgaccagtatcggacgttatttacccggcgctgctcaggtcaaaaacaaaatcaaacgagttgatcgtctactgggcaataaatcactccatcaggatattcctctgattttcaatggcattatcaccatgctgacacggaaattatcgctgtgtgttattgcggttgactggagtggctatccgtctcaggaatatcatgtgctccgcgccagtctgctttgcgatgggcgttcgcttccgctgttaagctggatagtcccgtcagaaaagcagcagaatggacagatacaaaaggccttccttgatgcccttgccggggcggtgaacccgacggccagagtcatcatcgttaccgatgcgggcttccagaatgcctggttccggcatatccggtcgctcggatgggattttattggccgtgtcaggggtaatatccagatgcgcctgaacagcaaaggtgaatcctggttcagacgtcaggaattacaggccagcagtaaacccgaatatctggggccaggcacgcttgcacgggcggaatatacccggtgtgagggacatttttatctgcacaggaaagaaccaaaatgccggaaacaccggcactcacggtgtcgtataaaacgcaaatctcaggttcgcgacgggcgctcttcagcaaaagagccgtggctcatcttcagcagcacagacgactttaagccacgtgaaatcatgaagttatacagtcgccgaatgcagatagagcagaacttccgcgatgagaaaagcgaacggttcgggttcggtctgcgggccagttacagccgttcagcgggaagaatgctggtgctgagcctgctggcaacgctgagcacaatagtcctatggcttattggttatcatgcagaaagtaaaggattacatgtaaggtatcaggccaacagtgttaaatcgcggcgggtaatctcttatctgacgttagcggagaatgtcctgcgacactccccgctaatattaaggcgaacggtgctgagcaccgttcttaaccacctcgccagagcctaccgaagtatggtgctggtttattag

SEQ ID NO: 101440 - DNA, 312 bp, Enterobacter aerogenes
atggaattaacgcaagataaggctgacgcgtttgcccgcattcctttgacctatttgcgcctggaaaaacctcgtctttttcaaaacatgaaccctattacagcaaagtttccagcgaacagctttgcattccgtcacgtgatacgtgggacattatcgtggcggtgggccgggttctggataaaatctggaaagacggacataactatgcaaaggcgggtgtcatgctcaacgatttccgtcactgcggagttacccagctaccgttatttgatgaagggaggtcgtatgcaaacagtgacgcgctcatga

SEQ ID NO: 101441 - DNA, 651 bp, Enterobacter aerogenes
atgatcccgatggtgacggttatcggcaccctgttcctgaaaggggtgtcgatcggcggcgtgttcctgctcgatcaaaaacagctcaccctggcggcgctttccgttgcctgcgttgcggcgatcctcaccggctggtggcttaccaaaggaacgccgctgcatgctgttcgtcagtctcgtcgtcttgtcgatactatcggctgggcggtgatccttccgcagatgctggccatgcttggcggggtctttatggtggcaaacacgggcgactcggtgcaaaaggtagtgagcctgtttgtgaacccggataaccgcttcatgctggtgatcatttactgcgtggggatggcactgttcaccatgatcatgggcaatgcgtttgcggcctttccggtattaagtgccggtatcgcgttgccgtttctgatcaacgttcatcacgtgaatccggcgcctctgttagcgtttggcatgtacgcgggctattgcggcacgctgatgacgccaatggccgcaaacttcaacatcgttcccgccgctctgctggagctgaaggacaaatatcaggtgatcaaaatccaaatcccgaccgcgttaaccctgctggtggtgaacgtgttcttaatgtatttcctcgtgtttcgctaa

SEQ ID NO: 101442 - DNA, 318 bp, Enterobacter aerogenes
atgatgacgcttatcaccattaaccgtgtgtattacctgattggttttgtcgtgatgctgctggttgtcatgacccttcgcgatcgcgccaatccaaagcgttttacaaccgcgttgttctggtttttgtttggcgggatcttcctgtttggcgacctgatggtacaggaactcggtaaatccttggcgtaccgcatcatcggcggcggcgtcatcgctatcgccctgctggcgggatttagcctagtcgggatagggtactatagaatgtccaccgaggaggcgcgagttgcctcttcgaacatactcaagaactga

SEQ ID NO: 101443 - DNA, 723 bp, Enterobacter aerogenes
atggacggtactacactgttgccgctgatcgggataccgatcgtggttattggttttgcattgcgcttcaacccgctgctggtggtcgtggtagcggggctggcgacgggtttgctggtcggtatggatttcggcatgctgctggaaaccttcggtgagaagttcgtgaacagccgttcgctggccaccttcattctgatcctaccggtcattggtctgctggagtattacgggcttaaggagctcgcccaggcctgggtggcgaagatcgctagtgtcacttcggcgcgtattctgatgctttattttgttgcgcgtgaagccacggccgggctggggctgatgtcgttgggcggccatgtccagacggtgcgtccgctgctggccccgatggccgaaggagcggcgctgaacgaatacggcgaagtcccacagcacattcgcgacaaaatcaaagcccatgccgccgcgtgtgacaacatcgcagttttcttcggagaagatatctttattgcttttggcgcagtgctgctaattgacgcgtttctgaaagagaacggcattcagggtatcgaaccgctgcatatcggcctgtgggccattccaaccgccattgcggcattaattattcatattacgcgcctgctgagcctcaatgccagcatccgtcgagacatcatggcatggcgagcagagcagaggatgcaggagcccacacaatga

SEQ ID NO: 101444 - DNA, 339 bp, Enterobacter aerogenes
atgacttcagaaaagagtgctaacccccatcacgacgatatcaacgacggccggatcgtttcctcccgccatctggtgtcggatcgctgcccggagctgtcggagctggaatatgcgctaattatgaccagcaacgcattcaacaaatggatggtgcgctgcatgaccgcagcgggtgaacctgacatgggcgcctttgacgtctccctgctacatcatatgaaccaccgcatttcctcaactctcgccttacggtcaggtttttatcatctggagaaaacgggatgggcccaaaaggtattcggccagacggatgctgacagtatcagggctggctga

SEQ ID NO: 101445 - DNA, 219 bp, Enterobacter aerogenes
atgcagccgggcagtgatgtgattgtctgcgctgaaatggacgaacagtggggctacgtcggtgctaaatcacgtcagcgctggctgttttacgcgtatgacaggatacgcagggtggtggtagcccacgtcttcggtgaacgcactctggccacactggagcgtcttctgagcctgctgtcggcctttgaggtcgtggtatggatgacggatggctga

SEQ ID NO: 101446 - DNA, 276 bp, Enterobacter aerogenes
gtggcttcagtctccgtctgctgtccctcctgttccgctactgaaggcgtgatgcgtaatggcaaaagtactgccgggcatcaacgttatctctgctctcactgccgtaaaacatggcagctcaccttcacttatgccgcttctcagcccggtacgcaccagaaaatcattgatatggccatgaatggtgttggatgccgggcaaccgcccgcattatgggcgttggcctcaacacgattttacgtcacttaaaaaactcaggccgcagtcggtaa

SEQ ID NO: 101447 - DNA, 693 bp, Enterobacter aerogenes
atgacaatatctgaacctgtcaggtctgttgatacagatgaactggtgcctggcgatatttatccgcatcctgctgtgggggagacttattccctgtcacaccgcgaggtctgttctctcttcagtgaccacatcatgtatttttgcagcgcgttggttattctcgtccttgttttcatcgcaggtgtcttttttcgaaaattaatgacgtcttccgcgggacgtaagcgaggcacggtgtcagttattcccgatgcaaagccagaagcgcagagcaaaccggaatatttccatctttccatatgtgtggaaggcccggccagcacggatgattctgtcctgtcctctctcgcctcccgtgttgtgcgcgaagctgaagatttgtatatccccggcgtcaatcgccgcgacagcactgacgacgtgtttgcctggtccgtgcagactcagtttccttctgacaggctctgcagtacccggcttttcccgggggcaggctggtttgaacgtccggatatcattaaacatcccgtgaagtatttctgcgtctgcctgcagtacacggctgaaacatcgccatccacactgcatgccctggtcgatgaggccgggcggcaggtggcgaagccgtatattaaaggcggacattgcctgggctctgagggctataccttctgtatcaccactgaataa

SEQ ID NO: 101448 - DNA, 1071 bp, Enterobacter aerogenes
atggccagaagcaagatgatgaatgctgtagattcgtatgctaaagctaaccatattagccgtgatgaagcattcggccagcttatggacaagtcagtgagaggtgatgtttctggcgaggcatatgtaggagctagaggtggtgttggattcgagctcttcggtaatggcggtaaagctgaattcggtgggaggatgtcggcgagagggacagcaagttctggatctcaagacaatactactgagtcaggacgccaatctaatgctgacaatcatgataccagcagtcaggcagttaaagacttcagagagtcttctgattacttcatcaaccagaaatcaagtcagtctggaaacatcactgataacaatgcatcttctcgggttgatcaattttccgcctctttggccagtgcgaaaaatagctatgaccagtatacgacgagcaaaacacgtagccatgagtatagtgagatggcctcacgaacagaaagcatgagcggccagatgaacgaaaacctgactcaacaatttgctaatttcgtacagaaaaatgccccacaaaatgctgaagctattcttactgacacgtcttcacctgaaatcgctgcccaaagggagcaactggctcgtgaatttgtgaaacaacaggttgaacctaaagttgatgaggcgtaccaggagggcagaagaaacattggcgcaaatatgccatcagtttctgaaggtaaaggaagcggtacagtatatgcggactacaactctcacggtgatagtatcgatgagatgaccaaaaatgcaggtatcaaaaatgatgttcaccaatcggttgaacacatggttagcgataaccagcaagctcataaggataggcaagatagcatacataagcaggaggatgatgttcagaatgaacacactcgtctggaaaaccaccataatttggaaggaaataaatttgagaaagaatacaatgacaaaaaggctgaacagagagcacttcctggagcggatacaagagacgaactcctagctaaggcccaggaatttgagcggaagcataagccctaa

SEQ ID NO: 101449 - DNA, 1404 bp, Enterobacter aerogenes
atgacggctctcgcagcggagtttttcactttggatgaagttaaccgactcaagatcattcaggacgtcatcgaccggcgtctgacaacaaaaatggcagctcagcggcttggtatctccgaccgtcagtgccgccgcctgcttgcgcgttatcgtgaagatggtccgcttggcatgaccagccgccgtcgtggtaaatccagcaacaatcagctgcctcagggactggccgcatacgcgctgagtattattcgagaacgctataacgatttcggcccgacgctggcctgtgaaaagctgtctgagattcatggcgtacatctttctaaagaaactgtgcgtaagctgatgactcaggccagtctgtgggtcccacgtaagcaacgtgcgccaaaaattcagcagcctcgttaccgtcgtgcctgtgccggtgaactcatacaaatcgacggctgtgatcatcactggtttgaaaaccggggacctaagtgtacggtactggtttacgtagacgatgcaaccagtcgtttaatgcagcttcgtttcgtgaaatctgagtctactttcacctattttgaagcgacccgtggttatatcgaaaaacatggtaaaccgcttgcactgtacagcgacaaagccagtgtattcaggatcaacaataaaaatgcaaccggcggcgacggcgatacacagtttggccgtgcgatgcacgaactgaacattcagaccatctgtgcagaaaccagcgcagcaaaaggtcgtgttgaacgggcgcatcagacccttcaggacagactggtcaaggaactcaggcttcagggcatcagcaccatggaagctgcaaacgcatttgccgaagagttcatgaacgattacaaccgacgtttctcaaaagcgcctcgccaggagttcgatgttcaccgggaaatggatgtcgatgatgatcttgatatggtgtttacttggcgtgaagcccgccgcgtgtcaaaatcactcacggtgcagtacgacaaagtgctttatctcattgaagacagcgaattcagtcgtcgggcaattggtaaatatattgatgtttggcattaccctgacggacataaagagctccgacttaatggcatatcacttccctactccacctatgacaaactgtcagaaatcgatcagggtgccattgtggacaataaacgtcttggccgtgcgctggaaatggcgcaactggtgcaggccgaacgggataataaccggtcacaatcagtgccatccggtgacggcccttcacgcaggcgcaaagcccccacgacgaagaaatcacagcgttcactcgatgaggacgatatgttcaatgcactggtaaaacttcagtcacgatctgaagaaatatttggtaagaaacagatatga

SEQ ID NO: 101450 - DNA, 918 bp, Enterobacter aerogenes
atgagtcaaatatttttgcgccaaaatgatagtaaaaacattgagttactaatggcaatgaggcggacttactcacaggttaaatttgttaactgggtagtgttttttcttagtgtcgtaatatctgtcgctattgtaatatttactacagtgataaagaaaatggggctattccctcatttgactatagctccttatctcggttattacggtataatcgtgttggtcatcacaattattttttccacaatgatttcctcaatgaaaaaatgtgcagccactattcaggaaatgtttgactgtgatgtcttacacattccatggagtgaattaaaagtagggaagccggttggcagagaaaatgtctttaaggcttcaaggtattacaaaaaaagaaacaaaaatgatgaatttattaactggtatctaaataaagattacgatgctaatgaaaacgtattggcattattatgccatgcgaaaaattttggctgggataaggcacagcgcgatgtaatgagcaaaatatattttatcactatgttactttcctttttggtacttctagcatatggtttatggtctaaatcctcgctggaagattttttgttttatattgttttcatgctcccgttttttagacatgtgataatgttatacgttgaaaacaacaaatctattaatcgaattatgcgtgttaaagattttattgagaaaaaaatacagaatataaagataagtggcattataaacgatgacatcttatctcatgatttaagatcgattcaggatgaggtttatgcccatcgatcgacctcgaatcctgtgcccaattgtctccacagattcatgcggaagaataatgaggctatttatgatgattattttgaagagaacttgaaaattttaccccgatag

SEQ ID NO: 101451 - DNA, 999 bp, Enterobacter aerogenes
atggctcttacggtgactgctgcgtttaacgagtttcagcgcaatattgtaaatctagatagctctcagactgatcgagctagagccagtagagattggttattgggcagaatgaacacatttccaaataatgatgtttatttccccataatataccctgatatacatacaggttttggttcttttgctagacgcacaaaaatccgccctttagatgatatagatcttatgtttggtctcgatggtgatgattgtgtatacagcgagagtgatggaaaaataataatcactgcgcgtgaaggaaccgttcgcttaaaatactataagcatgatggcacaaattttattaactctagaaaaataataaacagttttatctcaagcctaaatcaaattccgcagtatgataaggctgatgtaaaaagaaatcaggaagcagctactctgaagctaaaatcctatgactggaattttgatatagttcctgcattcattactactccagattcatttggcaagacatattatttaataccagatgggaatggtcattggaagaagacagatccacgaattgacaagcaaaaagttactgatcttaatgttaagctctcaggaaacatgttaaatgtcattcgtgtaataaaatattggcaaaaacgtccgaccatgccttcaatgagtagttacttgttagagacaatgctacttaactacttcaacggtcgatcagaatgttatcaatgggtcgatttagagattgtcaatgttttaggttacttagcctctgctatatttagtccagtgtacgatcacaaaggcatacaaggaaacataaacaaccttagtgatgatgataaattaaagatatctatccgctgttatcttgaccaaggaaaagcaacggaagcccgtaattacgaaagtcaaaataaccacagagcgtccattaacaaatggcaggatgtttttggtgtcaacttcccatcatacggatga

SEQ ID NO: 101452 - DNA, 252 bp, Enterobacter aerogenes
atgctgaatgaaagagaccctgaggcaatagttctgatctacggctataaaactgtaggtggcacggaagtcgcagaagcagatgttctcgttgaaatgcagtctatatgcttagacaaggctgataatctgacaggaaatcgtaaagttgttccttccggtggtgacgtttctgtttggttaggctggaaagacgattatcgtacaaaaatgtttttagaagatgcccaaactcctgataaagacgaatga

SEQ ID NO: 101453 - DNA, 609 bp, Enterobacter aerogenes
ttgactgagctaactactaagcgccctgacactgatctggcccattttgcctggtgtatcatcgtagcggttaagcttgcacggaaagagggaaaatctctcacgcctcttcaaacacacatgttcattatgcagtggctttcaaccgcccagaagcgcaaaatattccctaaatctatggcacctgacattatattgttacaggagcaaggaaaactgaaggggcccgctgcacggctttacagcaaggtggagtatatctggttggcaagttctggtgagttagccggtcagagcacactgtttcggtttacttgtatgatcgacactctacgatcaatgggctggaaggattatcttctatcggatgcagactgggagaataattggatagctggaagtgaggtatcggctatatatactcaaaagtctcggcttcacagttcagtttcagagtcaggacaattgatcgtaccacttgaagtacgaattaccggtaatcctgatggcatcttcccactacttaaccaatgtaacttaaaaatagcaatacagccttttgaatttgagtatacagtgttgttcattcaaccagatgctgaaatttaa

SEQ ID NO: 101454 - DNA, 573 bp, Enterobacter aerogenes
atgcttattaaaaactccaacactgcgtttggcctgatatctatagccttacattggctgacagcagtagctgtttatgcaatgtttgccttagggctatggatggttacattaggatattatgatgtctggtatcacaaagcacctgatatacataaagggatcggcatccttttaatgatgggattgattataaggttagtatggagagtcatctcaccacctccagcagcgttaaaaagctattcacggctgacacgagctggatctggctttgctcacctgttcctgtatacagtcttgctaacgattgtcatcagcggctatctgatatctacagccgatggcaaaccaataaatgtatttggaatatttgaatttccggcgacattaacagataaagcctttcaggctgaccttgctggttcaatccatctctgggctgcctgggcgattattgttctttctgtaatgcatggtctgatggccgtgaaacaccatatcattgataaagatgaaactcttctcagaatgcttgggaaagcaaagtcacaaaccggagtaaaaaaatga

SEQ ID NO: 101455 - DNA, 573 bp, Enterobacter aerogenes
atgaaaaaacacctgctgggtctctcactgtttgccgttctgtttgcatccggatcagctgttgcggctgattataaaattgataaagaaggtcaacacgcatttatcaatttcaagattaaacacctcggctatagctggttatatggtaccttcaaagactttgacggtacatttacttatgatgaagctaacccggcgtctgacaaagtcagtgttaaaattgcaacgggtagcctcgatactagccatgctgaacgtgataagcatctgcgtagtgcggatttcctgaatgcggaaaaattcccggaagcaacgtttgtttccagagaagtgaaacaaaatggtgaaggcctcgatattactggcgacctaacattaaatggtgtcacgcacccggtaacgcttgatgcgaaactcgtcggtaaaggcgatgatccatggggtgggaaacgtgcaggttttgaagcaaccggcaatatccatcttaaagactttaatatcaaaagcgatcttgggccagcctcgcaggacgttgagctgattatatctgtcgaaggtattcagcagtag

SEQ ID NO: 101456 - DNA, 495 bp, Enterobacter aerogenes
atgattaacatccggatgaccaaattagccattttccctttggctgtttttattttatttgctcctctgacttcctttgccgaaactttcccggcgaaagtggtgcgagttattgatggtgatactgtccaggtttatgacggtgccacaaataccagaatacggctctacgggattgatgccccggagagtaaacaagccttcggtcagaaggcaaagcaagccatgatccagctggccgcaaaccaggttgttgttattcaggaccacgggcaggacgtatatggtcgtatgcttggtaccatctatctgaacaaccaggatcttaatgccgttatggtcgcagaaggcatggcctgggcatatcgctatcagggccggttaactgtacctcaatatggctctcttgagcagaacgcccgtaatgcaggtaaagggctgtggtcggacccatacgctgtcgagccacgtcagtggcgtaaagcgaataattaa

SEQ ID NO: 101457 - DNA, 1134 bp, Enterobacter aerogenes
atgaaaataaaaaaactaacgacgacagataaaaaacacctcagaagtaaattagaagcactactccaggaatgtgaaaatgaaggaaagaatccgggtattgtgatgcataattttgtttcttctagtttgaaaaatataaatatggatgtaaaaaaagaaaccgctgaacaatacagagaattgtttaaatcaaaaataaaaaaagattctgatgcggatttggtttcacatttattagattgtggaactaaaaacagttttgataaaacaagatctgcttttagattttgtatagccgaagaaataaaaaaacttataaacgaatctgataaagccaggaaagaaaaaaatacagagttaatgaaagaaaaaactatcgaagcatataaacaatatattttatttgaaaaggaatttttatcagattctcgtttggtctggggagatatttctcacaaaaaaagagggtctttgagtaagaaaaaaacaatgaatagtgttgctacaacacgtagtgttttcgatggtttgaagtcaaaacaagctcttatggacaggtacggtatgattctagccgtcagttcgttgactgggtgtagaccagcagagatccaaaaaggtatcagttttgaaatcgaaaatggaaaaattcatatgtcgattagtggagccaaagttggagatgacagaggacaagaaaccaggaaactaacatttaatttaaaggattatgccgaagatgaccagatgaattatattctttcgaaatttagttatggtcaaaattacttaaattataaatgtagtaaaaaggattataatagccttagacaatatttatatatcaaccataacggtttttctctctatacattgaggcatagagtatcgtcgcaattaaaaaaagaaggcttaccagaggatattgttgctgggttcttaggtcatagaacgacgagaagccaaagcaactatggatattcaaagtcagcattgaaggggctttcagttgattctgttgaatgtacaagtgatattaaaattgatagtcgttctaaatatacccgaacacctaaaaccaaaaacaatggaggggttggaaacaatttgcccaaagggcctaagatctga

SEQ ID NO: 101458 - DNA, 300 bp, Enterobacter aerogenes
atgttccgtctgtggttgtgtaagggcagccagtacggcagtgacgactggctgcgcttttgccgggctaataacctggcaccgagcatgaacaagcgtggcaactgccaggataatgcggtggccgaattgttcttcagttcactgaaaaaagaacgcattagtaagagaatatacaaaaaccgggatctggcccgggtggatgtcttcgattacattgaagtgttctacaatcgggcccggcgccacagtcaccccggcggcgtcagtccggaggccttcgaacaggcctcgtcgtga

SEQ ID NO: 101459 - DNA, 807 bp, Enterobacter aerogenes
atgtcggcgcgcgtgatgaactgcctggaggtactggcccccagggtggaacagtattcaattgatgagatgttcctcgacctgaccggcctggagcactgtatggggcttgaggacttcggccggcagctgcgtcagcacgtgtatgactgtacccgcctgaccattggcgtgggcgccggaccaaccaaaaccctcgcaaaatcagcccagtgggcctcaaaagagtggaaacagtttcgtggcgtactcgctctgaccaggggaaatccgcagagaacgcggaaactgctttcactgcaaccggttgaagaaatctggggggtgggtaaccgtattgcacgcaagctgaatgtgctgggcataaagaccgcgctcgatctggccctgacgaacccgaccttcatccgcaaaaatttttctgtggtcctagagcgaacggtacgtgaactgaacggggaaagctgcctttcgcttgaggaagcccctccgacgaaacagcaaattgtctgcagtcgcagttttggtgtgaagatcaaggagtacgagtcgctccgccaggctatctgtcagcacgctgagcgggcctctgaaaagctgcgtaaagagcatcagtattgccggcatatttccgtttccatcaaaacgtctccgttcgccgttaaagagccttactacggcaacgtggccacggagaaactgcttacacccactcaggtaccagggacatcattgctgccgccacaacggctctggagcgtatcaggaaggatgggcaccggtatgccaaagcctgagttatgctga

SEQ ID NO: 101460 - DNA, 246 bp, Enterobacter aerogenes
atgaatgctgaacacaccgactacggctggcttttcagtgaaccggctgaagaaatttccggcgatattgttattgatccggaactccttccggaggagcttaaactcgccgctatccagattttgctggatcggattgaccgcgatacggcagagaaaaaacttgccgaattaatacagaagcttgagtttgatatcaccgctgccgaactgtcagcgtatctttttaaaccgggccatgcctga

SEQ ID NO: 101461 - DNA, 219 bp, Enterobacter aerogenes
atgatggtaacaggaattaacacggtacgtatcggcggtgaagtgaagcatatcaccgagctcgatgcgctaacactcatgcatgaatggtccaagctgaaaaaagagaatgctcacctgtatgactataaccgtcaggttaaccggggctggcgcggctttgtcctgcgcctgatgggtatccatttgcctgtcagagaccattcgcccggtatttaa

SEQ ID NO: 101462 - DNA, 327 bp, Enterobacter aerogenes
atgacaacagaacattcttttcgcggttattacagcaggatgggggattatcttttcccggtacatccggacaactcatattatgacgctgaagcccgtcagtatatttctgagttattgcatcgccacgcggggaatatcaattctgcccgggaatttctggcgctgctggagacatttgtaccggaaagtgtgcagcacagcatcgataatccctcatggtcaaccgggaagcaaattgaacgactgaacatggcaaaaggactcattgaaagtcgggttcgcgagcgttttgggtcagaattttcaggggatattacaccttaa

SEQ ID NO: 101463 - DNA, 1254 bp, Enterobacter aerogenes
atgagtctactcagaaaagaagctatagagcaccagaataacacatctcatggtgagataattattccggcctcatttggtatgacattcagtgccgtcaccactcttcttttactgctcttcatcatcctgtttatttattttggcagttatacccgtaaggcacatctcaccggcatcgttatgccttcatccggcctgataaaaatcaccccacagtacgctggaaatgtcaccagcctgaccattcaggaaggacagcatgtaacggccggtgaggcattatatcatctcagtggggaacattataacgaccagggcgccggcacgctggccgccatgagcctctcactgaaaacccagcacgccatgctggtctcacagcaaaccctcgaacaacacgacaacatcctgcaacagcaggctatccggcagcgtactgcggagctacaaccccagataagcagtgcagtacagcgcctcaccgaggcagaacggcgagcagaactggctacagccgtcatgagtcgttatcgtaagctgcttatcacccattatgtctctgatgttgagtttcagcagaaacagattgaggtgtcttcagcgcaggaaaatgttgaaaaccagcgtcaggcgcttttgcaactgcgctccgcacaggacgcagctcaggatgatctgattcatcttattgcccagggaaagagcaggcaaactgaactggatcggcaactgcagggactccagcagcagctgattgaactggcaggtcaggagcatttcacgctgactgcccctgtgtccgggactgtggcagccgtacttatccgccaggggcagtcagtcaaatcttccgaagcagtcatgacgcttgttccggataatgcccgtttacaaatcgagctttatgccaccagtcagaatgctggctttattcagccggggcagcgggtggcactgcggtttgctgccttcccttatcagaagtttggcgttcagtacgggactatccgtgaaatcagccgtacaacgctgactccctctgatttactctctgtatcccctgtgacctggaaggagaatgaaggtcattaccgcgtcattgtagagcctgagaatacctttatcctggcgtatggaaaaaaagaacctcttcgtcccggtatggtccttgagggagatgtcagccttgatacacgtcatttatgggagtggctgacagaaccactctggagccttaaagggaaactgtaa

SEQ ID NO: 101464 - DNA, 2244 bp, Enterobacter aerogenes
atggaaccaatcaaatggacaggaagaaaacgcctccccgtcatccgtcagacagagtccgctgaatgcggactggcgtgtctggccatgatcgcttgctggcatggactgctgacggacgtacccgcgctccgtgaacgattcagtatcagtacacagggaatgaccttgcagcggctgatggagtgcgcgtcaggtatccggctggcctcacgtgcagtacggttagagccggaagacctgaaatcgctttctctcccgtgcattctgcactggaacataaatcatttcgttgttctccataaggtacaagggagcaaactggtcatccatgatccggataaaggaaaggtaactctctctctacaggatgccggaaaacacttcaccggcgttgcgctggagctgacaccagccggcgatttcacggtcagagatgaaagaaagaaaattcgactacgccagttgacaggtaagacacccggccttcaggcagctatgttgcgcattgtcattttcgccctggctctggaggttctgacgctggggagccctcttatcaatcagatggtgatcgatgaggttctggtcgcggcagaccggagtctgttgaccgtcattatcattgcactgctgctgctgtcactgacccagatgctgctgtctctggcccgccagtgggccagtattaccttgtccgtcaattttaatatgcagtggacggcccgggtgttccatcatcttgtacgtctccctctggcctggtttgacgcacgaagtaaagggagtatcaatgcccgctttgaggcagttgataccatccagcatgcgctgaccgcacagatactggaaggtattctggatgtgctgcttgtggtgaccacactatgcatgatgctgttgtacagtcctgaaatgacgctgatagccttgctggcagctattatctacggggtgctgagagcactgtggtatccctccctgcggcagtcagcagaagatgcctgggatgccggggccagggagtcagggtattttcttgaaaccctcaacgggatcctgagtctgagaataaacggggttactccataccgtgaggctgcctggctgaatctcaatgtcacccgaagaaatacgcagttgcgccagagccgtctgctgatgtgctatgacattgcccacactctgaccggcagcgtggtatcggcaatcattttgtggaaaggcgccggtgaagtgctgaacggcacctttaccgtcggcatgctggttgcctatttgtcttatcaaatgcgtttttcatccagtatcagcagtctgaccgataaatttttttcctggcgcatgctagatatctataacgaacgtctggctgacattgtgctgaccccgacagagggtcatcagcaacaacccgttcaggaagacaacagcgcgtcagttaccccaccaatatctcgtgggaccgtagccggagatgaccatccccctttatccctagagcacgttaccttcagccataagggcggtaacaaaccgatactccgcggagtatcgctgacgctgcatcctggtgaagtggttgccattaccggcaaatccgggtgcggtaagtcaacgctggtgaaacttatccttggggtccatattcctgacgaagggacaatcagaaccttttgcatactgcaaacccacccggattattttcaggtacgccggcggatcggtacagtgcttcaggatgatcagcttttcagcggctccattgcagataacatcatttttttcagcgaggatcgcaatcatgaacgaatggcccggtgtgctcagctggcgcttatcgacagcgatatcatggcaatgccgatgggatatcagacattaatcggtgaaaccggtggtgggctttccggagggcaaaagcaacgtgtacttctggcaagagcgttgtacaaaatgccggggtttttgttactggatgaagcaaccagtcaccttgatgttgagagtgagatccagataagccagacgcttcgccaactggggcttcctgtgctgctgattgcccatcgaccggaaacgatagcatctgctgaccgtgttctgtatctggctgatggtaaccttacggagctgaagcacccgtgcactgtcgacgatggtgacgtaacgtgtgctcctgctgatgacagagtgggggatgttcgacaaaacgtcctcacacgttgtaatgccagtcagtga

SEQ ID NO: 101465 - DNA, 207 bp, Enterobacter aerogenes
atgagtttaaagggccatgtttttaataaggatgtattgattgtatctatttctatgtttttttcattttatgctgtaagaatttcctccttaaggatagtttcagatggaaacaatgtgttggatgcttttattgcgttattttttgtgatcggtttttttgtctctgtcaagaaaacaataaattttattttttcaatattgtag

SEQ ID NO: 101466 - DNA, 639 bp, Enterobacter aerogenes
atgaacctatttatatataacaagaacattgcggcgatctttcttggagtggttcttttatcaattcttataacgttatcaccagctatcacgctacattatgtagacattgatatagtatttttcagtattctaatgtcacattttataatggtaaccttattgtattttttatgcttaagaaaaataacgggatgtataatccgagtcaaatccgatagcgcaacggtcaagttaacctctttattattcttggtgatcgtttttattcagttagcggtttattgctatagagattctttttttcattatgagacatctcatataaactggatggtagttatagttttgacattagtcgtaccctactacgaagagattgtttacagagtttgcgctttcggttttctaagtacgatttataaaaaaaatttaataatcccatgtgtacttacatctctgttcttttgcttaatgcattttcagtattataacattcttgatcagatagttctttttgttgtgtctgttttactattaatggtaaggattaaaagccaaagccctttatacccaatgctaatgcattcagggatgaatgcctttatcattctgttaaatattaaaataaccttataa

SEQ ID NO: 101467 - DNA, 201 bp, Enterobacter aerogenes
atgaaaaaatcgcgtttcactgacagccagatcatgaccatccttaaacaagccgaggccggaactccggtggctgaactgtgccgtgaacatggtatgagcagtgccagtttctataagtggcgctcacgctttggcggaatgaatgccatcgatgatggcccgtctgaaagagttgggggacgaaaaccgccgtcttaa

SEQ ID NO: 101468 - DNA, 291 bp, Enterobacter aerogenes
atggacgctccggaatatgggaaacaggtcaacttctcggacgacccggactgtgggaaacaggtcaacttcgcggacggcccggactgtgggacggaggtcaacttcgcggacggcccggactgtgggaaacaggtcaacttcgcggacgtcccggactgtgggacggaggtcaacttcgcggatggccgggactgtgggaaacaggtcaacttcgtggacggccagggccgcgggaaacaccacatgtataggcacacacagatagcgtgttcagggcaacaaatgtga

SEQ ID NO: 101469 - DNA, 522 bp, Enterobacter aerogenes
atgtctgaccgtgccactaccacagcttccttaacgttcgagtcgctttatggcacccatcacggctggttgaaaagttggctgacgcgcaaactccagtctgcctttgatgcagatgacattgcccaggacacttttttgcgggtaatgagcagcgaaacgctctcgacgatccgcgatcctcgctctttcctgtgcactatcgccaaacgcgtgatggtggacctgtttcgccgaaacgcgctggaaaaagcgtatctggagatgctggcgcttatgccggagggggtagcgccttcacctgaggaacgcgaaagccagctcgagaccctacaactcgtcgacagcatgctggacgggctaaacggaaaaacacgtgaagcgtttctgctttcgcaactggatggcctgacatacagcgagattgcgcacaaactcggtgtttccgtcagctccgtgaaaaaatacgtggcgaaagccgtcgagcactgcctgctgtttcgtctggagcatgggttatga

SEQ ID NO: 101470 - DNA, 954 bp, Enterobacter aerogenes
atgaatccttcgttaaccgattcccgccgtcaggcgctgcgttcagcttcccactggtatgccgtgctaagcggcgagcgcgtcagcccacaacaggaagcgcgctggcaacagtggtatgaacaggatcaggataaccagtgggcctggcagcaggttgaaaacctgcgcaaccagcttggcagtgtgcctggcgacgttgccagccgggcgctgcacgatacccgcctcacccgccgtcacgtgatgaaaggattactgctgttgctcggcgctggcggaggctggcaactctggcagtcggaaaccggcgaaggtctgagggcagattaccgcaccgccaaaggcgcagtcagccgtcagcaactggaagatggctccctgctcacgctgaatacccaaagcgcggcggatgtgcgttttgatgcgcatcagcgtaccgtccggctctggttcggtgaaatcgccattactaccgcgaaagatgcgcagcaacgccccttccgcgtcctgacccgtcagggccaactcaccgctttagggacagaatttaccgtccgccagcaggataatttcacgcagcttgacgtgcagcagcacgccgtggaagtgcttctcgtcagtgcccccgcgcaaaaacgcatcgtgaacgctggtgaaagcctgcagttcagcgcctctgagtttggcgcagtgaaaccgctggatgacgagagtacaagctggacgaagggcatcctgagcttcagcgataaaccgctgggtgaggtgatagccacgctaagccgttaccgcaacggcgtgctgcgctgcgatcccgccgttgccgggctgcgcctgagcgggacgttcccgctgaaaaataccgatgcgatcctgaacgttatcgctcaaacgcttcccgttaaaattcagtctattacgcggtactggataaacatttcaccgctgtaa

SEQ ID NO: 101471 - DNA, 2325 bp, Enterobacter aerogenes
atgacgccgttacgcgtttttcgtaaaacaactcctttggttaacgccattcgcctgagcctgctgccgctggccggtctctcgttttccgcttttgctgcacaggttgatatcgcaccgggatcgctcgacaaagcgctcaatcagtatgccgcacacagcagaattaccctctcggttgacgccagcctgacgcgcggcaagcagagcaacggcctgcacggagattacgacgtcgagagcggcctgcaacagctgctggacggcagcggactgcaggtaaaaccgctgggaaataacagctggacgctggagaccgcgcccgcgccaaaagaagatgccctgaccgtggtcggcgactggctgggcgatgcgcgtgaaaacgacgtatttgaacatgctggcgcgcgtgacgtgatccgccgtgaggatttcgccaaaaccggcgcaaccaccatgcgtgaggtgcttaaccgcatccctggcgtcagcgcgccggaaaacaacggcaccggcagccacgacctggcgatgaactttggcatccggggcctgaacccacgcctcgccagccgctcgaccgtcctgatggacggcatccccgtcccctttgccccttacggtcagccgcagctttcactggctcccgtttcgctcggcaacatggatgccattgacgtggtgcgcggtggtggtgcggtgcgttacggaccgcagagcgtgggcggcgtggtgaactttgttacccgcgccattccgcaggactttggtatcgaggcgggggtggaaggtcagctcagcccaacctcttcacaaaacaacccgaaagagacgcacaacctgatggtgggcggcacagcggacaacggttttggcaccgcgctgctctactccggcacgcgcggcagtgactggcgcgagcacagcgccacccgcatcgacgacctgatgctgaaaagcaaatatgcgccgaatgaggtgcacaccttcaacagcctgctgcaatattacgatggtgaagccgacatgcccggcggcctgtcccgcgcggattacgacgccgatcgctggcaatccacccgcccgtatgaccgcttctggggccgtcgcaagctggcgagcctgggctaccagttccagccggacagccagcataaattcaacattcaggggttctacacccaaaccctgcgcagcggctacctggagcaaggcaaacgcatcaccctctcgccgcgtaactactgggtgcgcggtattgagccacgctacagccagagctttatgatcggcccttccgcgcacgaagtgggcgtgggctatcgctatgtgaatgaatcaacgcatgaaatgcgttactacaccgccaccagcagcgggcagttgccgtccggctcaagcccttacgaccgcgacacgcgttccggcaccgaggcgcacgcctggtatctggatgacaaaatcgacatcggcaactggaccatcacgccgggtatgcgtttcgaacatatcgagtcataccagaacaacgccatcaaaggcacgcacgaagaggtgagctataacgcaccgcttccggcgttgaacgtgctctatcacctgactgatagctggaatctttatgcaaacactgaaggctcgttcggcaccgtacagtacagccagattggcaaggctgtgcaaagcggcaatgtggaaccggaaaaagcgcgaacctgggaactcggtacccgctacgacgacggcgcgctgacggcggaaatggggctgttcctgattaactttaacaatcagtacgactccaaccagaccaacgacaccgtcactgcacgtggcaaaacgcgccataccgggctggaaacgcaggcacgttacgacctgggtacgctaacgccaacgcttgataacgtttccgtctacgccagctatgcgtatgtgaacgcggaaatccgcgagaaaggcgacacctatggcaatcaggtgccattctccccgaaacataaaggcacgctgggcgtggactacaagccgggcaactggacgttcaatctgaacagcgatttccagtccagccagtttgcggataacgccaatacggtgaaagagagcgccgacggcagtaccggccgcattcccggcttcatgctctggggcgcacgcgtggcgtatgactttggcccgcagatggcagatctgaacctggcgttcggtgtgaaaaacatcttcgaccaggactacttcatccgctcttatgacgacaacaacaaaggcatctacgcaggccagccgcgcacgctgtatatgcaggggtcgttgaagttctga

SEQ ID NO: 101472 - DNA, 903 bp, Enterobacter aerogenes
atgttggcatttatccgttttctttttgcaggcctgctgctggtgatcggccacgcctttgccgccacggttcaggacgaacacggcacgtttacactcgataaaacgccacaacggattgtggtgctggaactctcgttcgccgatgcgctggccgccgtggacgtcagcccgatcggtattgccgacgataacgatgcaaaacgcatcctgcccgaagtgcgtgcgcacctgaaaccgtggcagtccgtcggaacgcgcgcgcagccgagcctggaagccattgctgccctgaaaccagacctgatcattgccgacagcagtcgccatgcggggatttacaccgccttgcagcaaatcgcgccggtactgctgcttaagtcccgcaacgaaacctacgctgaaaatttgcactcagcggctatcatcggcgaagtggtaggtaaaaaacgagagatgcaggcgcgtctggaacaacataaagagaagatggcgcagtgggccagccagcttcccacagggacacgcgtggcctttggcacatcacgcgaacagctattcaacctgcatacccaggagacctggaccggcagcgtgctggcttctctggggctgaacgttcccgctgcgatggcgggcgcgtccatgccgtccatcggcctggagcaactgctggcggtcaatcctgcctggctgctggttgcccactatcgcgaagagagcattgttaaacgctggcaacaagatccgctctggcagatattaaccgccgcgcagaagcagcaggttgcttcagtcgacagtaacgcctgggcgcggatgcgcggtatttttgccgcagagcgtattgccgctgacacggtaaaaatcttccaccatcagccgcttaccgatgtgaaatga

SEQ ID NO: 101473 - DNA, 999 bp, Enterobacter aerogenes
atgaccgcgctaaaacacccggtgctgctgtgggggcttcccgttgcagtacttattattattttctggctgagtctgttttgctactcggccattcctgtttccggagcagacgcaatccgcgccctgctgcctggacacacgccaacgctaccagaagcgctggtgcaaaaccttcgtttgccgcgaagcctggtcgccgttctgatcggcgcaagcctggcgctcgcgggcacgctgctgcaaaccctgacccacaacccaatggcctctccttcactgctcggcattaacagcggcgcggcgctggctatggcgcttaccagcgcgctgagtccgacgccggttgcaggctattccctgtcgttcatcgcggcatgcgggggcggcgtgagctggctgctggtcatgaccgcaggaggcgggtttcgtcatacccaggacagaaacaaactgatcctcgcgggtatcgcgctgtcggccttttgtatggccctgacccgcatcaccctgctgctggccgaagatcatgcttacggcatcttttactggctggcaggcggagtgtcccacgcccactggcaggatgtctggcagctcttgccggtggtggtcactgcagtccctgtcgtgttgctgctggcgaatcaactgaacctgctcaacgtcagcgacagtaccgcccatacgctgggagtgaacctgccgagactacgtttgatcatcaatatgttagtgctgcttctggttggcgcgtgcgtcagtgtggcaggtccggtggcgtttatcggcctgctggtgccacatctggcgcgcttctgggcaggcttcgatcagcgcaacgtactgccggtgagcatgctgctgggggccacgctgatgctgatggcagatgtactcgcacgcgcgctggccttccccggcgatctgcccgcaggcgcagtgctggcgctgattggcagtccttgctttgtctggctggtgaggaggcgaggatga

SEQ ID NO: 101474 - DNA, 957 bp, Enterobacter aerogenes
atgaaaattgcgctggtcattttcatcacccttgccctggcaggctgtgcgctgttatcactccatatgggggtgatccccgtgccgtggcgcgcgctgctgaccgactggcaggacggacgcgagcattattatgtattgatggagtaccgactgccgcgcttgctgctggcactgtttgtcggtgcagccctcgccgtggcgggcgtgctggtacaggggattgtgcgtaacccgctagcatcaccggatattctcggcattaaccatgccgccagccttgcctctgtgggagcactgcttcttatgccatcactatccgtgatggtgctgccgctgctggcctttgcgggcggtatggcggggttgatcttgctgaagatgctggcaaagacccaccagccgatgaagctggcgctcaccggcgtggcgctttccgcctgctgggcgagcctgacggattacctgatgctcctgcacccgcaggatgtaaacagtgccctgctgtggctgacgggtagcttatgggggcgcgactggcactttgtgaagattgccgtgccgttgctcattctgtttttgccgctgagcctgcgcttttgtcgcgatctcgacctgctggcgctgggcgatgcacgagcagccacgctcggcgtgtcggttcagcgcacccggttccaggggctgatgctggctgtcgcgatgacagcaaccggcgtggccgtctgtggcccgataagttttattggtctcgtcgtgccgcacatggtgcgcaggatcgccggcgggcgtcaccgctggctgatgcccgtttcggccctgacgggcgcgttgttgctggtcattgccgatctgctggcacgaatcattcatccgccgctggagcttccggcaggcgtgctgaccgccattatcggcgcaccgtggtttgtctggctgcttgtgagaatgcgataa

SEQ ID NO: 101475 - DNA, 768 bp, Enterobacter aerogenes; identical to SEQ ID NO: 40324

SEQ ID NO: 101476 - DNA, 252 bp, Enterobacter aerogenes
atgctgaaagatgacccgatgtccggccatgtcttcatcttccggggccgcagcggcagtaaggtcaaactgctgtggtccaccggcgacgagctgtgcctgctgaccaaacggctggaacgcggccgcttcgcctggccctctgcccgcgatggcaaagtgttcctgaccccggcgcagctggcaatgcttctggaaggcatcgactggcggcagcctaaaagactgcttacgtccctgaccatgttgtag

SEQ ID NO: 101477 - DNA, 1011 bp, Enterobacter aerogenes
atgaaagccgttggtttctggcaacccggggaaagtacatccgttattgaagatttgtcgcttccccacccatccatgcccaaggggcgtgatcttttgatcagagtcagggcggtcgcggttaacccacgggacctgaaaagccggcgaaacatcagtccctctgcaggcaatccggtagttatgggatacgacgcttccggtgttgttgaagcaaccggaccagatgtgacgctgttcaggccaggtgaccacgttttctatgccggtgtgctcgatcgccagggagccaacgcagagtttcagctggttgacgaacgcattacggggataaagccggcagcactaagttttgaagctgcagcgtcggttcctctgaccggtctgacagcctgggaaatgttatttgatcgtctgcagttgtcagtgaacggagatgctgatcagaccctgttgatgcttggcggtgcgggcggagtcccttgtatggctatacagcttgcccgcactctgagtcgggtgaacatcatcgggactgcctcccggcaggagagtgtcagagcggttcgcgggtttggtgcgcattatgtcctggatcattcatgtgcgcttgcgccacaggttgccagccttgctggactccctcccattacccggattttctcaacgtacaccacgccatctgcctgggaaaatatggccgaaattattgccccacaaggccgtatcggactcatcgacgaccctgaaccactggatctgcgtttgatcaaatttaagagcgtttctgttcactgggaggcaatgtttacccgccccatgcatgctactgcggacatgtctaaacagcatgatattcttaacaaactctcatgcatgctggattccggtaagctcaaacctccgttgctggcagagtatggcaggctgaatgctaaagcacttcgccgggctcatgaggacatggaaaataaaaatgtgaacgggaaaattgttttttcagggttctga

SEQ ID NO: 101478 - DNA, 1950 bp, Enterobacter aerogenes
gtgctgttcgatgataatccaccggaggcaccagcttcacatttacgcagcctgacattcagaacccgtctttgcaagccggtggatcagaatggagcctccgttgagtttagccctttttacaacgcggtgattggctcccggggcagtggtaagtccacgcttatcgaaagtattcgtctggccatgcgaaaaaacgaagggctgactgcgtcacaaatcaataagctgaacctgtttagtcagacaggaatgggcatggatacagattctttcatcgaatgtgtgttccacaaagagggcaccgattttcggctcagctggcggcccggtggttgtcatgaattgcatatcttcagcgaaggtcagtgggtgccggacaatcactggtcagcagaccgttttcccctctcgatatacagccagaaaatgctctacgaactggcatcggacacaggggcattcctgcgcgtctgtgacgagagtccgatggtcaacaaacgagcctggaaagagcgctgggatcaactggaaagggactacctgaatgagcaaatcacgctacgtggtcacctggccagccagacgattgcgggaaaactacagggggagttgtctgatgctgaacgggccatcagtcagttgcggtcgagcgcttactatcctgtttgcacccgtctggccacggcccgagctgaactgtctgcggcaacgcttcctctggagcataatgaactgcgtgtcgctggtctgagggcgcaggagaaagaacccgtgcaagtccctgagctccaggtggagtcgtctgcgccactgacagcatttatgacgcgtcttttggacgtacagcaaaagtatgaccagcgtcttgacactctgttgtcgggctatgccgcggaactccgtaccattaagcaggagcccccttttctcgcattggaagaggcggttcgcaaccaggaggaaaccgtacaacgtgaggccatggtgttacgagaacaggggctcaatccggacgtcctcgatgagctgatgacgcgcagtgagtcgctgaaatcggaactgagaaattacgccgatcttgacgggacgatcgcggcctccgcagcgaggtccaaaggattactggctgaaatgcgtaaccatcggatggtattgacggaaaagcgaaaggtgtttctgtcctctctgtctctcagcgcactggaaattaaaattctgccgctctgtgccccgcatgaagacaccgtatctggttatcaggcagtaaccggcatcggaaactttgccgatcgtatctatgataatggtgacggtagcgggctacttcatggcttcatcagcctgcgcccgtatagtccgctaccgtcggctacggaaaacaaatatcttgcgctggatacgcttaaagcgctgcatcttgctatccatcgcgaggagcctggggtcggggctgagctccacggtgctttcagaaatcgccttaaaggtctgaatgaagcgcaactggatgccctgcaatgctggtatccggatgatgggatacacattcggtaccagacacccggaggagggatggaagatatttcctctgcttcgccgggacaaaaaggagctagcatgttgcagttcctcctgtcgtatggcaccgatcccctcctgctggatcaaccagaagacgacttggactgcctgatgctgagcatgagtgtgatccctgccatcatggcaaacaagaaacgccggcagctgattatcgtgtcgcattctgccccaatagtggtcaatggtgatgcggaatacgttatcagtatgcaacacgatcgctctggcctgtacccgggactttgtggagcgcttcaggaaacgccggtgaaggagctgatttgccggcaaatggagggtggggaaaaagcatttcgttcccgctatgagcggatactcagctaa

SEQ ID NO: 101479 - DNA, 1830 bp, Enterobacter aerogenes
atgcgtatcgaccgacgtctgagcagggatgtactcaccaagcatcagctctattttattgaatgctggtccaacttctgccataaaaacagtccggatactgaccgggtcgggtacagcaatccactcagtactatccgagaactgctgtttctttacgaaatggaagatcgtttcagtgccgataagaaaagactccgggttgccactgaactactcgagttactcgaaaccgatctcgttctcaggagagaggcatttgaggacatccccgctcaactggtgagtcttctggacagagatttactggttgatcccactcgcagcccggtggaaaaacgacctcgtcttatctgtagcctctgtgtacaactggcggatatcatcgaggccagttatatcactgaggctcttgagatgcttgaacaggagttgtttacagacccccctctggatgaaaaccatgcgcgggatatttactcactgacgaacggagtgatgagtttactcctcacccggggaatgacgctgacggaatgttacctgctgtacatcaatattttcagaaatgtgagccctgaaccagacgctttccgggccgcctttcattcgttccggcagaaactggtcacgcctactcgggatgtgacagttcggatgtttatcaccagtgagaaactgcacaccctgcttaacacgcaaggacccacattacagttcaatggatgtgtgttccagccacttgatgaagcccggcaacgcttctccctcgctgtcgatataccggtttgctcaatgtctgacacgtctgcccgtaacatggccggtcagatgcttcgtgaatctctggatgtcattgcctacatggtgggtaagggagatatcaccgtccagaaacagttcatgataatccgggatgaagacgaaaccgaagtgccgcgcttcgataatgaaatcgaggcaaacgcggaccggttaacggacgaggaatttgcgcgcttcatggtggcgatgaacagactattcacggatacaccggatgtgtcccgtaaaaaaatcagctccgcatttcgttttttccgtaacggtattgaaagccaggttcaggagagtcgtttcacagcttactggtcggcacttgaatcattaacgctaggggttgcccctggcacaccatcacatgaacaacatgtcatcagtgttgtggctccctgcatggtgctggattatattgttaagcaactattttcactgagaaaagttctgcgcttcatcctgcgagagccgagacacaccttgcgcacaccggacattgcttcacttccgctgggacagctctatgcccttcttaaagatgcggatcgggcccgtgaacttcagacagatttacagcactttccctatgtcatgtaccgggtgcgtaagcttgccgggatctgtgcgtcacccgagaaaatggcggataaactggggcagcatgccgagaaagtcacccgacatcttcaccgcctgtacctgctaagaaataccattgtgcacaatgcaggtaccagcccgcacattgacctgctgacggtgaaccttgaacactatctgcgagcaacaatcagcgcgttgtttaatattgtggtgatccacccaaccgtcagtaccgcagaggaggcatttacccggtgccaatttaccagtgagtcagttttcagggaactgaaccctcttcacggtatcactgaaaagaaagtatacacagccattgataatcagctgaaaaatgggacgctttcccgtagcgatgcacgtctgatagcatggctcaatgctcacccctga

SEQ ID NO: 101480 - DNA, 588 bp, Enterobacter aerogenes
gtgtcctgtgcaaagaatcgaagtgatcactggcgagcaaaagggacactgacggtacgccacctgcctgccgacgtcgatgcggcgatcgcggcgcaggcgaaagcggccggtagatcgaaaagcgacttcattcaggaagttctgtcagcgtcgttcggcgacatcatcggcaatttttcgcgcagcagcgagctggttgccctgatggatcgggagctatctggtgtcactggcctgccgctgacggaaaactggtatgacgccgggcgcactctggccgagaaccgggaatactgtcagttgttgaacatccgtagtgacacagatctccagcggatcatgatggcgggtgtgccctggctttcactgcgtatgcagcagctggattcaggcattccgctactaccgcaggggatctcactaacctgtgccctgtttattgaagccgctggccgggaacgacctcagctgaatatcttccgtcgtcacctgttctggtatatggatgaagcactgttctggcgggaggtagacgccatccgggccgccagattgttgcccgcactggaacatccggacttctga

SEQ ID NO: 101481 - DNA, 249 bp, Enterobacter aerogenes
atggactacaacgttttgtgccagcctggatccctgccggatggcacgtttacccgcgagcaggctcaggttgtcgcagcgcagtatcagaatgtggcgattgaagatgagcaggggacccattttcgctttgtcgtcggtcatcaggatgacagcagcatggtctggcgcgtctggaattttgagccgggcggcgaggacctgatgaaccgttacatccgcgactacggagtacgcaaaacgcaataa

SEQ ID NO: 101482 - DNA, 282 bp, Enterobacter aerogenes
atgcgtatgtctctgatgtttgcagccgtgacgcttttaaccggtattaacctgatatttattccgtttcagcctgttccggctctgtggggggctatcctggccgttgcttttgttctgattaatgtcgtggcagaaaaactgctcctctggagtggcatggcgtggattatcgttgccggcatcatcataacgctgatgctgaaggggaaagaaccgggtgacgaattacgcgtgctgattcgagggccagctgcgcacccgcaactggcaggacgatga

SEQ ID NO: 101483 - DNA, 345 bp, Enterobacter aerogenes
atgcgacgtaattcacaaaaatggataccatttggattcgatacggtttcaaataaaattgttgatatcgccagcgttgagaatggcctttcatgcaactgtgtctgtctcatttgtggaacatccttgattgcaaaacaaggtaaaaaccaaaaatggcattttagccacaacacagaagtaaaaggggtttgtagtgagctcacactacaacatataaaaaaatacataaaggttaaaatacaggaaaaaattaccttgctcttcctcatcttctgcaaggtaaggagtaagggatcgttaacctcaaaaatctcgctggtggtgggattgtttgtggcctaa

SEQ ID NO: 101484 - DNA, 324 bp, Enterobacter aerogenes
atgacttacgcgattttcttgttagtaactgcagtttgtgcattcggtttaaattatctgacaaacaaaatatgtcccgccatggttgtgattaataagagtagaggctctaatgtacatgccttacggtgtatcacattgttcctcctccttctggtaacactctggcttcctgtcaaaccagccgtgatcaatctggcagtagagtttgctgcactggtgaattttattgcatcagtcactctctataccgttgcaaatttaagggagaagcggagattaaaaaaacaaagaaaagaagaaaaagcagctaaaaaaggataa

SEQ ID NO: 101485 - DNA, 351 bp, Enterobacter aerogenes
ttgaaacaggagcggaccgaagaaatcatgatgctgtcgttgttgaatgatgaagtgtgtaatgacgatgaatcttcgagaaaatttcggcttatccgggaaagtaactttcctgctgttaacgtcaatatccggtacaccagtcctgatgatccgaatgacgttcatgggccgtacaaactcaacttccgtgcgcctttacctttaattttgttcagtgaaccggaccgatttaatccgttaaaaaattacgtaaagggtgaaaggcagaagcgcggcagttttaatgaaaaatatcgttctgtcctgccccgtatagggctggtggaagtcatcaaggagtcgagatga

SEQ ID NO: 101486 - DNA, 123 bp, Enterobacter aerogenes
atggctgatgttctggaaggtttcatccccatggtaaatatggaaaacttacggttcgaattttctcttaaagattcacatgagaatcttaaattattttggcgatgtctggatgttatataa

SEQ ID NO: 101487 - DNA, 378 bp, Enterobacter aerogenes
atgaacccgataattacggcacatcaggaaatcgttatcgagaactcggttcgctatatcgagttactgaaatcagaggcatcaaaatttctggatgaatactgggaggcctggaaggcgcggaatcaactgatatcccagaccacgtatgcaaacgggggaagatttatatccggtcgtttttctcctgtgctgagaaaggttggatcgtcgcaaaagctgacaattgtatggaaagatttttcgcccaggttcaaaaacaaaattaaacatcatggcgtggttgttaaacctaaactcgtaggttacagcgttagttgttttaaaaataccctggactgggaactggagatgatccaggaaacagaaaaaaattaa

SEQ ID NO: 101488 - DNA, 789 bp, Enterobacter aerogenes
atggctggcaacgcatccccaaaaactgaaccgcgtaatcaacgaaacgctggaaataaccttgctttaggggtggtcatttcaaaattaaagccactttcaagtgatttctatacacactttcatgaaaaaaacagagcctgcctgcgccagtttaacgccatctccaatgcaatttataatattttacgcctggtagaaggtgaccaggcgacaagcactaaagttcagaaatggctctccggtgtttacgatgaactgacgggtaatgtaaataccctcaatgagcagattgacaaaaatttcgccagactacttctggatgattcatcatacgaagggtttgactatggtatatttgaaattcgctggaaccacccattgttctataaattgctggatattatccagaccgccaacgtcctgactcgtcaggcacaccagttgtggttatgcggtcagttatcacaacaggttcatgaccgaattatcctgcaactcctgagctcactgcaggttgctatggacaagattactaaaatactgaacgctgaaaatcgtgtgaatggaaaatacgacatattaccattcatccagagcattaagcggtttaaatcggtggaactttatattgccagtctcgaaccgaaggcccttgctcagtccggttacattgacatttcagctgatactggcagtgagcagacattaaaaccagaggaagtggcaggctctggcaagccatctgacaaaacacaatcttctgccactcctgtttcggcacaataa

SEQ ID NO: 101489 - DNA, 1266 bp, Enterobacter aerogenes
atgaacggtctggtctttgccgaccgcacgccgcatccggcgctgacggaagcaaaacaccagcagcagtttttccagttcagtttatccgggcgaaccatcgaagtgaccagcgaatacctgttccgtcatagcgataacgagctcctgcactggatggtggcgctggatggcaagccgctggcaagcggtgaagtgcctctggatgtcgctccacaaggtaaacagttgattgaactgcctgaactaccgcagccgaagagcgccggacaactctggctaacggttcacgtagtgcaaccgaacgcgaccacatggtcagcagccggacacatcagcgcctggcagcagtggcgtctggcggaaaacctcagcgtgacactcccctccgcgccccacgccatcccgcaactgaccaccagcgaaacggatttttgcatcgagctggataataagcgttggcaatttaaccgccagtcaggctttctttcacagatgtggattggcgataaaaaacaactgctgacgccgctgcgcgatcagttcacccgcgcaccgctggataacgacattggcgtaagtgaagcgacccgcattgaccctaacgcctgggtcgaacgctggaaggcggcgggccattaccaggccgaagcagcgttgttgcagtgcacggcagatacgcttgccgacgcggtgctgattaccacggtccacgcgtggcagcatcaggggaaaaccttatttatcagccggaaaacctaccggattgatggaagtggtcaaatggcgattaccgttgatgttgaagtggcgagcaatacgccacatccggcgcggattggcctgacctgccagctggcgcaggtagcagagcgggtaaactggctcggattagggccgcaagaaaactatcccgaccgccttactgcggcctgttttgaccgctgggatctgccattgtcagacatgtatactccgtacgttttcccgagcgaaaacggtctgcgctgcgggacgcgcgaattgagttatggcccacaccagtggcgcggcgacttccagttcaacatcagccactacagccaacaacaactgatggaaaccagtcatcgccatctgctgcacgcggaagaaggcacatggctgaatatcgacggtttccatatggggattggtggcgacgactcctggagcccgtcagtgtcggcggaattccaccttagcgccggtagctaccattaccagttggtctggtgtcaaaaataa

SEQ ID NO: 101490 - DNA, 1254 bp, Enterobacter aerogenes
atgtactatttaaaaaacacaaactattggatgttcggtttattctttttcttttacttttttatcaagggatcctacttcccgtttttcccgatttggctacatgacatcaaccatatcagcaaaagtgatacgggtattatttttgccgctatttctctgttctcgatattattccaaccgctgtttggtctgatttctgacaaactcggactgcgaaaatacctgctgtggattattaccggcatgttagtgatgtttgcgccgttctttatttttatcttcgggccactgttacaatacaacattttagtaggagcgattgttggtggtatttatctaggcttttgttttaacgccggtgcgccagcagtagaggtatttatcgagaaagtcagccgtcgtagtaatttcgaatttggtcgcgcgcggatgtttggctgtgttggctgggcgctgtgtgcctcgattgtcggcatcatgttcaccatcaataatcagtttgttttctggctgggttctggctgtgcactcatcctcgccgttttgctctttttcgccaaaacagatgcgccctcttccgccacggttgccaatgcggtaggtgccaaccattcggcatttagccttaagctggcgctggaactgttcagacagccaaaactgtggtttttgtcactgtatgttattggcgtttcctgcacctacgatgtttttgaccaacagtttgctaatttctttacttcgttctttgctaccggtgaacagggtacgcgggtatttggctacgtaacgacaatgggcgaattacttaacgcctcgattatgttttttgcgccactgatcattaatcgcatcggtgggaaaaacgccctgctgctggcaggcactattatgtcagtacgtattattggctcatcgttcgctacctcagcactggaagtggttattctgaaaacgctgcatatgtttgaagtaccgttcctgctggtgggctgctttaaatatattaccagccagtttgaagtgcgtttttcagcgacgatttatctggtctgtttctgcttctttaagcaactggcgatgatttttatgtctattctggcgggcaatatgtatgaaagcatcggtttccatggcgcttacctggtgctgggtctggtggcgctgggcttcaccttaatttccgtgttcacgcttagcggccccggcccactttccctgctgcgtcgccaggtgaatgaagacgcttaa

SEQ ID NO: 101491 - DNA, 630 bp, Enterobacter aerogenes
  misc_feature (585)..(594): n is a, c, g, or t
atgaatacttatagtggtaataaagtaaaaatgatcatgaatgcgtggtacatggatatcccagaaaactttccaccatctgaagatataactcctttatatgtatcaatccatattaactctactattgtagacaaaattttcacacctgcgagcatcgagcattttaaaaagcatgcacctataggttgccgtgatttttacacacgtgatttgcttatttcaaaaggaattgatgcatattattcaggttgcatgacccttactttggggaataaatataaacgagataatgtaacggatgatgtttattttattgatgtaatgtatgactcaatgtcattaccagagttaattagccaaccgttacgttttggtaagcgcttactaaatggtcgcgcatttgaatttaatcatagaagtaaggtccttaatcagttttttgatagtgaattacttaagcatgttaaatatgaaaaacagatcatcccgtacctttctgcggatgaaggttttaaattagctgatgaatttcttaggaaattagctaatgcaaaactggttgtaacatccaggatccatacnnnnnnnnnncgtgcctggctatggggactccagttatttttgtaa

SEQ ID NO: 101492 - DNA, 237 bp, Enterobacter aerogenes
atggggactccagttatttttgtaaatggtggctttaaaaataaagttgataactgccgtttcgatggattgtttgacttctttaatagaattgacgtcgatatgaacgccaatgcgactgctaattttgaatttgatggtaagaaaattggaatgaataccattattaaaaataaagctttgcatgagcaatatgctaatgaattagctgataaatgcaaaagttttgttgtttaa

SEQ ID NO: 101493 - DNA, 1419 bp, Enterobacter aerogenes
atgattctcccagtgataatggctggaggtactggaagtcgtttatggccgatgtcgcgagagctatatccgaaacagtttttacgtttacacggcgagctatcgatgcttcaggaaactattactcgccttaatggtttagagactaaagaacctattgtaatttgtaacgaacaacatcgttttttagtcgctgaacaactacgtcaaatcgagaagctctctaataatattattcttgaacccattgggcgtaatacggctccagctatagctcttgccgcgttacacgcagttgcacatgatgatgacccattgctccttgttttggctgcagaccacgttattgagaataatgaagcttttcaagctgcaatcaacagtgctgtagtttatgcaaatcaaggaaagcttgtaacatttgggattgtgcctactggtcccgaaacgggttatggttatatccagcggggtagcgaagaacattttgatgatcatgtagcttatgatgtaaaacgtttcgttgaaaaacccaatttgcctacagcacaggaatatctagacagcggtgaatattactggaatagcggcatgttcatgtttcgagcaagtcgctttctacaagagttggatgagttccgtccagatattctcagttcatgtaaacaggcaatgcagactgtgcataccgattctttacgtgactttattcgtgttgacaaagatgctttctctgcttgtcctgatgagtcagttgattatgcagtgatggaaaaaacgcagtctgcatctgtggtaccattggatgctggttggaatgatgtgggttcatggtccgcattgtgggaagttaacgacaaggatggtaaagggaattcactatcaggggatgtttttgtccatgattcttctaattgttatataaatagcgaagaacaacttgtagctgcggttggggttaacaatctggtagtagttagtaccaaagatgctgtgctcgttattgataaatcccaagtgcaggacgttaaacgcgtagttgaacatcttaaaatgacttcgcgccgtgagtatagaatccaccgcgaatcctatagcccttgggggcatagtgataaagttgttaatacaactaaatatcatattaacaaagtcacagttaaaccgggcggtaagttttcattacaaatgcatcatcaccgtgccgagcactggattatattatcaggaacagcgaagattaccttaaacgatcgtgagtttttacttactgaaaaccagtcaacatttattcctgcaggttcgactcatatgctggaaaatccagggaagatagctcttgaaatccttgagattcagtctggttcatatttaggtgaagatgatattgttcgtctaaaagatcattatggaatttga

SEQ ID NO: 101494 - DNA, 705 bp, Enterobacter aerogenes
atggccagatgtacggctcctgtacgtggacatagctcagcagccgccgctgctgcctgtccagcctgtcgcaatcgcagtggttatcgccgcagcagctacagttatgatagttatccgtcctactcctcgtcaggcagcgctggcggaagtcgtggaagcagtagcggtggttccagcagcggtacaaagcctcgctggtcaaaatcgggatcttccgtttcctacacaaccgcccaagtacaatctctcacaccgattcgccaaacggtagagaagcttgtcgcagagaagccggatttgcgtgatgtattcctttgccacgcttgggatgatcgacaaggcgtagccaaagagctacacgatttgctcgaggctgcaggcgtcaaagtatggtttagcgaaaaggatcttgctcttggcgttcctatgatgcgtgccatcgataaaggattagcaaattctcgaatcggtctggtattagtgactccagcgctattaaaccgactgcccaaagaaggcgttgctgataaagagctttcagctttactggccgggaaccaactcgtaccgatcgttcataacacaacgtatgaagctctccgcaatgtcagtcccttgctcgcatcccgaagcggtctggacacgggagaagatacgctggcagttgtcgcaacaaaaattgcagaattgattactgtgtag

SEQ ID NO: 101495 - DNA, 1359 bp, Enterobacter aerogenes
atgcttgtgaccatgtcagataaagaaatcagtcggatcaacgtcattcaatcagttgttgaaaaacgtatgcgccgtcgtgatgctgctcatcagcttgctttgaccgaacgtcagacacagcggttaatgaaccgctttcgtgagtctggtgccgcaggattggtaaaccttcggcgtggacgccctggtaatcacaggcttcctgagtcactgaagctgcgagttctttcgttacttcacgatcattacagcgactttggaccaacactggccgcagaaaaattacgcgaacgccacaacatcacagtatctgttgaaacgctcagaaaatggatgacagcggatggactctgggttccttattcacgtcgcaggccccgcgttcatcaacccagatatcggcgtgactgcctcggagaacttgttcagattgatggttccccgcacgactggtttgaaggccgtgcaccgaaatgctgcctgctcgtctttattgatgacgcgactggccgcctgatgcacctccgttttggtgagactgaatcagcttttgattacatgatggccactcgcgagtatctcgagcaacacggcaagccccttgcgttctacagcgataagcacggcattttcagggtcaataatggaggatccactacgaccggagtcacccagtttggccgtgtactttctgaacttgggatcgagttgatttgtgccaacagtccacaggctaaaggccgtgtggagcgagcaaatcagacacttcaggatcggcttatcaaagagatgcgtctcgagggaatctgcagtattgaagccgccaacgcctggctggataccttcatcgctgacttcaatcgtcgcttcgcaagaccagcaaaataccccaaagatctgcaccgcccggtgtctgaaagcaacgaagagctggatgatatctttgcttggcaggaactgcgtaagctgtctaaaacgctgacattccgctatgacaaaatgatatatctggttgaacctactgaagaaaatactcgcatcgctggcgagaaaataactgtctacgactatcctgacggcacgctggcattcaaatacggttaccgttcactcaaatatcaggtgttcgacaaactggaatgtctcgaccaggggcaaattgttgataacaaacgtcttggggctgtactgaagctggcgcaaagcaaaatggatgaactcgaacgcgatggcaagcgtgacaggagcaaaaagatgccaaaacgacgggctcaggccagagttcaggagcaactcagggcaattaatccggtcctggtaaacccggatgaattcagggccagcctgaaacgctag

SEQ ID NO: 101496 - DNA, 276 bp, Enterobacter aerogenes; identical to SEQ ID NO: 101357

SEQ ID NO: 101497 - DNA, 1326 bp, Enterobacter aerogenes
atgaataaatatcaggcagttattattggttttggcaaggctggaaaaacattagccgtcacgctggcaaaagcaggttggcgtgtggctctcatcgaacaatcaaatgcaatgtatggcgggacctgtattaatatcggctgtatcccaaccaaaacattggttcatgacgcacagcagcacacagattttgtccgtgccatacagcgtaaaaatgaagtggttaattttttacgtaataagaattttcataatcttgcggatatgcccaatatcgacgtgatcgacggccaggcggagtttatcaataatcatagcctgcgtgttcatcggcctgagggaaatctggagattcatggcgagaaaatttttattaataccggtgcacaagccgtggttccgccaattcctggaattaccaccacgcctggtgtatatgacagcaccggattacttaatctaaaagaattgcctgggcatttaggtattttgggcggcggatatattggcgttgagttcgcctctatgttcgctaattttggcagcaaagtaaccattttagaggcagcttcgctgtttttgcctcgggaagatcgggatattgctgataatatcgcgacgattttacgcgatcagggcgtcgatattatcctcaatgcccatgtggagcgaatcagtcaccatgaaaatcaagtgcaagtgcatagcgagcacgcccaactggcggttgatgcactgttaatagcttccggtcgtcaaccggctaccgcttcgttacatccagaaaatgccggtatcgcagtaaacgagcgcggggcaattgtcgttgacaagcgattacataccaccgcagacaatatttgggcgatgggagatgttaccggcgggctgcaatttacttacatatcactggatgattaccgcattgtacgtgatgagttactgggtgaaggcaaacgtagtactgatgatcggaaaaatgtgccttattccgtatttatgacaccgcccctgtccagggttggtatgacagaagaacaagccagagagagtggtgctgatattcaggtggtgacattgcctgtagctgcaattccgcgcgccagagtgatgaacgatacccgtggggtattaaaagcgattgttgataataaaacccaacgtatattaggggcatcactgctgtgtgttgactcccacgagatgatcaatatagtgaaaatggtgatggatgccgggctgccttatagcatattacgcgatcagatatttactcatccgtcgatgagcgaatcactcaatgatctattttcattagtcaaataa

SEQ ID NO: 101498 - DNA, 276 bp, Enterobacter aerogenes; identical to SEQ ID NO: 101357

SEQ ID NO: 101499 - DNA, 1179 bp, Enterobacter aerogenes
atgatcgtttcagctcccgccgattatcgtgaggccgcccgtcatcgccttcctcgatttctgtttgattatattgatggcggcgcagtagcagaaaataccatgcacgcgaactcaactgaactcgcctcaattgcgctgcgtcagcgggtgctttgtggtgttggcgacccgacgctgacgactaatatccttggaacgtcatgggcaatgccggtcgcgctgggtcctgtaggagccactggcatgtacgcacggcgcggcgaagtcaaagcggcgcgagccgcaaccgacgccggcatcccttataccctttccacggtatcggtatgcccgatagaagaagttgcgcagcatgcctccggagagctctggtcacagctgtacgtgcttaaagatcgcggttacatgcgcaatgctctcgaacgctcgtgggccgcagggatgaaaacgctggttttcaccgtcgatatgcccatccccggctcgcgctatcgcgataatcgctcgggtatgtccggaccgtgcgccactctgagacaatatctgcaggcctgtacccacccccgttgggccatagacgttgggctggctggcagacccctgtcgtttggcaacattgaaacctacaccggacacaagatgacgatggacgactatatggggtttataagcaataacttcgacccctccattgcatggcacgatttggagtggatacgcgacagctggaaagggaagctgattatcaagggtatccttgaccctgaagatgcaaagaatgccgtccgtctgggcgctgatggcattgtggtttctaatcacgggggcaggcagcttgatggcgcaattccaacggccagggcgctacctcgggtggtagatgccatcggcgatgatctcacggttctggtcgattcaggagtgcgttccggggtggacgttatccggatgcttgcccttggcgcaaaaggggtactgctgggacgttcatatatttatgcgctggcgacggcaggagaagctggtgtcgcacacctgctgcgcctgtatgctgaagatatgaaggtaacgatgactctgacgggcgcagcatcaccggcggatattcacgctgactgcctcgaccgtttagagaaagatatggcgcagctagccaggacgcattctggacaatag

SEQ ID NO: 101500 - DNA, 351 bp, Enterobacter aerogenes
atgttgttacttcacgaggtccgtcaccagcggctgcgcaacaggatcattcttgccgttgcgctgctggccgctatcgcctccatttcgcccgaacagctcggcatcacgctatacaagctgtctctggtttccatagctgccattctcggctaccaccctgatcgagcactgtttccttacgccagcccggggagctatctgatagaagattggaaagagaacttcggcaagccggtgccagtgagccgcaacgagcctgaataccccgttgcaacgggctatgagctgattttgccgccgttctgctgcgatgtgcaccgattgtcgcggcgatctgcttcggcgtga

SEQ ID NO: 101501 - DNA, 300 bp, Enterobacter aerogenes
atgatgaaaaccgaacccgcggaggaaaacattgctgagatcacagataagcgcctgaccatcggaatggatgaacctccagttctccgtgtactggatgcgttgtgttataacgagaagcgtcgagctatgaactatcccaattcagaaatggttaacatcggctggttccagcgtaagatggcttcttttattaacgttcacagcgatcacttcaacaacagaattaaccttcaggaagcccgatatctgtcgggcttttttctacccgggagcaaattactctgcaccccattctga

SEQ ID NO: 101502 - DNA, 300 bp, Enterobacter aerogenes
ttgttggctctgtttacatctcagggcagccagtacggcagtgacgactggctgcgcttttgccgggctaataacctggcaccgagcatgaacaagcgtggcaactgccaggataatgcggtggccgaattgttcttcagttcactgaaaaaagaacgcattagtaagagaatatacaaaaaccgggatctggcccgggtggatgtcttcgattacattgaagtgttctacaatcgggcccggcgccacagtcaccccggcggcgtcagtccggaggccttcgaacaggcctcgtcgtga

SEQ ID NO: 101503 - DNA, 966 bp, Enterobacter aerogenes
atgaagcaggggattatatttggcgccctggctggcgcatgctggggattcatcttcctgccaccggtactgctacccgagatctcaccactgctgttaacctgcggtcgctttgctacctatggaatactggcggcaatattacttatacctcaatggcgcaacattgcccgcgtctggcatcatcgcgatctgctgacgctgatccgtctttcgctgatgagcaatgtcctctattttctgctcgtcgcggtggccgtaaagcaggtcggtattgccgcgacatcgttagtgataggtttaattccggtgatggttccggtgcttggtcgcagggaccagcatgcgccgcccttcaggcaattattgctgccgatggcggctatcattgccggagtggtgctgattaatctgcatgcgctacaaacatcctcgcaccaagttacagaaggaaaacggcagatgctggggatgctttgtgccttcgctgcattactgtgctggagccgttacgctgtcgagaactcccgctgtctgaaaaacctcccttacaacagcaaccagtggtcgctcctgataggcctgtgtacgggatgtatttcggtactgctgtggctcatcgccagtatattcaggttttctgcagttgacttgtcgttaccggaacacactcaaacgctcttttggataacgaacatgatgttagccgtggtctcctcatggctgggatatctggcgtggaatctctgttcccggcgtcttccggtatcactgacagggcagatggtggtttttgaaacccttttcgcgctgctatatggttttatctattcacagcgcattccggatctgcaggaaactgccgccattttactgttgctgggcggggttctggtcacggtacattaccatcagctcagccgtcgcggctacgcaggtaatagtccggaagtcaagggtagctga

SEQ ID NO: 101504 - DNA, 828 bp, Enterobacter aerogenes
ttggagtcattacctgattatgctattgagattaacaacctcaataaacattatggcgaaaaccatgttctacgtggcatcgatgtcagcatttctcccggagaagtcatctgcgtgattggtggctcagggtcgggtaaatccacgctgttacgctgtattaactttttggaagattatagctccggcagcattgtggtgaatggcgagaacgtcggctatgaacctctcggcggggaaaaacgccggcgtttaagcgacaaggaaaaccgtcaggctttacgcgacgtctgtatggtctttcagcagtttaatctgtggccgcatatgacggtactcgataacgtagccacgccgttgcggcgggttaaaaaggtctcccgtgaagcagcctacgccgaagcgaaaacgcaactggcacgggttggtctggcagacaaagccgatagctggcccgcgatgttatccggtggtcagcagcagcgcgttgccatcgcccgggcattgaccatgaaacccgccattatgctgttcgatgaaccgacttcagcgcttgatccggagctggtcggggaggtactaaaggtcatccgcaatcttgccgatgatggtatgaccatgatgattgtgacccatgagatggggtttgccgcaaaagtctccgatcgtgtgctgtttcttgccgatggctgcattgaagagcagggaccgccggcgcaactgttccatcggccgaaaagcccgcggctgcagtattttttgtcgtcgtggagtgagcgtcagtcggggacgagattacctgaaacggcatttcaggagtcagcatga

SEQ ID NO: 101505 - DNA, 837 bp, Enterobacter aerogenes
atgttattagtaacagtgtcactactttccggtttaatgatttatattctcattatgaacagagcagaactcaatagttcactatctgcaaggtttgtaaaggctttgaaaaatgaagccctgtcgctggtctatcaacctatttacagaattgaagacggacagatctgcggatttgaggccttgctcagatggaaagatgaaagactcgggaatattaaccctgaagtatttataccgctttctgaaagggaagggttgcaggaggatgtgactttattcgtcattgaccatgctatccgagaatttatccatactgctattcagaatgaaatatttttgagcgtaaacattaatccaagcgatcttgactcagaaaaattcagggataaactactaggattaatttctgaatataatatcccatataaaacaatccttcttgaaattacggagcgtcaaggaggggattttgaaggtatgaaaattcacattgataaatataaaaatcatggtgtcaggtttgccattgatgactttgggacaggatattctaatcttaatctggtagctgcgcttgatgtagatgaaataaaaatagacaaatcgctaactagtgctattggtactgaatctttacgatatgatcttcttcccggactgcatgagatgttccgctccattgcagataagattgtgtttgagggtgtagagactcaggagcaggtgaactatctgaagacgttctggccacagagttatgctcagggctggtattactccagagcgcttccgctggaagaagcgagaaaacttaccatccgggaattgaactga

SEQ ID NO: 101506 - DNA, 351 bp, Enterobacter aerogenes
atgtttactgccctgaacgataaaaacactttcggttacccgtttgagaagatccgtaatgctatcgctgtacctagtgaaaaaaacgttgatgctgccaccagtttcggtcttgaagtcctcagccggaggtatgatgcttttcaccaggagctggatgcggccggtgagctgggaaactgggaatacgatctcgatacctacattcactgtattgcggtgctgcaacgttacttcaccggcaatccatccgggctcacagaacgtgatgcccggatttactgccattacctgcagactgagcacaaaaggtttgtgaagcttgctgaagagctggctgcccgccgctga

SEQ ID NO: 101507 - DNA, 1083 bp, Enterobacter aerogenes
gtgaaaccagtaacgctatacgatgtcgcagagtatgccggtgtctcttatcagaccgtttcccgcgtggtgaaccaggccagccacgtctctgcgaaaacgcgggaaaaggtggaagcggcgatggcgcagctgaactacattcccaaccgcgtggcacaacaactggcgggcaaacagtcgttgctgattggcgttgctacctccagtctggccctgcacgcgccgtcgcaaattgtcgcggcgattaaatctcgcgccgatcaactgggtgccagcgtggtggtgtcgatggtagaacgaagcagcgtcgaagcctgtaaagcggcggtacataaccttctcgcgcaacgcgtcagtgggctgatcattaactatccgctggatgaccaggatgccattgctgtggaagctgcctgcgctaatgttccggccctatttcttgatgtctctgaccagactcccatcaacagtattattttctcccatgaagacggtacgcgactgggcgtggagcatctgatcgcattgggtcaccagcaaatcgcgttgttagccggtccattaagttctgtctcggcgcgtctgcgtctggcggactggcataaatatctcacacgcaatcaaattcatccgatagcggaacgggaaggcgactggagtgccatgtccggttttcaacaaactatgcaaatgctgaatgagggcatcgttcccactgcgatgctggttgccaacgatcagatggcgctgggcgcaatgcgcgccattaccgagtccgggttgcgcgttggtgcggatatctcggtagtgggatacgacgataccgaagacagctcgtgttatatcccgccgttaaccaccatcaaacaggattttcgcctgctggggaaaactagcgtggaccgcttgctgaaactctctcagggccaggcggtgaagagcaatcagctgttgcccgtctcactggtgaaaagaaaaaccaccctggcgcccaatacgcaaaccacctctccccgcacgttggcagattccttaatgcagctggcacgacaagtttcccgacttgaaagcgggcagtga

SEQ ID NO: 101508 - DNA, 720 bp, Enterobacter aerogenes
atgaagataaagaaaggaggtgaattagctataattcttccggatatgtttttctcttcaaagtcttttgtttggctaaggtcgtttttaatttcgaatttcgaaattaaaaaaattatcgaatgcaatcataagtcatttaaaaaaacagaagctaaaacacatatctaccacattaagaaaaatgtaccttcaaaatctcaacaattagttttagtgagggattgcactacaatttcattaagttataaggagtttgtaaatgaaaaaataattcctcagaatgatagtattgataattatttccatctttttagaggaaagaaaacgggtaaagaatgtcgggcgtctaaaaaatcattctttcacacttcatcatatagcaatccatcagagtatcaaagaggggagccgccagtaaacgaatgcttggttaaatctggagatattttgatcgctagagtaggaagtagagttctagggagaactattttgtatgcaggcacagatgcgatattaagtgattgcgtgttttgtttgaggataaatgacccggctctaagagattatattttccaatcatgggaaaaagataaggctcaatggttagattattatgcaacaggaacgtgtgctaagcatattagtctggaaaatttcaaaagctatattagaattaaattgaggaaatatttttcgtcagatacaaaattcggttag

SEQ ID NO: 101509 - DNA, 168 bp, Enterobacter aerogenes
atgaaaatctattcaatgcaaaattctatagctgtagtaattgtggtgcaggttgacaaggatatagaagaacctgccctaattgtggggcatattgttagaattaaaggggcgcatttagcgccctttttattgtcatccctaaaccacctcctagggaggtggtga

SEQ ID NO: 101510 - DNA, 183 bp, Enterobacter aerogenes
atgaaagccagcatccgggccaaggtggagcacccatttcgcatcatcaagcgacagttcggcttcgtgaaagccagatataaggggttgctgaaaaacgataaccaactggcgatgttattcacgctggccaacctgtttcgggcggaccaaatgatacgtcagtgggagagatctcactaa

SEQ ID NO: 101511 - DNA, 429 bp, Enterobacter aerogenes; identical to SEQ ID NO: 95248

SEQ ID NO: 101512 - DNA, 237 bp, Enterobacter aerogenes
atgatgaaactgaaagactacttaaaaacatctggtgttcgtcagcatgagttcgccgtactggttgggaaaactcaaggctatgtaagccgaatcgctgctggggaatgctttctgtctgctgcatcagcattggtatggtcagcagcaaccaattaccaggtaactccccacgatctgctcccaagcatttatcggaagccaaccgatggactaccagaacaggatgcagcttaa

SEQ ID NO: 101513 - DNA, 183 bp, Enterobacter aerogenes
atggcggattttagctcaacaaaaagaacagcatcacttcaggattggggggaagccctagaatgcatagtcgaactaaacggtaaatcattcgatatcacagaaatggaaattgaagccgcttacgaggcatacaaacgtgttgatgattttttctatgatgaatggggtgctgacgaatga

SEQ ID NO: 101514 - DNA, 834 bp, Enterobacter aerogenes
atgattgctaaaaacatcaaacatcctgcgattcgttatcacggtggtaaattccgcctggcaccgtggataatcgagaaaatgccgtatcacgtctgctatgtggagccgttcggcggcgctgctggtgtattactccagaagcctcgcagctattcagaggtgtacaacgacctcgacggcgaagttgtgaacctgtttcgtgtactgcgtgactctgaattaaaccagcgcctgcaggatgcctgctgcctgaccccgtactcacgagatgagttctgtcacgctcaggagccagcgacagattctatcgaacgtgcccgccgcatggttgttcgtgcctgtatggggtttggttctgctgctggcgtcggcggtcagtccggattccgtagcgacagcaaacgaaaatacgctactgcggctcacctctgggagcgctacccggccaatctggcggctgtctgccagcgtcttcagggagtcattatcgagaacaaagatgctctggcggtaatgcgcgcccacgatgcagaaacaactctgcactacatcgatccgccgtatgtgccggaaactcgcgtacagggtaatcgttactacgcacatgaaatgactcttgaaggtcatgagcaattgcttgctgtggccagaacaatgtcaggcatggtgatgattagcggttatgacaccgaggtctacaacgacatgctgaccggctgggcaaaaacggagaaaacttcgcgcatcagcgcagggcggggtaccaaagttcgtacagagtgcctttggcttaacccggcagcacagcagaaacaggagtgtgcagcatga

SEQ ID NO: 101515 - DNA, 174 bp, Enterobacter aerogenes
atgagtatattttggcctttctggattccatttaactttatattttggtggtacataaccagccaggttgataacgccaatgcaattactttttgtgctggtaccggactagccattattaccgggatagtgccctttgttttatggatagttctgaagcgagtatatggctaa

SEQ ID NO: 101516 - DNA, 402 bp, Enterobacter aerogenes
atgagcgaacaacctttctggcaacaaaaaacactggatgaaatgaccgacgcggagtgggaatcactgtgcgacggctgcggacagtgctgcctgcataagctgatggatgaagataccgacgagatttactttaccaacgtcgcctgccgtcagctcaacattaaaacctgccagtgccgtaactacgagcgtcgcttcgagtacgaaccggactgcattaaactcacgcgtgataatctgccgaccttcgaatggctgccgcactggcacccgctgctgaccggctcaaaagtggcgatgcacggcgaacgtatttccgtgcgccatattgcggtaaaagagtccaccgtcgtcgactggcaggatcatattttaaacaaaccagactgggcgcaatga

SEQ ID NO: 101517 - DNA, 246 bp, Enterobacter aerogenes
atgaggctaagtattactggtcgcgccttgtttatgaaacagttcgcggaacaccggataaatatcttcctgatcgcgaatatgctgcatagcaaaattctcaaacgtcgcctgcagatgttcatattcgcgccacagagtctggtgagcgcggcgggtgatttcgatatagctgtaaactgtggctggctattaatgtgttttagttacagaaaaatcagccagaacgggtatttatctggctga

SEQ ID NO: 101518 - DNA, 138 bp, Enterobacter aerogenes
atgccatgcgcgcttatcaaagggtacatactggactatctcgccatcgcggcgaatcagacaatgcgccgaaacgcgcagatgagcaatcccggcgaagtaaggatgcgcgtcggcatccaatgtaccggtaaatag

SEQ ID NO: 101519 - DNA, 141 bp, Enterobacter aerogenes
atgaaaggagatagtgaaggcgaactggatcctcgcgagatgaaatgcatcaaactcagccatcaggttccccttattgacaagatagtcagattgattgaccaaagaaagggtaaccgccagcggctaccctttctttga

SEQ ID NO: 101520 - DNA, 261 bp, Enterobacter aerogenes
  misc_feature (214)..(223): n is a, c, g, or t
gtgaaaggccatctggttactttgctgctttctatattaataactccattatggggaagggctaattgtttgtcaggtgatgaaatacgttctaatagtcagtttattttgaccggtcagacatctgttgcgcacaaaagcggctcgatctggcgcatcaatggaaccaatccgtatacaacgaacaacgtatataatgatattgccattaacnnnnnnnnnngttatctgaaaatgtcagtcttgagggtggaaaactaa

SEQ ID NO: 101521 - DNA, 306 bp, Enterobacter aerogenes
atggcgctcttctatggtttggcctcggggtttgttgtcattggcgtgatatggctgatacgcaagatgctgcagcagagctatatcgacagtctcaaagacatgcttgcgctagtcggcatggtttctggcttggcatgggtgatggtgcgagtgcttgatgccccggaagtcagcacagctcaagcaacagcattcttgcaatcaaccccttgggggctggtttgggtagtcgattcggttttgctggcagtcctgttatttgttgctcgcaagtggaaaggccaacatgctgccgataactga

SEQ ID NO: 101522 - DNA, 360 bp, Enterobacter aerogenes
atgctgccgataactgaacccctctcagagcttgaaaaagtgcagtggcaattgctttgtcgccgcatgatgctgggaaactttctgcttgctattggtgcgtttgtctctgtggccgtctatgtgcggcttgtgccaggcacgaatgaaccactcattcatgcattgagcgataccctgttaaatgcggctccagctgggcttgcagggctcttgtatgccattgggttgctgatctttaccaggcgaatagcgggccgcttccatcgcttctatgttgatgccctgtatttccgcgcaataggtagcgccattgccggtgctatcgcggcgattgggctttatttgctggcaaggtag

SEQ ID NO: 101523 - DNA, 936 bp, Enterobacter aerogenes
atgtccgaacaactgattggccgatgggggccatacgaccccaaaacgcccgaggacaagaagaaagcccgcatacaggcgcagaagcgccgagagagtcaggccatgcagcaggcctggctagacaagcacaagagctgcgcgaacggctgcggcaagcctgtggccttctatacggactcgccttctttgtcactcaagcatggcgggtgctgttcccttgaatgtgaagaggcttggaaggccaacaacaaccagcccgccgccccccagggcgcgaaaaaaagaaccatggccaagcccacgcaacccatccagaagattgcccgtgtttacctgcgcgtcagcacagaagcccaggatttagagcggcaagaggccatcgttctgcaggcgaaggccagcgggtactacgtggccggggtgtaccgcgagaaggcatcaggagcccgcgcagacaggcccgagctgctgcgcatgattgctgacctgcaggccggtgaagtagtcatagccgagcgcatcgaccgtatcagccgcttgccgctggtcgatgctgaaaagttggtccataccattcaggccaagggcgcgcgcctggccgtgcctggcgtgcttgatttatccgaggtggcgacagaggcccaggggacggccaaaatcgttctggaggccatgcaaaccatgttgctgcgcatggcgctgcagatcgcgcgagaagagtacgagacacggcgagagaggcaggcccagggcatagagttggctaagagtgctggccgttacaaaggccgcaaacccaaccaggcgcaacatgcgcggattgtcgccttgcgcttggcgggctatagcatccagaagaccgcagacatgaccgaaaccagtacagcccaagtcaagcgggtatgggccatgcacaagaaggccgcagcctaa

SEQ ID NO: 101524 - DNA, 1005 bp, Enterobacter aerogenes; identical to SEQ ID NO: 53712

SEQ ID NO: 101525 - DNA, 702 bp, Enterobacter aerogenes; identical to SEQ ID NO: 25799

SEQ ID NO: 101526 - DNA, 366 bp, Enterobacter aerogenes
atgattgatgttctaggtccagagaagcgcagacggcgcagcgttcaggaaaaaatcgccattgttcagcagagctttgagcccggaatgaccgtgtcgctggtcgcccgtcagcatggcgttgctgccagtcagctgttcctgtggcgtaagcaatatcaggaaggcagtctcactgcggttgccgcgggtgaacaggttgtacccgcgtcggagctggcatctgcaatgaagcaaattaaagagttacagcgcctgctgggcaaaaaaaccatggaaaacgagctgctgaaagaagccgttgaatatggccgacaaaaaaagtggatagcgcacgtgcccttgttgccggaggatggcgaataa

SEQ ID NO: 101527 - DNA, 861 bp, Enterobacter aerogenes
atgcgttattttcgcctgtgtattatctccctgttagccaccctgccgctggcggtacacgccagcccgcagccgcttgagcaaattaaactaagcgaaagccagctgtcgggcagcgtaggcatgatagaaatggatctggccagcggccgcacgctgaccgcctggcgcgccgatgaacgctttcccatgatgagcacctttaaagtagtgctctgcggcgcagtgctggcgcgggtggatgccggtgacgaacagctggagcgaaagatccactatcgccagcaggatctggtggactactcgccggtcagcgaaaaacaccttgccgacggcatgacggtcggcgaactctgtgccgccgccattaccatgagcgataacagcgccgccaatctgctgctggccaccgtcggcggccccgcaggattgactgcctttttgcgccagatcggcgacaacgtcacccgccttgaccgctgggaaacggaactgaatgaggcgcttcccggcgacgcccgcgacaccactaccccggccagcatggccgcgaccctgcgcaagctgctgaccagccagcgtctgagcgcccgttcgcaacggcagctgctgcagtggatggtggacgatcgggtcgccggaccgttgatccgctccgtgctgccggcgggctggtttatcgccgataagaccggagctagcgaacggggtgcgcgcgggattgtcgccctgcttggcccgaataacaaagcagagcggattgtggtgatttatctgcgggatacgccggcgagcatggccgagcgaaatcagcaaatcgccgggatcggcgcggcgctgatcgagcactggcaacgctaa

SEQ ID NO: 101528 - DNA, 762 bp, Enterobacter aerogenes
gtgattccaatagaacgacatcagcgtattttagccctggtggagcagcgtggggcggtaagcattaacgagctgacggagatcctcggcgtgtcccatatgaccatccgtcgggacgtcagtaaactggaggagcaggggctgctggtcagcgtctcgggcggcgtacgcgccgtcagccggctggccgcggaacccagtcatctggtgaaaagcacgctgcagagtgaggagaaacaggcgatcggcgcgctggcggcgagtcatatcgctaaaaacagttgcatctatctggatgccgggactaccaccctggcgctggcgcgggcgatcctcgaccggaacgatctccaggtggtcaccaatgattttgagataacccagctgctgatcgatgccagtcagtgcggcgtgatccacaccggcggcactctgtgccgggagaaccgctcctgcgtgggcgaatcggcggcgcgtacgttacgccacctggctatcgatacggcctttatctccgccagcggctgggacagtcgcgggatattcacccctgatgagaacaaggttaccgtcaaggagaccgtcagccaggtcagcgcgagaagcatcctgctgtgcgacagttcgaaatacaatcaggtggccacgtttatggcgttacctttgacccggttcaccaccatcattaccgaccggcatctctccgatgccgccgccagtcatatcgcccggcacgcctgcgaggtgctacgagccggataa

SEQ ID NO: 101529 - DNA, 471 bp, Enterobacter aerogenes; identical to SEQ ID NO: 25802

SEQ ID NO: 101530 - DNA, 318 bp, Enterobacter aerogenes; identical to SEQ ID NO: 25804

SEQ ID NO: 101531 - DNA, 789 bp, Enterobacter aerogenes
atggataaacttccaaatttcatatttgaaaactatagtgacttaaaaattgaacgagatactgagggttggtctccggctgaggtatatagtgttacaaccaagaaaaaaaggtggtttctaaaaagaagtcatacgagatacaataaaactacatataatgtaagaagagagaaagaaattattgaatgggcctatccaaagtttagagtaccacaaataatacattatgaagaagcaaaagaatataattcattactaatgaatcacattggcggctctagccttgaaatgcttggtccatcaattactttagagaaatatatcgattactatgtacaatccttaaaattaatgcagtccattaacatcgaaaactgtccatacaataattgtataaagaatagaataatcgaattagaatatttattagagaatgatctagcagatattaattcaaataactgggaagaagatacgcgtgagcatttcagaaacggtaaagacttatttaattatatagtaaataataagccaaatgaagacttagttttctcacatggagatatgacaaactctaacatatttattgaaaacgaagaagttggatttatagatctcggtcgatgtggattagctgataagtgggttgatattgcattttgtgttagagatataagagaaataagtaatgaaaataaatggataaagatgttatttgataaattagaaatagtacccaattgggataaaatgagatactacattttgttagatgagctgttctaa

SEQ ID NO: 101532 - DNA, 858 bp, Enterobacter aerogenes
atgttagacatcatgagtaacgcagtacccgccgagatttcagtacagctatcacaggcactcaacgtcatcaagcgtcatctggaatcaacgttgctggccgtgcatttgtacggctccgcactggacggcggcctgaaaccatacagtgatattgatttgctggttactgtggacacacggctcgatgagaccgtaaggcaagctctgttcgtcgatctgttggagatttcggctttccctggccaaagcaaagtgctccgcgccttggaagtcaccatcgtcgtgtacagcgacgtcgtcccctggcgttatccggccagacgggaactacagttcggagagtggcagcgcaaagacattcttgcgggtatcttcgagtccgccacaaatgatgtcgatctggcgatcctactaacaaaagcaaggcaacataacatcgcattggtgggttcggctgcggaggatttcttcaacccagttccggaaagcgatctattcaaggcactggccggcaccctgaaactatggaactcgcagccggattgggaaggtgacgagcgtaatgtagtgcttactttgtctcgtatttggtacagcgcagcaactggtaagatcgcgtccaaggatgtcgcttctaactgggcaatggagcgtctgccagctcaacatcagcttgtgctatttgaagcccggcaggcttatcttggagatggaggagattgcttggcttcgcgcgcagatcagttgacggcgttcgttcactttgtgaagtatgaagccggcagactccttggctccacaccaatgatgtctaacagtacattcaagccgacgccgcttcgcggcgcggcttaa

SEQ ID NO: 101533 - DNA, 828 bp, Enterobacter aerogenes; identical to SEQ ID NO: 28366

SEQ ID NO: 101534 - DNA, 1179 bp, Enterobacter aerogenes; identical to SEQ ID NO: 92282

SEQ ID NO: 101535 - DNA, 1185 bp, Enterobacter aerogenes
atgtctaaagaaaagtttgaacgtacaaaaccgcacgttaacgtcggtactatcggccacgttgaccatggtaaaacaacgctgaccgctgcaatcactaccgtactggctaaaacctacggcggtgctgctcgcgcattcgatcagatcgataacgcgccggaagaaaaagctcgtggtatcaccatcaacacttcccacgttgaatatgacaccccgactcgccactacgcgcacgtagactgcccgggccacgccgactatgttaaaaacatgatcaccggtgctgctcagatggatggcgcgatcctggttgttgctgcgactgacggcccgatgccgcagactcgtgagcacatcctgctgggtcgtcaggtaggcgttccgtacatcatcgtgttcctgaacaaatgcgacatggttgatgacgaagagctgctggaactggttgagatggaagttcgtgaactgctgtctcagtacgatttcccgggcgacgacactccgatcgttcgtggttctgctctgaaagcgctggaaggcgacgcagagtgggaagcgaaaatcatcgaactggctggcttcctggattcttacatcccagaaccagagcgtgcgattgacaagccgttcctgctgccgatcgaagacgtattctccatctccggtcgtggtaccgttgttaccggtcgtgtagagcgcggtatcatcaaagttggtgaagaagttgaaatcgttggtatcaaagacaccgcgaaaaccacctgtactggcgttgaaatgttccgcaaactgctggacgaaggccgtgctggtgagaacgtaggcgttctgctgcgtggtatcaaacgtgaagaaatcgaacgtggtcaggtactggctaagccgggcagcatcaagccgcacaccaagttcgaatctgaagtgtacatcctgtccaaagacgaaggcggccgtcatactccgttcttcaaaggctaccgtccgcagttctacttccgtactactgacgtgactggtaccatcgaactgccggaaggcgtagagatggtaatgccgggcgacaacatcaaaatggttgttaccctgatccacccgatcgcgatggacgatggtctgcgtttcgcaatccgtgaaggcggccgtaccgttggcgcgggcgtggttgctaaagttctcggctaa

SEQ ID NO: 101536 - DNA, 573 bp, Enterobacter aerogenes
atgtggcaggagaaaaatgcagcagcggagcgtcagcagaatatgcgatacaggatatattccgcttcctcgctcactgactcgctgcgctcggtcgttcggctgcggcgagcggtaccggcttacaggcggggcggaaatttcctgggagatgccagaaagaagcttaacagggaagcgataaggccgcggcgaagccgtttttccataggctccgcccccctgacaagcatcacgaaatctgacgctcaaatcagtggtggcgaaacccgacaggactataaagataccaggcgtttccccctggtggctccctcgtgcgctctcctgttcctgcctttcggtttaccggtgtcattccgctgttatggccgcgtttgtctcattccacgcctgacactcagttccgggaaggcagttcgctccaagctggactgtatgcacgaaccccccgttcagtccgaccgctgcgccttatccggtaactatcaacttgagtccaatccggaaaaacacgacaaagcgccactggcagcagccactggtaacaggtttagaggaggagagtcttga

SEQ ID NO: 101537 - DNA, 1287 bp, Enterobacter aerogenes
atgttctccctgaacctccagcgatcagccatttcgtatgacgcaatttgtcagaataagcctgtcattgagttcagtccggagggggtgataaataaagccagcccgctttttctctccactatggggtacagggctgatgaaataatcggtcaccaccatcgtatattctgcccgccctcgctggtaagttcaccggaatacagccagttctggcagcgccttgccaggggagaaagctttagtggcaagtacctgcggctggcaaagggaaatcgttccgtatggcttgaagccagttatatccccgtttctgacaggcgcggccgtgttatcagagtcattaaaattgctgccgatatttctgagcgcgtgcattctgctcttgagcaggaagcagtcgtaaatgccataaaccgttctatggccatcatcaccttcaatcctgaagggatcgtgcttgaagcaaatgaaaatttcgtcaatgccactggctataagcgggatgaaatcataggtaagcatcatcgtctgttctgtgccgagacgctttacaaaagtgatgaataccgacatttctgggagagtctgaatcaaggtgagtttttttctggtctgtttccacgccttaaccgtcagggagaccctctgtggttccgtgcaacttataaccctgtctttaacagtgatgggcagctttataaaattgtgaaattcgctacagatgttacggctgatgtcctgcgaaaccagagagagcaagaggctgctgtgcatgcatgggatatggccgtgcagacccgagaaagtgcgcagaacggtgccaatgttattgaaaatagcatccttatgattgacagaattgcgcaggggatgggggctgtctccaccgatatctcacggctcaacaatcagtctgaaagtattgacgatatggtggaaaccatccggaagtttgccatgcagacaagacttattgcactgaatgccgcgattgaagcagcaagggctggcgcatccggaagaagttttgcggttgttgccgcagaagtgcgtaatcttgcggcgagcgtcagtagcgcgactgaagaaattgagcaagtcgtggccagcaatagtcaactggccaaggatgttctctgtggcattgaaaacagcctgatgaacactcgggaaggggttacactcatgcgcgaagcgggtgaagttatgaccagcattcagaggaatgctgcaggggttgagactgcggttaaggatgtcgccatttcagttaaagccggatag

SEQ ID NO: 101538 - DNA, 975 bp, Enterobacter aerogenes
ttgcagaacgccgatttttctgatgtgatttcaacaatctccggacaacttgagtttaccggaataatctcacattacgaaactgaaacatctaattatttttcagcacagggcgttgagccattaccggcgctgaagttgggagcttttgataagataatttttggtagcgacttatctcgtgtcaaacatgatgagattactattggcagcggcctggcaaaaaccttagatagccactacggggactggcttgatatcatgactgttaatatagcgggaggtcagggagctatatctgtaaaattacgtggaatatttgaatcaggtataaaggattatgatgatgttgtaatcaaaatgccccttgagactgcacagcaaatcatgggtactaatggtgttagtaagatagtcattttgctgaataacgatgatgtaacgtcgtttgttaagaaaatgagaagatatatagcggaccagcatttacctttgatcgttaaggattggagggagaattctattttttaccagcaggtggaaggtatgttgtccggtatctatttttttatcaaacttatcgtggcacttatcgtagtatttatgatcggcaattcaatgacgatgagtattgtcgagcgaacccgagaaattactacgctgcgcgcaattggcttacaatcaaaccgtgttacgcgtttattctggctggaaggtatatatatcggtatctttggcgcattggggagtcttctctttggattcactattgccgctataattaatatctcaggtattgccatgccgccttcgcctggacaatcagtaggttataccgcatttattaaaacgaatgatgtgggattgatttggataaccttgatattaccaattttaacatctgccgtggcttccattattcccgcatatcgtgcatcgcgcctcaacattaccgatgcattcaaattttcatag

SEQ ID NO: 101539 - DNA, 1371 bp, Enterobacter aerogenes
atggaaggtcaacagcatggcgatcgactcaagcgcggcttgaagaaccgccatatacagctcattgcgctaggaggcgctattggtacgggcttattcctgggtagtgcgtcagtgattcaatctgcaggtcctggtattattctcggttacgctatcgccgggtttatcgccttcctgatcatgcgtcaactcggcgagatggtcgtcgaagaaccggtagccggttcattcagccattttgcttataaatactggggcggctttgccggctttgcctccggctggaactattgggtactgtatgtgcttgtcgccatggcggaactgaccgccgtcggcaaatatatccagttctggtggccggaaatccctacctgggcctccgcggcggtcttcttcatcgccattaacgccattaacctgaccaacgtaaaagtgttcggcgaaatggagttctggttcgcgattattaaagtcgtcgcggtagtggccatgattctgttcggcgcctggctgttgttcagcggcaacggcggcccgcaggcgacggtcagtaacctgtgggatcagggcggtttcctgccgcacggcttcaccgggctggtgatgatgatggcgatcattatgttctccttcggcggtctggaactggtgggcatcaccgcggcagaagcggacaacccggaaaagagcatcccgaaagccaccaatcaggttatctatcgtatccttattttctatgtaggctccctggccgtgctgctctccctgctgccgtggacgcgcgtcaccgccgataccagcccgttcgtgctgatcttccacgaactcggcgatacgctggtggcaaacgccctcaacatcgtggtgctcaccgccgcgctctcggtttacaacagctgcgtgtactgtaacagccgtatgctgttcggcctggcgcagcagggtaatgcgccgaaagcgctgctgactctcgataaacgcggtgtaccggtcaacaccattctggtgtccgccgtagtcaccgcgctgtgcgtgctgatcaactacctggcgccggaatcggcgttcggattgctgatggcgctggtggtctccgcgctggtgattaactgggcgatgattagcctcgcgcacatcaaattccgtcgcgctaagcagcaagaaggcgtgaaaacacgtttcccggcgctgttctacccgctgggtaactggatatgcctgctatttatggtcgcggtactggccatcatgctgatgaccccgggaatggcgatttcggtgtggctgataccggtatggattgccgttctcggcgttggctatctgtttaagcagaaaagcgccggcgtcgtaaaagcacaataa

SEQ ID NO: 101540 - DNA, 429 bp, Enterobacter aerogenes; identical to SEQ ID NO: 95248

SEQ ID NO: 101541 - DNA, 1419 bp, Enterobacter aerogenes
atgaatcggtatcaatttccggaaggttttttttggggggctgcagcatcaggcccgcagacagaaggcttcgcgaataagccgcaccgttctatctgggatagctggtatgcagaacaacccaaccgctttttccagcagattggtccgcagaaagtatgtgaaacctacagcaagtataaagaggacgttgcgttaatgaagcaaacgggatttaactcgtttcgtacttccattcagtggtcacggctgattgatgattttgaaaccggtaccccaaacgcagaagctgtccggttttacaacaactacttcgatgagatgatcgccagcggcattgaaccaatgattaatctttatcatttcgacatgccggaaatattgcaaaagcagtatggcggttttgaatcaccccatgtgacggatcttttcgcaaggtttgcccgcactgcatttgagctatttggtcataaggtcaaatactggatcacctttaatgagccgatagtacctgtcgaaggcggctatctttatgatttccattatccttgcaaaaaagatggcaagctggcggcgcaggttgcatttaacattatgctggcgcatgcaaaagcggtgcacctgtaccggaaacttgagctaccgggcgaaataggcgtggtgcttaatctgactccctcgtatacccgaaacaatagcgacgaggataaaaaagcagcgtggtatgccgacctgttctttaatcgcagtttccttgaaccgctggttaagcatgaattcccgaaggagttatgtgaagtcctcgcaacccatgattgcttgccagaaataaaaaaagcggatgtcgatctgataacgagttcgcgggtagatttcctgggggttaactactatgttccacgtcgggttaaagcgcgcgaatgtccctatgaacttgattacttcacgccagagtattacttcgagaactacagcgatcccgaagggcgcttcaatccgtatcgcgataataacgagatttttccgcaggcgatttacgatatagcctgcaacatccgcgataattacgacaatatgaagtggtatctggctgaaatcggtatcgccatggatatccagtcagaaggtcctgttctggctgatggggttattgatgacactttccgtatcgaattaatggaagaacacctcgaacagctccatcgcgccatcagcgagggggcgaactgctttggcgtacaccagtggacatttattgataactggtcgtggataaatagctttaaacgccgttacggtttctggcgactggatctggaaagcggggaacgacagataaagcgcaacgctctttggtttgcacagttggctgcctctaatggatttacgcccggagcgtttataaagggcaacaagtaa

SEQ ID NO: 101542 - DNA, 660 bp, Enterobacter aerogenes
atgctttctaccactgtcgataaaggcgttcaactcaatgctgcctggcaggatgacaatctacctggcccgaaagtcagcgtagcgtggagccatgacggtaagaataacgttcacttctgtaacagcagtaaagaggaaacccgagtctggttctccgcgccgggcgactatgcgttgacctttactgctgatgacgggttgctggaaagcagcaaaacgataaatgtcagcgtgaagcccgctgtgaggcctgtaccggcagattattgcagctttggcagcgggactatggatgttagcaagggaacacttaactccattaaaagtgaaaaagatacgttagccatcggagaagacggtttcctcgggcctttcgcgcatgacggagacagcgtgagctggcaggttagcgctccctgggacggtaaatttaccctacacgtgaaatttaacggcaaatggggaagcaagaaaaactcgttcatcgtgaacgacggaacgccagtcagcattgaatttccgcaaacggatgagaagggcaagaccatagtcgttcctgtttcgctcaaagaggggggtaataccatcagttttggaaagtttaccggcgactggggatatatgttcatcaaatcaattgaagttactgcagagtaa

SEQ ID NO: 101543 - DNA, 702 bp, Enterobacter aerogenes
atgtcatcatcccgtccggtattccgctcgcgctggctgccctatgtgctggtcgcgccgcagctgattatcacgctgattttctttatctggcccgcgggcgaagcgctgtggtattcgctgcagagcgtcgatccgtttggcctttccagccagtttgtcggcctggcaaacttcgtcacgctgttccacgacccgtactatctggactcgttctggaccaccataaaattcagcaccctggtgaccattagcggtctgcttatttcgctgttttttgccgcgctggtcgactatgtggtgcgcggcagccgcttttatcaaacgctgatgctgctgccgtatgccgttgctcccgccgtcgcggcggtactgtggatcttcctcttcaatccaggacgcgggctgatcactcatttccttggcgaactgggttacgactggaaccacgcgcaaaacagcggacaggcgatgtttctggtggtctttgcctcggtctggaagcagataagctacaacttcctgttctttttcgccgcgctgcagtcgatcccgcgttcgctggttgaggccgccgccatcgacggcgccgggctcgatctttccgcttccgccgcgcagtcggtggtgctgatgttcctcgtcattatcctgacggtggtgcagttccgttacgttgaaagtaaggtgcgttaccaatga

SEQ ID NO: 101544 - DNA, 723 bp, Enterobacter aerogenes
atgaaattcataatattactacaatacgcgattccttcattaattatatttgtactaaacaaatatgtaacatctatagataattcaacatctcaattggtatacccaattgtagttcttttgagtatttatatttcttctaagttaacagagtcagaaaccaatgaaaagatagaaggtgaaaaaaaaggaataaaagcaatatatttagagttgctttcaaaacaaaacaaaaggcactcaatagaacttggtgttgtaaaagagcaaataaagtccgaaatatcaactatcattcagatagaaacgattaaaaaagtttcctcagtagagagtgaattgacgcttgagaaaaataaatcctttggtgttactcaaaggaatgaagagctacaggaggagattgaaaacctcatactggaaaacgattattatcaaaatgaaaaaataaagcacaatgatagttcacaaagactcttagacctaattagggggtttcatcataaccttgagcaaattttaaagaaaagcaatattgagtctggagagttggaaaagatcaataaactatctattgttctgcacaagaatatagatgaattcaataactcaattcaagatatggtaaggcaggagcagttgagaaatgtaaacaaaaggcaacaaaagcaaggcgcctattcatttacatctcctttggttaaagaagataacttaaggtaa

SEQ ID NO: 101545 - DNA, 537 bp, Enterobacter aerogenes
atgagcatttctgagttaggtggcgcattaaaggcaatagaaaacataaccaacgttaaagaggaaaaaactgataacgatggggcggcttactcttttggttcgctagattattacaatgacgaagtaggtataatgtcctatacctaccttatacaaactcgcaatgaggtgaagttagttactttatcgaacagttttgaatatgatacggttggattatactccaatgcgagactatttaaaatggtaaatgattttaattcaacatatatggggtataaagcatttgtcttagaaaaaaggaagagtgaaagtgatgttggattgaattttaaaagagagaaagatggtgtaataatagtaaccttcaacactgatttggttttttatcgacaggctgatttattcaaagaagaaacaaaaaaatcatttaccatttgcttaaatatcctcagtaacgctccttcattattcagtgaaatgatgacggagtatggtattaggcataaaaatatctctaacgaaagtatgtaa

SEQ ID NO: 101546 - DNA, 726 bp, Enterobacter aerogenes
atgtttgctctggttgatgtgaacagcttctatgcgagctgcgaaaccattttcaggccggacctgcgagggaagccggttgtcgtattgtccaataacgatggttgtgtgatagctcgttctgccgaagccaagaagcttggtattaaaatgggggatccgtacttcaaatgcaaagaccagttccgccggcatggagtggtttgcttcagttcgaactatgagctctacgcggatatgagcaaccgggtcatgacgacactggaggaaatgtgccctcgggtagaaatctacagcatcgacgaggctttttgcgacctcacaggtgtgcgtaattgccgtgtgctggaagagttcggacatgagttaaaagataccgtttaccgcaataccaggcttccggtcggggtggggattgcacaaacaaagacgctggcaaaactcgccaatcatgcggcaaaaacgtggaaagccactggcggggttgtcgacctgtcgaatgtggaacggcagcgaaaattaatggctttactcacggttgatgaggtgtggggggcggccgtcgcatcagcaaaaaacttgaaactatggggattaaaaccgtcctgcagttggctgatacggatatccgctttatccgcaaacacttcaacgttgtgcttgagagaaccgtgcgggagctgcgcggcgagccatgccttgaactggaagagtttgcgccagtga

SEQ ID NO: 101547 - DNA, 3159 bp, Enterobacter aerogenes
atgaccgaacaaacatcccgccttgccattgttattgatagctccggagctgagaaacaggccgatagcctgactgttgcgcttgataaaatgacacagtctggtgataaggctgtaactagtatttttaaggtttctaaagccacagatgaggaaaaagatgctctcaataaattacgagcagctattgatcctgttggcgctgctatcaatacagttggccgccgcttcagtgagttaaaacaatattttgataaagggctgattgacgaggatgagttccgttcattatctaaactgctgaacgacacgaccgaggaattaagcggtgtcgcccaggcgcagcgggaagcgaaaaaggcaggtgaattagcaactgcacagcaggaagcacaggcgcaggcatttcagagaatgctggataaaatcgacccgttatccgctgcacttcgtaatctggatcagcaacaaaatgatctgaatacggcttttgaatctgggaatattaactcgtcacaatatgatgcttacagcaaaaaactgctggagacgcgtcgtgaagtcactggaacggctcaagcagaacgagatgctgcaaaagctcatgatgagcaggttgccgctttacgtcgtcttgaggctcagattgatcctgttggggaggcattccgacgcctgaatgagcagcagcgtcagttagatagtgcgaaagcgtccgggatgctttcaccgcttgcttatgaccgtctaaatggaaaactaactgaaacaagagacgccctagaaaaaactcagaaccaactcgccaggacagggatttctgctgctcaaacagcgaatgccatgcgcatgatccctgctcaaatgacagatattgtcgtcgggctctctaccggccagtcaccgtttatggtgttgatgcagcaaggtgggcagttaaaagacatgttcggcggtgttggtccggcgattaaaggtgtgtccacctatgtaatggggttggttaatccatacagtgtggctgctgccgcagttggtctactgacttatgctgtctatcaaaaccgccaggaaatagatgccgcaacgaagatcgctacaacttcccttggtgctaacggcgatgccgccgaacgactggcgctcaatatggtcgctatatctgacaaaacgggtcaggcgattgatgacgtcggcaacatgttcattaccaccaatgacggcgctaatgaggcaatcaacaagttaatcgacgttggttacagttacgatgaagcacgacagaaagttacccaatataaggattcagccaattttacggctctgaatgctgatattgacctacatcgtcgcgagatcctaaaaattggcgactcttggacggcagcggcaataaaggtcaaaaactattacacggccgccgataaaggtaagcagaatgtggctcttggcggtgcaattgaccccacgatgagatttatcggacaggccatcgacctgcaatcaacgatgaatactctgactattgagggaaataaagctgtcgcagagtctgtaggttggattaataaagagtatctggcggctgatagagtcgctggcgctgaagccagacttaaggaagcgagagatcaatcaagaaaaattgctttttcaggaaataaagaggcgattgaacaggcgaatgcgttaatagccgttcgtgaaaaggagcttgaacaggcaaaaaaagggcagcagccaaaaataggcaggggaagcaaagaaaaaggaaaagcctacaccgaggacgcagcaactcgactccttgaccagattaaccagcagactgccgctatgcaatcccagttggatgccagtgataagcttaatagtgcaacccaggcgcgagttaagttcgagcagcagatagctgatctcaaatctaaaacgcagcttaccgccgaccagaagtcgattctttcccgttcagacaaaatattgcaggcctacaagcagcaggaagccctgcaaaactccgtcaagacgctggatgactaccggaaaatgcaggagcaaattgcaccgaaggaattgcgccaaaatgagacgctgcaaaaacgtctagaaattcttcaaaagatggttgagctgaagaaactgacgccagaggctgctgggaagcaggcgagtgacctgattagtaaatcggtgctgcctgattccgttatatcaggtgtgaacaaggccggtggtacgctgacgtctggagcaaccaatagcgacctgtcaggacagggaatgaacatgatagggctgcaaattgatccgcagcttgaaatcattgataagttgaagcaggcccagactgattatgctacttggcttaatcaacagcagcaggcgattactcaaagtaccgtgcttaatgagcagcagaagcagcaacaattgctggcactccagcagcagggccagcagaaccaggaagcgttaagcacggcagtctacgttgcgcagatgcaatccgctcaaaactccttctccagcatcactgagtcgatggggacgatgtttggtgagcaatcggcaatgtacaaagcagcctttgtaacgcagaaagcattcgcgatagcccaagcatctttgcaactccccatggcgatggggcaggcactggcggggttgccgttcccggcgaacctggctgctatcgctcaggttgtggggctcatgtccacgattacttccagcatttccagcgctgcgctaacaggcatggctcacaatggtatcgactctgtcccatcgactggaacttggttgctggaaaaaggtgaacgggttatgacagccgatacatcggcacgactggactcaacactggagaacttgcgcaaaaatggactggacgccactctcagcaagccggggtttggcactggcgttcagaacgtaagcaatagccaaaagacgacagtcatccagcctacagtcaacgttcctccgataaccatcaatggaaacccttcagatgcgactgtgatgcttgtacagcaagctgctcgtgacggtgccaaaaaaggttatcagcaagtggctaacgatctggcaaaaggggttggccaagtgcacaaggcattaactggggggtataacactggacggagaacagggtaa

SEQ ID NO: 101548 - DNA, 249 bp, Enterobacter aerogenes
atgtcagaatttttatttgtaggtggcccacttcatgggcaggtgaatgatatttatagtcatgaaagcattgaacctatcggcagtatacagttagctatcaacttagataatgaagtttttatgtatgaacgatcggattacagccggtgggaaggccctcattatcgagttgctgttttgcctggtgagagtaatcgaattcagcagaccatcgatgagactggataccagcccattgccgattaa

SEQ ID NO: 101549 - DNA, 738 bp, Enterobacter aerogenes
atgattgagctgataagttgcggtgcattctcatgccctaaaggtaatgaccgcgagaaccaagatgcactattactgccacaacaatgcgatgatggcttcatctttgctgttgccgatggcgtaggctcttatgctggtgcgaaagaggcagcgcaaactgcagtaaaccatgtcgcgatacataaagccgtggctgcttttgagccgaatgaaattctcagaggaatcaaagaaaaaatatctgatttatccctgcacgagtctgaacgccgcaaagcagctacaacattatcgtattgtgtggtggcgggaggagcacttaatgtaattcatgttggtgatacacgtgtttatgtgaaggttgataataaattaaagcttctgacaaaagatcacacccagcaccaagaattgctcgacgacggtttgtatacgaagaaagagttaacagaattaccggggaagaacttgttaacggctgccatttctaaagttttgcctgttaaatttcaacatattaccttgccgctcaacgaggtaatggatcctgaagggattgtaactcttatccttatgtctgatggggcctatcatttctgggagcgtcgaccacgtttttccccaaatacgctgaaaaatgcaaatagtttctctgcgaatcttttgaagagaattcaaagaaatggcccaacagacgatcactcgttggtcgctgtaaatctaaaaattagctaa

SEQ ID NO: 101550 - DNA, 783 bp, Enterobacter aerogenes
atggaacccagaggtaactaccttataaagcccttgaaagatctggggtgtggcgcttttggccgtgtggaaaaggttgaggtgtataacactgcaggtcatcttagtggtgaatacgcaaggaaagtcctgtcagtcaacccagcgttgctgaatgagtatttcagtgtcgatgactggaaacggcgattcaaacgtgaagttgattaccaagccaagtgtagtcatgatcatgttgttaggatttgcatacatcatcttaacattgagcacccttggtttgtcatggagttagctgagactgacctaaaaaatgagttaaaatcaaactctctatcagacgatgaaaagctagttgctctaaagatggtgttaagcggagttaagtatattcatgatgaaggcttactacaccgtgatttaaagcctgaaaatattcttaagtttgaaggtgggtgttacaagatttctgacttcggacttatcaaaagtatggattcaaaagcgcagtctgatttcttatcaggcgtgcttcaagacaaaaaaatgggcataggtactgtaaagtatatgtctgatgaggctaagcgtggcgtttatacacagaaatcagatatttatgcactaggggttatcatcagcgaaatgaatttgtctcacattgatggtataacaacacttatcgagaaatctgcagcatttttgcctcgtacaagatacgattctgttgatgaaatgatagagattcttgatgagattgttgctgcaaggagaggcaaatga

SEQ ID NO: 101551 - DNA, 582 bp, Enterobacter aerogenes
gtggttaagaaaccccagcgccggtgcaaaatctgccgggcaaaattcaccccagcattcgaaaaccaccgctggtgctgtcctgagcatggcgctgaatttgccatgcaggaactggagaagaaacgcgaaaaacaggctcaggcgaaagcgaagaaagagcgcgccgaatggcgcaaacgcaaggccgcggtgaaacctctcagacactgggaggatatgacccagcgtgtcgttaacgactatatccgcgaacgagactacgacttgccttgcatcagttgcggcacgttcgacacggtgcagtgggaagccggtcattaccgttcccgcggtaaagcatcgcaccttcgctacaacgaggacaatattcacaagcagtgtcatcactgcaacgtgcagatgtcaggtaatcagcagcagtaccgcattggcctggtagagaaaatcggggctgagcgcgtcgaggcgctggaaaacaacaacacccctcaccgatacaccatcgaagaactggaaggcatcaggcgccattacagcgcgctacgccgagcgctaataaagcaacgggaggccgcatga

SEQ ID NO: 101552 - DNA, 381 bp, Enterobacter aerogenes
atgagccaatttgaaaatgtattcctgtctgcaaagaaaatcgtcggtaatcagctggcggttgaaatcaacgtggagaaggcgaaaaccttcagcccatttgttcgtgttggtatttccgctaccggcatttttgaacgccgccctatgaacatgtttggcggcatttttgagcagaatgagctctctaacgttgataccttccctgcaattctgtggcaaatcgacaacttcgccaatccggaatatccagaccatctgattatctccactaacggtcagtttggcgattacctggaactgaacgtcattgatcagatgcaacagttcaacgaaccagcagaaagcttcatcctggaagttcaggacctcaccaaataa

SEQ ID NO: 101553 - DNA, 270 bp, Enterobacter aerogenes
atgaaagatattttgctatttggtgcaggacacgatggtactaagcgtcaagttgagctagggaaagaatcttacaacttcaacagtaaaccagtactatcgcctacaggcacggataggattagttatagtgcacagcaggtttcattccgagctatcactgtttatccagaaaaagggggttttttgattggagtacatggagaagagccttcagataaaacaatattagaagccatatttaagtacaaccctaccccattgaattga

SEQ ID NO: 101554 - DNA, 738 bp, Enterobacter aerogenes
atgaaaaatcccacgttgttgcaatgttttcactggtattacccggaaggtggcgagttatggcgggaagtagaagcccttgcgccaaatctcaatgaaattggcattaatatgatttggttgccgcccgcctataagggcgcttccggcggttattcagttggctacgatagttacgatcttttcgacctcggtgaattcgatcagaaaggatcggttgccaccaaatacggcgataaagctcagctgttagcggcgattaatgcgctaaaagaacatcaaattgctgtacttcttgatgtcgtcgtaaaccacaagatgggcgccgatgagaaagaacgcatccgcgtacaacgcgttgatgaacaggaccgcacgcaaatcgcggaagaaatcatcgaatgtgaagcctggacccgctatacctttccgggccgcggtggcaaatattcgcaatttatctgggactataaatgttttagcggtatcgaccatatcgaaaatcccgatgaagatggcgtattcaaagttgttaatgactacaccggcgatggctggaacgatcaggtcgacgatgaaatgggcaacttcgattatctcatgggcgaaaatatcgatttccgtaaccatgccgtgaccgaagagataaaatattgggcccgctgggtcattgaacagacccggctgcgatggtttccgcctggatgccgtcaaacatattccggcatggttttataa

SEQ ID NO: 101555 - DNA, 618 bp, Enterobacter aerogenes
atgcataagacgtttctgagttatcatcatgcaaatgagcaagatctcaaagatgagataattgaattgtttggtggtgattcatttattgataagtcagtaagtgatggcgatataagtaccactaatactgatgaaacaataatgagaactatccgtgaggatttcttagaggactcgactgttactgttgttcttatcggaaccgaaacaaaacaacgcccatttgtaaactctgagattcaagcgtcactctggggaagtgactataatgggttagttggtgttatcagggacgaaatctacgatagtgtgtttgctccagcggtatgtgcagatccgtcatgtggatgttctatcaccctaagaactcctggttttggatatgattactatttgccttatttggttaggaaaaatcacgtttatcaaaaaacagtacctcactataatgattcagatgtgtactgtgcattggtaaaatactctctatttattaaaaatcctgagtattacatcgaccaagcatttaataagcgcaagacgatggaacctgctgcgaaaaaaaactcatcggatgttccggcgattcgaagttcaacaacttttaattggtag

SEQ ID NO: 101556 - DNA, 732 bp, Enterobacter aerogenes
atgtacaagttatgggttttgtggggctgtgtttttgttcttctcctaatagttatgggatgtgttccgttttcaccatttgaaaaatggtggtttacgataaactttatgtcaaatgtaaatattattcgtgcttttctatcagttttaatattatttttaattgcttatattttattggttggtgcttttcaccaaagatattcattgaggttggagcaattaagttttggtggtgttaatatactgcttaataaatcagatgttctttttaaaaaaagcgtaaaaaattatttagatactaagcgctcattgtttaagttcgacccaaattatgattcaattgaagaggtgttgaactcatattatgaatgttataaatttatcaaagatgaaatgaagttattggatattactaaaaggcgagataaaaaattatatttgctagccaatgaaatattgaaaactttaaatgcttttttgactaagcatcaaaataactataggagatggcataagtttatttcagataatgataaagtaattacaaaagacaaggactctaatggagggtttgtaacattaccgtatcatttgacacctattagtactatccaatcacattattatcatttcaatcaaatactggaaggttttaaagaagttaatggcttttttactgataaggttgttaatgagtttgatataaatattgataagtggagtgtgtaa

SEQ ID NO: 101557 - DNA, 843 bp, Enterobacter aerogenes
atggcaacattacttttagcagtgattttggttagtggttttatatatgtaaacctatcactttcaacacgttacagatataagcgttccaatggctgggacgcttatttttttgtcgccgcctggggaattgtgttctttctgctcggtggctttttaaccttcgtcctgaatattacaggcgggttccgctggctatccaatgagcttaatcttacgccggatagcttcaacggcatgttgtctacttcatccgacaaagcccagcgcatcaatgaaatcaagcagattgcatgggttgttatttcaattgtgctttctgcaatttctggtctgggcaataagttgcgtacaaagagcggtgatcgccgctgggatgcgctggctaaggctgtggggaataactcttttgagtcattgctgatggaagcatcagcacgacaatttccgatcatcgcgacactctcatcgcgaaaaatctatgttggcctggtgacgtgtccggcgctggaaaatgggctgtcggaacacctggaaatactccctatgttaagcggctatcgtgataaagacgatcttacgataagcatcacgacgaactatcatcagcactatcttgaaagcggtgttatcggtgggatgtcgcgcctgaatatccaggatttccgtgtgctaatccctaaagatgaagttgaaaccatctcgttttttgacactgaaacgtataacaaatttaaagaagacgaagcacgtgaccggaaagactgtcgcaagttgggtggtaaaaagccatcaacacgcaggagaaggactgctggcgacgcagagcagggtagtgcatga

SEQ ID NO: 101558 - DNA, 219 bp, Enterobacter aerogenes; identical to SEQ ID NO: 79409

SEQ ID NO: 101559 - DNA, 1011 bp, Enterobacter aerogenes
atgaatgccatcgatccgcgctgcttcgcttccagcactatcaataccatcagtatttcaggtggcaaagatagtcttgcacaatggctaagagctattgaaaacgatgttccgcatatttctgtctttgctgatacgggccatgaacaccctcagacaatggaatatctggattatctggagtcaaagctagggaagattatccgcgttaaagctgatttcacgcgccggatagaagggaaacgtaaattcattgctgagaagtggcccgtttctctggttcaggaatgcggtatgtcgccggatgaagctgcagaacgcattcatcgggctctggaaatccttaaaccaactggcaacccgtttcttgatttgtgcatgtggaaaggtcgtttcccttcaaccaaggtccgtttctgcacgtttgagctgaaacatgagccagtgcggacgcaggtgatcgtcccggctctggacgagtacgacgaggtaatcagttggcagggcgtccgggggcaggaatcaccggagcgtgctttgctgcctgagtgggaggaagatgcagactatacaccgggcttgcacgtttatcgcccgatcctcaactggctgcatgaggatgtattcgccattgccagacgccatggtatcaagccgaacccactttatttacagggctgcagccgtgtcggttgtatgccatgtattcatgcccgcaagtctgaacttgcagagattttccagcgctggcccgaagaaatccgccgtgtggctgaatgggaaagaatggttgcggaatgttcacgacgtggcaattcaacatttttcccgtccacgcatgacccgcgtcgtgctgaaaaacgtattgaagtcattaccgttgatgcttatggaattgagtcttatcgcgactgggccttaaccactcgcggcggtgtgcagttcgacctgctggcaggcatgaatgataagtcggtgtgcagtagtgtttatgcgggagtctgcgagtga

SEQ ID NO: 101560 - DNA, 849 bp, Enterobacter aerogenes
atgagcaccatcctgaaatgggcgggaaataaaaccgccatcatgccggaactgattaagcaccttcccgctggtccgcgactggttgaacctttcgcgggttcctgcgctgtgatgatggcgacagactatcctcattatcttgtcgcggatattaatccagacctgataaatctttataaacatattgcatttgattgcgagaaatttatttcaaatgcaaaagggttcttttcaggcacaaatagcgttgagtcttattacaacatccggcaggattttaatcattctgctgaaaccaccgatttctggaaagctgtatttttcctttatcttaatcgccatggttatcgtgggctgtgccgttataacttaagcggtcattttaatgttccttacggtaattataaaaatccgtatttccctgaaaatgaaatacgtgcttttgctgaaaagtctcaacgcgcaacgtttatctgtgccagttatgacgaaacactggcgctgttgcaggctggtgatgttgtttattgtgatccaccatacgatggcacgtttagcggttatcacactgccggttttacagaggacgatcagtatcatctggcgtctattcttgagcgccgctcatcagaaggtcatccggttatcgtgtccaacagcgacacatccctgacccgttctctttatcgtaatttcactcgccaccgtatcaccgcaaagcgcagcatgggtgtggcagcgggtgatagtaaatctgcagcagaaatcatcgccacaaaatcagtcggctgggttggagttgattatgccagaggtccagaccgtaccgttgaggtacgcgtatga

SEQ ID NO: 101561 - DNA, 1875 bp, Enterobacter aerogenes
atgttaagcgaaggctatatcactcaggcacagtacgatcaggcgcgcagcgaagcgattgacgccagctaccatacgccggaaatcgccttctccgctccgtatctgagcgaaatggtgcgtcaggagatggtcaaccgctacggcgagcaggcctacgaagacggctatcgcgtctacaccaccatcacgcgtaaaaaccagcaggccgcccagcagtcggtgcgtaaaaacgtgctcgattacgacatgcgccacggctatcgtggcccggccaatgtgctgtggaaagttggcgagaccccgtgggataacaaaaaaatcctcgatacgctgaaaaaactaccgggcgtcggcccgctggccccggcggtagtcacctccgcgaacccgcaggaagcggtcgcgttgctgggcaacggcacgtcggtggcattaacgatggatggcgtccgctgggcgcgtcgctacgtttccgatacgcaacaaggctcgacgccgcgcaaagtgaccgacgtcattcagaccgggcagcaaatttgggtgcgcaaagagggcgacaaatggtggctgtcgcaggtgccggaagtgaactccgcgctggtatctatcaacccgcaaaatggcgcgattatcgctctggtcggcggctttgacttcaatcagagtaagttcaaccgcgctacccaggcgctgcgtcaggttggctccaatatcaagccattcctttataccgcggcgatggacaaaggcttaaccctcgccagtatgcttaacgatgtgccgatctcccgctgggatgccggcgcgggctccgactggcggccgaaaaactcgccgccgcagtacgccggccctattcgtctgcgtcagggattaggccagtcgaagaacgtggtgatggtgcgcgcgatgcgcgcaatgggcgtcgattatgcggcagagtatctgcagcgtttcggcttcccggcgcagaacattgtccataccgaatcactggcgctgggttccgcttcctttaccccgctacaggtcgcccgcggctactcggtaatggctaacggcggcttcctgattaacccgtacttcattagcaagattgagaacgaccagggcggcgtgctgtttgaagagcggcctaagatcgcctgtccgcagtgtaattcgccggtgatctacggcgatacgccgaaatccaatgtgctggaaaaccaggatgttgaagaggtcgccacctctcaggagccgcaaaacggcgacgttccgccgcagccgcagcttgagcaggctaatcagtcgctggtcgcgcaaagcggcgcaccggagtatgccccgcatgtcatcaacacgccgttggccttcctgattaagagcgcgctgaataccaatattttcggcgaaccgggctggatgggcaccggctggcgtgcgggccgcgacctgcagcgtcatgatatcggcggcaaaaccggtaccaccaacagctcaaaagacgcgtggttctccggctacggtcctggcgtcgtgacgtcggtgtggattggcttcgatgaccaccgccgcgatttgggccgtaccaccgcttccggcgcgattaaagatcagatttcgggttatgaaggcggcgctaaaagcgcccaaccggcctgggatgactttatgaaacgggtacttgaaggcgtgccggaagagccgttaacgccgccgccgggtattgtgacggtgaatatcgaccgcagcacaggtcaactggctaacggcggcaacagccgcgccgagtacttcatcgagggcacgcagcctacccatcaggcggtgcgcgaagttggcaccaccattaccgatagcggtggcgaaacccacgagttgttctaa

SEQ ID NO: 101562 - DNA, 699 bp, Enterobacter aerogenes
gtgaagttcgtaaagtatctttttatccttgcagtttgttgcgttctgctgggagcaggctcgatttatggcctctacaaatttatagagccgcaactccccgacgtcgcgaccttaaaggatgtgcgtctgcaaatcccgatgcaggtctatagcgcggacggcgagcttattgcgcaatatggcgaaaagcgccgcatccccgtcactctgcagcagatgccgccagagctgataaaagcgtttatcgcgactgaagatagccgcttctatgagcatcatggcgtcgatccggtggggattttccgcgccgccagcgtggcgatgttctcaggccatgcctcgcagggcgccagtaccatcactcagcagctcgcacgtaactttttcctcagtccggaaaaaacgataacgcgtaagatcaaagaagttttcctcgcaatccgcatcgaacaactgctgaataaagacgaaattctcgatctttacctcaacaaaatttacctcggctaccgtgcctatggcgtcggcgccgccgcgcaggtttacttcggtaaaacggtcgatcagctgacgctgagcgaaatggcggtcatcgccggtctaccgaaagcgccttccacctttaacccgctctattcgctggaccgcgcgaccgcgcgaccgcgcgtcgcaacgtggtgctgtcgcgaatgttaa

SEQ ID NO: 101563 - DNA, 471 bp, Enterobacter aerogenes
atggctaaaattctggtgctttattattccatgtatggacacattgaaaccatggctcatgccgttgccgaaggggcaaataaagttgacggcgttgaggtggttgtgaagcgcgtgccggaaactatgcaggctgaagcgtttgccaaagcaggcgggaaaacacaaaatgcgcccgtcgccacaccgcaggaactggcggagtatgatgccatcatctttggtacccctacccgtttcggcaatatgtcgggacagatgcgcaccttcctggatcagaccggcggcctgtgggcttccggcgcgctgtatggcaaagtcgccagcgtctttagttcaaccggtaccggcggcggccaggagcagacaattacctcaacctggactacccttgcccatcaccatcgcaggcggcgacggctcccgtcaaccaagccaggaagagctggctatcgctcgctaccagggtga

SEQ ID NO: 101564 - DNA, 870 bp, Enterobacter aerogenes
atgaaaagagggattgtatcgataccaatggagattagcacttcagaggatgggcttgcttttattggtggttctggccttaatgcgcttgatttgaatttttttgccatgtactgggatgagttaatcatcccagcaagcgacttggtgtatcttggaattaatgatgaagaaccatttatagaagcaggattccttcagcgaccaaaaattccaagacagaaaaactcactgactggggatgaacttatatcagcatattcaaatgcacaaacctactggttagataaaaaaagaagtgaggataaagatagtaattggcgcatgagtattgtgggggataactttagactgcatgaggatggaagcgagttaaaacagtcatttagacttgaactagctcgggctctacctgttcctgatacgagtgttaacataaatgaaattttggaattcaaaaccaagtggaactcagaatatgaagcatttaatagttatttagatgaactatatcttgaggttgtgtcatctggtgactttaatttaacaagattaaaagcatttgagaaattgaatgcttctttgagtgaccttgaaagacttaataacgaaggttggcggagccctattagatttgacacatcagcgttgttcgagataagtctgggagatttaagagatgcaggcacaggtctattagcgataatgcaagcaagtcagggggattggaaaacagcactggctgctggcgggatagctttagctgggcaaggcatagcacgtttaaaaccatgtttgcaaagcgttagacgaaagccagatttaaatattgcatatttatcaaaagcacatacgcatggaataacataa

SEQ ID NO: 101565 - DNA, 1401 bp, Enterobacter aerogenes
atgtctttaaatttaatcagcaacagtgccattaaaggttcaccgaaactccctgacattaacgcgcctctcccttctggcgctgcactctttgccgattttgcgggttcccggtttgtgatgaaatatgcaaccggacaggttaagcgcggggcatcagcaaaagaggttatttcctttctgcgctccagcccggccacacgaattgggccgtctggtctaattgaatatctcatggcagatgagccggccattgaataccacccgatgacgcatgagtgcctgggtattcgtactgagtcggtatcgaataaccgaatcgcctggagtcaggatttcacccaggctgcgagctggacgccatcaggagtgacgctgaccgctaacgatgtagtatcgccagacggaaataccacggcgacgaaattgattgaaactgctggtagttccgcgacagcgcatacattactggcgatcactacgatggcggcgacatcgggccagccttacaccttcagcatctgggcgaaagcaaatacaggcagtgtcctccagattgttgcacaaggcgcagtggctacgactcagtttgttaactttgacctgaagaatgggaagattgggaaatcctctccgcaggtgctgcaggcgacaatgcaggaatttaagaatggctggtatcgttgtgccatcactatcacaccgacgtcgtctgtatcaccacaattcacgctggctctgaccgggagtgatgcttcagcagcagcgctgccgtcttatataccgacaacgccaggctcagtatatatctggggagcgcagccagagcgtcgcgatggtgcttcttcgtacatcccgacaagtggcgcagaggcatcacgtgccgcggatatctgcactacgccgaccaactacgatgcagtgtcgtcagatgccgggaccatcctcatcacctgcgtgcagccccacagtaaccagtcagttaccgggacatataacgccctggcgtgcgctacggtgattgataattcagtggcaggagaaagtctgcgcttatcctaccgaaatctgacaaataacaacggtcaggcgcagtgggcgaccgcagacgccagcggcacatcgcagtcacttgagatttacagtatgtgtcctgtcagggattcagagcagacggccattttctcgtttgataagcccaccatgacgatgaagttgttcgatgggttcaactggtattcacggaccgttacgcagctaccagcagcccttaaccgggtctgtatcgggcggagctacattggcccggaaaactggtttaatggatatattaaaaaactgatttactggccgaaggcattgacagagcaagagatggaggaggcaatatcgtacttctaa

SEQ ID NO: 101566 - DNA, 1998 bp, Enterobacter aerogenes
atggcaacaccgttaccgactccaacgcaaaatcctgtcccaagcacggatatcagggatgcagtatttgccggcgcaaagatggatgagatcgtcaccagcccaagcgagaaatacacagacaggtttggaaatgaacattacacgattgagggtatcaggaagaatctaattccactgggtaagcagtacatgacgctggcagaagctcaggcggatattgccaatatccccgaagggagcacaacgtattatcgcagccctgatgatagcgcgctggctattgaggttattaaccacggcggaacgcttgaacctaccgggcggaagatgccatctcaaaatcatatagaccagatgatcgggctatctgatagcggcaatattgcgatgcaaacagattccactggtcaggttattactgtcactgatgattttggcggcgtaagcatccctgatgtacctggtactctccaggaggctctcgcacctgttaaaacaaatcgtgccccggcaatccttcggctcagtgatgctgaaaatgctgcctatggttcagtagatgattttggcggactgaacctcccaggcatcccggcgtcagtacagcacatgctgagtaatcatcaggataaaattcagaacctgatccgcaatggtcgggtgcttgatgtccgagactgtggatttaatgcaaaaactggcgaaaacgccgtatatgcaatccagcgggcgataaactggttaagtggccagggtggcggggtggtatatcttccacaggccaattatttactttccagctatatcacacctcgttcaaatgtgtcgattatcggtgccggagtagataagtccgttcttcttccttacaagtcatttgccgctatccgccgcatcggaaatgtaaacgactatctgcagaacgtcatcatgtctgattttacgatagacggcgctaatcaggtattaaacccaacatctggttacctgcctgaaattaaaggcacggtcattctctactggaaagactgtgtaatggataagctgaaaatggttaatacaggagcaacagcgctgggtaacgacatgccttacaactgttcaatcatgcgctgttatatcgagaatgcagggcgcctggtgcccaatagggatgcggggatatgggaaaggccgctcggagcatcagggattggtctgggtaccggcgctctcgatgatgaacctatttatgtagcattcaacactgttagaaagtgcgcaaacttcggtttgttctttgaaccgcagggaggcggagccgcaagaggcgctgtcgcgatcggaaacattctggaggagaattatgccgggctggcggattgtggtgtggatggtttacaggcagtaagcaaccagatgcgtttcaatcaatttggtatccttcgttaccccggaaccaacaatgacggtaaacctgggcgtcgtggacagtttattggaaacattgttgattcaaatacggatcacggtatttactcatacagcacaaaaacagacccgttaattggctggaacatttattcgaacaaccaggtgaccaataacggtaaagatggttttaatttccgctatacgaaccctgccgttgggatgcagaacgaaacggtaagcggaaaccatatctatgcaaacggccgtcacggcatcaacgtggaagagtcattgagtgtaactaactgcgatttcctcagtaataaaatctggggtaatggtcagaaagaggttggtaacggcgtaaatagcgccattccattcacggcctgctcgattaatggtaatcagatccgcgatacgcagagcacaccaacccagcagtatccggtcaaccttaccggggtactgacggacgttgacatctccatgaatcactgtgtcggcaacgttaataactcaataaatacaccaaactccgcaaatcagcgcgtctctaaaaacatcaatgcagggatttaa

SEQ ID NO: 101567 - DNA, 531 bp, Enterobacter aerogenes
atgaaatatccaaccgtatcagttaacggcgtttccgttcgtgtagacgatgaaggtcgctacagccttaatgatctccatgcagcagcagtagctaatggagaagcgacagaatcccaacgtcccagcgtgttcttacgtagtgcccagatcaaacgcttcgtgaaagctctaaaatccaaagcactaaaaagtgctttggaacaaaatcagccacttagggttgtaaagggtggtgatcaaagtggcgcatggggagtggaacttttagcaattcgttatgcagcctggattaagccggagttcgaaattgaagtgtacgaggtatttcgaaccgtcgttcgtttggggatcggagctatgtcccgcctaaacaaaatcgaccacatcatcaacactgaaaccaaagcaatcagccagtgcgcgagccagatggcgaagtggggtgtaggtggtcgtaagcaattgctccatgcagcgcgcgatcgtgctgctgatgaggtccagttatatttacccggtatcgcatag

SEQ ID NO: 101568 - DNA, 324 bp, Enterobacter aerogenes
atgattgacaataaatctttggtccacattgatatcggtggtgattatcgaatcggactggggaggcttctgaagtatgaatttgatgctacagatggttcaggccagataaaaatcacaatagaaccttttggagtttctttcgtgccggatgaactctctaagatcattttaaagataggtactttagtaacactatcaatcattaagggacctagcgatgagcatcgagctctcaacttaaggggtgtcaatgccagtaccactgaaagtaatggcagttatatttgtaatcaactaacactcttgttttcagatctctaa

SEQ ID NO: 101569 - DNA, 471 bp, Enterobacter aerogenes
gtgattggcgcactggtaaagcgttactggttgcagttgctggtgatagccttaatcggcgcattggcattcttcgtgaaccgctaccgtgaaaaggcaatcacctacaaagaccagcgcgataaagccactgagcggctcagtctggcgagcgccaccatcaaagacatgcagaccaggcagcgagatgttgctgcactggatgctaaatacatcggagaactggctaatgccaaagctactatcgatcagcttgagcgtgatgttgcttctggtaagcgtcggttgcagctcaacgcaaaatgcaccgcgaacggagcgaccagcaccgtcggcgtgggcgatgctcccagcccccgacttactgactccgctgaacgggattatttcaccctcagagagcgaatcgtcacagtgacgaagcaggttgactatctgcaggactacgtcaaagagcagtgcttaaaataa

SEQ ID NO: 101570 - DNA, 543 bp, Enterobacter aerogenes
atgcaatcacttacgtatcaacacaataccggattcgttccgggcgcgatgataaatcgcgctcaatcaaggcaggatcgcgatcatgagctgatccgcgatgcagtaagagcctgggcgtctgctatcgacaatcaggacgtggtatcagctctgattatcaacgagtaccgggagcagggcggcgattcaatcagctttcctgacgatatcagccgggcccggcagaaactctttcgcttcctggataaccggtttgattccgatcagtaccgcgagaacgttcgccaactgacaccggcaatcatggctgtattacctctcgagttccgtaccaagctggcgccgcagaacgacaccatgtctctgatagcttcggcaatgaaagagtgtgcagaggccaagcaggcagtgcttcttaacgcgcctgagcatcagaaactgaaggaggtaagcgagggtatcgcttcgctgtttcgcctcatgccggagcaggtaggcccactgatgacgatggtgacatcgatgctgggggttatgtga

SEQ ID NO: 101571 - DNA, 210 bp, Enterobacter aerogenes
atgaacaatattcgcagtttccgcgagaagtttgggttaacgcaggcagatcttgcgaaacatgttggctgtactcgcggagctatttgccactatgagacaggacgacggggaatggatatcaatctttgccgtgtattcatcaatgcctttaagcaatatgggcacgacgtcacgattgatgaccttttcccgccaaaagcagcttaa

SEQ ID NO: 101572 - DNA, 654 bp, Enterobacter aerogenes
atgaactggtacgatatcgctaagcaaaggattgatgcgcttggtttgagccaagataaacttgcggaacaccttggagtaactaaaggtgccgttagccattggttgaatggccgaagaaatccatctcttcaggagatcggagccattttccagtaccttggtgttaccgatgttaagttcaatcctgatggaacctttagtattggcgatgtcaccgaacaaaagccggtgatacctcaatatgaatacccgttaatctcagaagttcaggccggatcacttgaagagtcaccagcaagatatgagcttgagtctcatgtctggatagcaacttctacgtatgccagctcgaactcatattggctcaaggtgaagggtcactctatgaccgcgccacaagggagcacacccagcttccctgaaggtatgctgatactggtagatcctgataaagctgaatgcgtgaagtctggtgatttctgcgtggctcagttgaacggagaagtaacgtttaaggtattccagatgtatggaggcaagccgttactggaaccactcaaccctagatatgaaaatattccagttacggatgggttccgcatccttggtaaggttgtgaaatctcagtggcctgatgaaacgtttggataa

SEQ ID NO: 101573 - DNA, 999 bp, Enterobacter aerogenes
ttggaaatcagcacggcggttattcattccgaagaagatgctttgcgttttgttgagatgtacatcgctgggcaagatcttcctgatgggatatcatttgaagggtggcctaacttaacctttcgtctaactggtgacaaatttcatggcagtttgacaccttctgtcatgaagggttttgttgaaatgcaggcccaaataaaccgagcttatgcattgttaaagtacggggttcctgacccaagaaagctttcaaaagaagagaaagaagctatcgaaattcaggtgaatgttgagaatggctcgtccttgatagaagttaatatggatgggttcatgggcgaggttatacaaactgcggtgagtaaagtgggtcctcaagagattgtcattacagttttaggggtcgctcttatatggggcggcgtcgtcctatttaaaaaatatctagaagaccgcaaagagattcgcatggcagaagtaaaaagcgagtctgaacgtgaacaccttgcgaccatgcgattcatgtctgagcaggaaacaaagcgaagtgagttattgactcagattattagcgaaaaacccaagttagacaacatggaaagacttgcccatgacgccaaaaccgacatagttaaatcatttgtcaaggcagatacagctcagattgatggcgttgtattggatgcagatctatccaaaaccctcactacaaatgcaaggcggaaatcaatggagatccgccttgatggaaattatcgcattgaaaaggttgactccactgatccggagagcttcaaagtgcaagtgagaaacgttgactccgatctaagaatatcgtgcatagtacaagatgtttttctcgacgcatccgagcacaaaaaggctcttcagcaagctgagtgggacagaaaaccagttcatttgtcaattaacgcaaaagaactcgatggtgaaataaagtccgcgataatcctttatgtcaaagagataacataa

SEQ ID NO: 101574 - DNA, 138 bp, Enterobacter aerogenes
atgaatcacgatgaatttgatgatggtcgttgcggtatgtcgcgccggtgctggcgaaacctgacccgcatctgcattggcttgatagccttatacctgctgattgccttgtttgtgatgggggtattccatgattag

SEQ ID NO: 101575 - DNA, 207 bp, Enterobacter aerogenes
atgattagtcagcactacggtacccagaccgttaaccgcggcgccgttcagccaggcatgctggttaagcatcgcgacggcacctggacggcatcagctcacaaacgcggcaagttataccttcaccgcggctgcgaacgtacctacaccaaagccctgctcatcgagatctacctcgatggacgcggaaacggattaagcaactaa

SEQ ID NO: 101576 - DNA, 624 bp, Enterobacter aerogenes
atgacatcgaaaaaggtatacgcagcaatcagtgcagtggctaaggacatggctgccacaggaattagcaaagaccgcaagaacgctcagcaaggcttcaacttccgcggcattgaccaggtatataacgctttagcccctgcacttgttaatcacggattagtcatccttccacgtattaccgagcgaaccgttacagagcggactactcagaaaggtggtgttctgttctacgtggtcgttaaagctgaatttgatttcgtcagcaccgaagacggcagcattcataccgtcgtcacctacggcgaggcgatggatagcggcgataaagcaacgaacaaagccatgtcgattgcctataaatatgcagctttccaggcattctgcatcccaacggaagagacagctattgacgcagatgctgaggttcatcaagtacagccggcagcagcagatcaaatcctcgctgaattcacccagtacgccagcaccgaaaacgacagcaaaaggcttcaggaaaattacgccacaacgtggtcgcgactgaacggttttgctgatcatcaggcgaagtgcaaagacgttactggtatccgacttaaagagttaaaacaggcggcataa

SEQ ID NO: 101577 - DNA, 381 bp, Enterobacter aerogenes
atgaaaactttacctgcatcaactcagcgggcggctaagccatgcccgacacccgtaattgtctggcaaacgctacttacccgtctgctggagcaacactatggcctaactctgaacgacacgccgtttggcgacgacagagtgattcaggcgcacatcaacgctggcatttctctgtgcgacgccgtcaacttcattgtggaacggtatgaactggtgcgcatcgaccacagccgtttcggcctcaccgagcgctcatcgctgattggtgccatcgacatcctgcgagcccgccgtgcaaccgggctgatagtaagtagtggctacagcaccatcacccgcatcacaacgggccggtattgggaggatacagcacagtga

SEQ ID NO: 101578 - DNA, 327 bp, Enterobacter aerogenes
atggagaaaaactatcccatcgaatgggggcttcgacgcgatatcacgccgcgtgtaggagcacgactggtacaggaaggaaatcaactgcattacctggctgaccgggtcggtgtcaccggcacctttaaggaagctgagagccgcaaactgaatgcagcatttccgcatttcgtggagcagatggagttaatgttactctccggggaactaaacccccgttatgcgcactgtgtcaccctgtaccatgatggatttacctgtgaagccgacacgcttggctcttatggttacgtctacaccgtcatttaccctactcaacgctga

SEQ ID NO: 101579 - DNA, 474 bp, Enterobacter aerogenes
atgcctgaactgattttacccccggctttcccggtgaatgaacagcgtattatccgccgcgccatgcgcctgctggagaaatacctgcgccagcctggtgagcagtttcttgccgcgaattgtacgaaaacttggctacaactgcttctggcgcgacaggaaagagaagtctttgtcgtactctacctcgataatcaacatcgcctgctggaacacgaaactctatttctcggcacgatcagccataccgaagttcatccccgtgaaattttaaaatctgcactgcgccataacgcagcagcggtgatagtcgcccataaccatccgtccgggattacggatgcaagtaaggcagacagaaccatcaccgcccaaatcgtaaacgctctgggtctggtcgaggttcgggtactggaccatttcattatcggtaatggcgaaatattgtcttttgctgaacggggctggctgtag

SEQ ID NO: 101580 - DNA, 468 bp, Enterobacter aerogenes
atgcggttaatttacggaattctgatggtatcaattctgacatccgcaacaacggctcaggcaataccgaatatgtggtccagtggctttggtcagggcataacagaatatctaatcaccaacccggaaaatgtcgtttttaaccttaactgcaccatgactccggatgagcagaataccctacagcacaatgtactcatcgacctacctgacggtactcgcgtggactcacgcgatgacaaaacaacaataacggttgtgaccgatgatcaacagttcccgttaccttcatcgctggactggcgaaatggggataacgcatggattcagtttattgacgcgcttggtcatgccgcaacgttcgatgtttatgttaatgataaaaaagtaggaagtttttcacccggtattaagaatacgaaaaaagagctcaatgacctcagcggttgcaggaataccgctggttaa

SEQ ID NO: 101581 - DNA, 501 bp, Enterobacter aerogenes
atgtgttaccttcaaaatattaatacgaatttgtgccgtgccatatattgcgcttctgccctaatagctttcacttcaagttttgtggcgaatcaggctcatgcgaatatcgagaatggctggtcgggctctattcaaggtggtatcccggctatcactcgcgaatccagttccggtaagcttttctggtgcaatcaacggatggtactaacaaaagcctgtcgtatcgttgacatctcaccaggcaaacgcgttgcgatagtaaatcagcctaagcctgaagcgaactgccccaacgggatttggggtatcgttgaccgtgaatcgggcatcgccagaaccattgtgcccgacgatcacaataaagtgacgtttgagcagtattgtcgcggtaactttaaggtcggttttgttaaaaccagcaatccaaatgttctggctaagattgtggtgtatttcaataaccagcctgttgactcgttggaatacgctacaaaatag

SEQ ID NO: 101582 - DNA, 690 bp, Enterobacter aerogenes
atgactcaggctgaacgccgtcatgaccggcttgccgtcaggctgtcgttaattatcagccgcctggtggcgggtgaaactctggatttgcgaaagctggcaactgaattcggtgtgtcggttcgtaccctgcgaagggactttcgggaacgtctgatgtatctggatctggagtatcgcaaaggtcagtgtcgcttgctgtccggatgtcgacagagagagctggcagtgatgacgtttgctcgccagtcgggtgttgaagcgctgtttccttatatggacaaccatctggccagttctcttttgagcggaccagtggaagctccttgccttatttggccgggagttgcgcaggtgccatcctcagactctggcgtgtttgcccaactggtgaatgcggtgtctgaacacaggaaggtgacgctacttggaaacggttgtcgctgtacgggtcttgctccctaccgtctggtattacgtgatggggagtggtatctgacaggcgagcatcaggcacggatagcagtatttcctctcgcggaaatccgagctgtcacgcttcacaacgacatctttacccttgataccgccgtacgcgacatcctctcctgtccagattttcttcaggcgttacctcactttcggttcatcaatgacgtgatatcaaccttcagagccgaactacattga

SEQ ID NO: 101583 - DNA, 876 bp, Enterobacter aerogenes
atgaataaacctgaaagtttgcaggccatcgaaaagccactggcatcactcccccacgccattggcaaacatatttttgaccatattcaaaagctcactcactacgaaccggtcatcggtattatgggaaaaacaggtgcagggaaatcgtcactctgcaatgctctgttccaaagtgaggttacgaccatcagcgatatcgactcatgcacccgtgaagtgctgcgattgcgactgcgtagtggtgaccacagcctgatacttttagatctacccggtgtcggcgagagtgaacaacgggatacagaatatgaatctttataccgccgtatcctgcctgagctggatttaatcctgtgggtcatcaaagcagatgatcgtgctttctccgtcgatgaacgtttctaccgtcgggttatgtctgaccaccaccagcgggtgctttttgtcgttaaccaggctgacaaaatagagcccagccatgagtggtatgtcaccggtaatgcaccatcaccgcaccagttggtgaatattgaggccaggctggcgtctattcgccagttattctcaccacaccatccggtgtgcgctatctcagcgagaacagaatggaatctgccatcaatggtagaaactatgatgcgcagcctgccgaaccgtgccaccagtccattggcgacacaactgcacgggaggttatgcagtgaaccggtaaaaaagcaggctcgtgagggctttggcaacgcagtaggagaggtgtttgattctgcggaagcggcatcatttattgctgcgccattaaaagcgattattcatactgtccgcgatgccgtagtatccgttgcccgtgccgtttgggactggattttcttctga

SEQ ID NO: 101584 - DNA, 627 bp, Enterobacter aerogenes
atgaaaacttatgaaggatcacatggtgaacatgttctggaatattgggtaaagattaatagattgctttgtcgcctgactgactgctaccccaggctaacggctgtacgtgtagatctccactatccaaaaatagtcgataacggtgacaatatctgttgcttccctaatctggaatctggagtcatttccaggatgcgtgaatccctcggggcgaagctggaagctgaccgtattcgtaagaaacgtgaaggtaagcgtatataccgctgccctttgtttattatgtgggcgaaagagtattctaaatcaggaaaatgccattaccacatttgcctgcttttcaacaaagacgcctactaccacctcggggactatgagcaggaagataacctgagagggatgattacaggtgcttggtatagcgccttaaagctccagcgggacgattgcccagaattggtgacattccctgataactgtcgctacgtactggataacgaagcccctgattttgaagataagtaccaagcgttgctaacccggctggactatctgaccaaagtcgagtctaaagtgtttggtgagggggatcgtaacttcggttgcagccagatagatctgtaa

SEQ ID NO: 101585 - DNA, 573 bp, Enterobacter aerogenes
atgaaattttttgcttacttcgcttgtgttgactctgctggagcaaaagaagttagagagcatactatttttcgagaaatatgcggttttttccatgtagactcagagaatattgttatcgaaattgttgacattaaacgaccattttcagaacaacggcttttaaaggagctcattaatacaaaaatgaaccgtggtgacaccattgtaattactgatttaagctgtctgggaagaaatgttgaggacatagaggaggctttatttttattttttcgaaaggagataaatgtctactgttaccatcctcgcactagaattgagccagcaattgaatgctgcatgtcatttctgataacagtccaaaaaaaagtcgacattcataatcttaagtcaacaaggagtcggtatcggacaatgaaaaaagcgttaggaagaaaaaagggaagtaaacataagatggaaatattaaaacttaagctaaaaggacatacacagatacaaacagctaaaattctaggaatcagtatttcaacagtcaaacgccactggaaaaacacatttattacttag

SEQ ID NO: 101586 - DNA, 213 bp, Enterobacter aerogenes
atgaacacatccaacgtcagaatccttcgtttaaccgacgtcgtcagcaaaatgggcataagccgctccaccatctatgattggctcaatccaaaatcttcgcgctacgatgcatcttttcccaaacagcgtcgactgggtaagcaatctatcggctggctggaagctgagttagacgagtggcttttactacgtagtcaagtgggttattga

SEQ ID NO: 101587 - DNA, 867 bp, Enterobacter aerogenes
atgttttctgtatctgaaatttgtgaagaaattagtcagaaaagaaaggaagtctctgaggagatgtcacactgcaagtgggagagatatgctgaaatacttgatgaaagctactcggtaatgcaagaagaactagccagaatgagagaacagtactggaaatctgcaaaagtgggtacgcgtgtaaggttgtactcagaacctcatcttcgggattatcaaagtcacactgttaatgggatgttacagctcaaagaggagtacacagaattatatgatcctgtacaggagtgctggcgagacttacagagtcgtatttatcgggagactttttttccattaattatcgagcccatcagaattgatgacatattttttgcgcatctttttaatgcttcaatgttgtatcaatgggggcagtcggtagcatcggaaaatgaatgcatcgcgctaagggcattaaatacctcttttagtctatttgataagtgtatcggaatggtttggttcaaggtttacattgataaacaatcagaactatcaggcgttagagttaaggctggaaagaaggggggcgagaagaaaacagaggtatacattgttattcagaggaaattagtagaccttataaatgaacttgcaccacaaggtggttggaaaagtaaagctgcggcagtgaatgaccttattgaccccttatgggaatatgttgaagaatcagattttgtgattaacaatcaaagtaaaaaataccgattagcaaatgcaagccaagatgcattagcggatactattctaaaaaattggtcacgaaacgttgagagtatcagactagcatttgattctcatgtacacagaaaaaaataa

SEQ ID NO: 101588 - DNA, 804 bp, Enterobacter aerogenes
atgaaaagcatacttgcagcggcggctatgtcgcttgttatttctgattttgccaatgctgaggaaacaagaggtaaagctatgatgaaaatagaaccgtcagcgatttcggaagctgatattcgttctgtctcaccggctctggcgcgctttggtcgagaagctattactgaagatctgtggacacgagatgccctctcgcccagggaccgtagtatggtgaccgttgccatgctaattgccagaaaccagcctggcgaccttaagcattatatagacattgcccttgatactggcgttacgccagcggaggtgtcagaaatcattacccatctggctttctactcaggttggccaaatgcaatgtcagccgtcagcgtgaccaaagcggtttttgaatctcgtggcgtcacggcagatgcacttcctgaagcttctccggatctgctccccatcaatcaggaagcagaaaagcagcgttcagaaacagtggaaaaaaatgttggcccaatatctccaggcctggttaaattcactgctgacccactgttcctggatctctggcaaagacccgcgctgaaaccccgcgacagaagcctgattacggtcagcgcattaatcgcatcaggacaaagtgcacagattggctatcacctcaacagagcgatggataatggactttcggccgaagaggctggtgaggtcgttacccaggccgcattctacgctgggtggccaaatgcatttaccgctgccccggttgtgggtgaggtagtacgtaatcggtcgtccagtaaaggataa

SEQ ID NO: 101589 - DNA, 726 bp, Enterobacter aerogenes
gtgaaaaagagccttattcttttaatttgcatgctaataagcagccctgtctttgcaacaaaaccggacgcgccgaataagccagtgatgaatatcttcgagctcggcgtcaggcccgatcgggacaacgactttgcagacgtggccaggcagacgatttccgcttcggttgatcatgaagcaggtacgctggcgatgtatgccctgcaacgcaacgacaatccaggtcaggcattcatggtcgaactctatgaaaatgagagtgcttatcgcaaacatctcaatgctgccccatacatagcattcgctgctcgtgcacctgacattattgacaggaaaaagaaaatcaccctggagccacagtttctgggcgacaaacacatcataccgaatgagcgaaccatcaataatctggtgatcgtcgaggtaaagcctgaatttcagagcgaatttaaaaacatcgtccttcctgaaatggccgagtcgctcaaagtagagaaaggcgtgttagccatgtatgccggtacagattcagagactccaaaccgctggtatttctatgagatttacgccagtgaggaggattatcaactgcaccgacaaacgccgcacttcctggattacctcaggcaaacggcgcatatgagcgccaggaaggacgctatcccggtaaaaccggtatttcttcgtaacaaaggcggaatcaaacaggatccgcaacgttga

SEQ ID NO: 101590 - DNA, 288 bp, Enterobacter aerogenes; identical to SEQ ID NO: 96106

SEQ ID NO: 101591 - DNA, 483 bp, Enterobacter aerogenes
atgcgccaggctatctgttcatatgcggccagaggtgcagagaaacttcgtggagagcatcaatactgtcgttacatttccacctttgtgaagacatctccctttgcactgaatgaaaaatactatggcaacagtgggtccattaagttactgacgcccacgcaggatagccgggatatcatcaatgccgcggtaaagtgcctggatgcgatatgggtcgaagggcacaggtatcagaaagcggggatcatgctcggtgatttctatagccagggcgtcgcgcagttgaacatgttcgacgacaatgcgccacggcagaacagcgagaaactgatggaagttctcgaccacctcaacgcaaaggacgggagggggactctgtattttgctgggcaggggatccaggccacctggcagatgaagagagaaatgctttcgcctcgctatacaacccgcttcgctgatttgccggtagtcaggtga

SEQ ID NO: 101592 - DNA, 480 bp, Enterobacter aerogenes
atggagcgctacaaaggcaacgtcgatacgttgaaaattgtcgataacgaaattcgctacaaagccgatagctttgtgtttaatgtcgccggcgcgccggaagaggtcaaacagttcagcggcatctcgcggcctgagctgtggggacgctggtcaaacgcccaactcggtgacgaggtgaagattgaatataaagaaccgctgccggaaaaattcgatctggtgatcaccgccaaagccttcggcccgaacgccaaccagccgataccggtgcgcgtagggaaaagcgagcaagtacttactttagccaatgaagtgaccacgacgacgctgcatttcgacaacccggcgcgcagcaacaccttaactatcactccgccggaaccgcagtccaccaacgaaggcaatattgtcggccacgcgccgcgccagttgggcattggcatggtggatattaaaatcgtcagtcgcgaaggttaa

SEQ ID NO: 101593 - DNA, 600 bp, Enterobacter aerogenes
atggacaaggttaaactggtggcgattttacgcggtattcagcctggtgaggcggcggagcatatcgccgcgcttatcgatgcgggttttcgctatattgaaattccgcttaactcgccggactggcagcaaagtattccggcgatggtgcgccagtttggcgagcggtcggtgattggcgcggggacggtgctgaaggttgagcaggttgattttctggctgaagccggggcgaaacttatcgtgacgcctaatacggccccggcggtgatccgccgcgcggtagataaggggatgttggtgtgcgccggctgcgcgacggcctccgaggcgtttagcgcgctggatgccggggcgcaatggctgaaaatctttccgtcatcggcattcggcccggactatatccgcgcgctgaaagcggtgttgccgccggaggttccggtgctggcggtcggcggggtgacgccggaaaacctgcacagctggcgtcaggctggctgcgcgggggcgggattaggcagcgatctctaccgcgccgggcagccgttggcgcgtacccgtcagcaggcgcaacgctttatcgccgcctgcggcgattaa

SEQ ID NO: 101594 - DNA, 300 bp, Enterobacter aerogenes
atgcagaacctgctgacggcgcatccggacgtgcaggcggtgtttgcgcaaaatgacgaaatggcgctgggcgcgctgcgtgcgctgcagactgcaggaaaatctgatgtgatggtggttggatttgacggcactccggatggcgaaaaagcagtaaatagtggcaaactggcagcgactatcgcccagttgccggagcagatcggcgttaaaggcgtcgaaaccgctgataaagtgctgaagggcgaaaaagtggatgccagctatccggttgagctgaaactggtcattaagcagtaa

SEQ ID NO: 101595 - DNA, 273 bp, Enterobacter aerogenes
atgcttggttctggttctgaaaaaataccgcatatacaaacagtggtagtggcggaaatggagcgagagttgatcgtagtgcgcactcgggcaggattagtcactgcaagagagcaagagagcaagagagcaagagagcaagagagcaagagagcaagagagcaagagagcaagagagcaagagagcaagagagcaagggagcaagggagcaagggagcaagggagcaagggagcaagggagagtcggggggggggagggtaatgacgtctga

SEQ ID NO: 101596 - DNA, 231 bp, Enterobacter aerogenes
atgcattccttgcaagacgtacacaacaagttagccgatcttgtatcagaggcgcacaaagtagcgtgtaccctcgatattggtgacgagcgcactgaagctttcgagctatacgaggcacttcgccgacttcagcgccaaggtgcagcagctgagcttctttccgcgaccaaccatcttctggcctctccttattacgacgaggactgggaagaagatgaagatgactaa

SEQ ID NO: 101597 - DNA, 225 bp, Enterobacter aerogenes
atgagcaagtacgcaaagttagatcagttgattctaaacaaaatcggcggaagccctactccattccacaagatttttgtaagggatgttgaagaagagtctaagagaattgctgaagaagacgggagtgggtacccgttcagatttgttgatcgccggctgcaatatatgcgtaaacggtcattgatccgacatgttaatggcaagggatgggtaagagcatga

SEQ ID NO: 101598 - DNA, 711 bp, Enterobacter aerogenes
atgattcgccgacacttcgatacatcaacccgatttcttcttgataccgcctttcatcgaatggagataatccgtgatgatgggctctaccgccacctgcgtctgaagcagcccggcacgtcctgttattacttcgacattatcacctggcctggttacttaaccgtaaccggcgacatgggaacctggaccttcagtcgcatagcggacatgttcgacttttttggtgcctgggaaggtgtaattaatacccactattggtcagaaaagctggaagctggcgcgggctgttccgcccgcgatttactagcaagagaatacgaccacgacgcgttttgcaaaagtctgaaagagtccctgagcgaatacctggtggacgatgaaggcgctgatccagaagaggatgaagactgggacgacgatgacgatacaccggatagccataaagcagtggtgcgtgaaatcgtccgtgacttatgtcgggctgggttcaacaacgaatgggaagcctatcaagctgtttatgatgctgattggccagcgggctggagcgcttgggatgtctgcgaaggcctgacctttaaaacgtataccaatcacttccggtggatcctctttgccatcacctgggcgatctccaaataccacaacaccaagctggtcgataaagctatggcgaaattcatggcggtaagggaggcgtcagcatga

SEQ ID NO: 101599 - DNA, 240 bp, Enterobacter aerogenes; identical to SEQ ID NO: 96139

SEQ ID NO: 101600 - DNA, 306 bp, Enterobacter aerogenes
atgcgaattttatgtctggatatccccgcacctggagcatcgctggaaaaatatgctccgcaccttaacgctgaagcgctgcacgcctggggattgtataaatccggcttcatccgcgacatctacttccgtcaggaccgacctggcgtcgctatatttcttgaatgcgactctgtcgatgaagcgctgaacgtaatggccgaattcccgctggcaaaagcaggcttattaagcttcgagtgtattccgcttggctcatttattaactgggaaaatctctttgccgctgaatttaaaaataaatag

SEQ ID NO: 101601 - DNA, 921 bp, Enterobacter aerogenes
atgaataacgccctttataatcagatacgcatctttcagagcattgcgcgggagggcaatatttcggcagccgcaaggaaactggaaattacgcctccctccgtcagcaatgcgctaaagctgctggaagagcatatcggccatccgctttttgtgcgtacgacccgccgtatagagctgacggaaaccggtcagctgttgctggaacagaccgctgcggcggtggaatcgctggaaaattcgcttgaaagcattcgcgaccagaaccaggagccctctggtatggtgcgaattacgctctcgcgttttgcctatctgttaattcttaagcctgcgatggcagaattctgtcagcaatatccgggtatacagttagaaatttcggtctacgacggtaccgtgaatatcatcgaagagcgttttgatctggggatccgttttggcgatattcttgagggaggggtggtggcccggccgttaatgaaaccgtttcgtgaagggttatatgcatcctcagcgtatctctcccggcatggaacgcctgaagtgccggcagatctcagtcatcaccagctgattggttaccgttttatcaccaacaaccgcatccttccgctgctcctgaacgatcgcggtgagcagttgaccgttgagatgccggggcagttaatcagcaacgatattgacgttatggcagacgggatccgtaacgggctgggaatagggcgcttgtttgaacctgtctggcaactacagcccgacagggagcaatttatacccgtgatggagagctactggaaaacctacccgccagtgtatctctattaccccaaaaacgcgggtaaaacaaaaagagtgaaggccctgattgattttctgataatcacttcaatggacgactcacaggcttaccctgactga

SEQ ID NO: 101602 - DNA, 1044 bp, Enterobacter aerogenes
atgacaattttttatgtttttttagccaggaagtctacgctcaaaaaaattgttgtttgtgtctttcttcccgcatttataattgttttatatttaataaccgcacttggtaaccctttgattcttgtattctaccaggtaaaaagtgatctgataccattcttttttgtcgttggactgattgctgttattgatgattcaaaagatgcatttttggtttactacaagttagtcaaaacgcttattattgttggtgttataaattttgcattgatcattattcaaaagatatttactgaatggtttatgctatttttacaaattgatgattttaataactcctcacgcggcagtggattgcggcttgataatgtcaatgagtcattacgtgcaatggggtcattcacgactttcattgcatctggcacattaatggttatctgtttcattctggttaatgaggtcaaactgtacaaaagatggttgcgtctcagtttatctgtaatgtttctagctggtgctatagcaacaacatataagactgcaataattgggattgcgttatatcttctcataaagttaattatttatttttttcaaggtaatagagggataaaaaacaccacaataataatctatacaatatgcgtgttctttagcacctgctttgcatttaataattattttttatataaccagttaaaaaacacatctgttcatgacttggcatacagctcaatatatatacgtgtaaaacaacatagtgatatatattgggatgtggaaaaatcaaacttgattactggcgttggcatcggtgttaacggtactgagggaccagatggcttcaaatcaagtagtaaagcacttgatagtacctatgtgaatatattgagcaactatgggttactaggcgttattgtatatttaagtatcctgtttacaattatgctaacgattaccgcacgggaacagtcctgtctcttatacacatctccgagcccacgagaccagagaggatatcgtatgccgtcttctgcttga

SEQ ID NO: 101603 - DNA, 753 bp, Enterobacter aerogenes
atgactgatgtacatacaaaaaaaactatacttgcagttgcgtggagtgctggagagcgcttttctgttcaggggtttcagttcataataagcatcatattagcaagactcattactcctgacgaatatggattgatgggcattgttttagtttttattgttttttcggatcttttgattaatagtggtttctcgcaggcgttgatacaaaagaaaacgagaactgaaatcgattatacttcagtattctattttaatattattattggtatattgttatatatatttatttatgtatcgtcaccttacatttctagtttttataagcaagaggcacttactcaagtacttcgcgttgtatcgctagtaatgctgattaaacctttatatttagttcagatgacgatactttctatccgactggattttaaactaaggacaaaaattaactttgttagtgcgttaattagtggcatcttagctgcaattcttgcgttcagaggatttggtatttatgcgttagtatggcaacaattgttaaataatctttttatcgctattctctcattcactttaattagatggtttccaaggtttgcattttcattcttatctattaaacaattatttcattttggctacaagttattgctttctggagttactttcttaaattcagcatcgaagccaacacttataggttcaaatccattatcaagaaccagttttttaacaccttcattaattgcatga

SEQ ID NO: 101604 - DNA, 777 bp, Enterobacter aerogenes
atgcaggcagataaatcagagcagcgcgccgtcacccggttgtgcatccagtgtgccctttacttactccagcacggtgcggaaagcgcgctggttgaggagctttctacccgcctcgggcgggcgttaggtatggatagcgttgaaagcgctatctcctctaatgcgatcgtgctcaccacgattaaagacggcgaatgtctcacctccacgcgtaaaaacagcgatcgcggaattaacatgcatgtggtgacggaggtacagcatattgtgatcatggccgaacataagctgttggattacaaagacgtcgagaagcgcttctcgcagatcaaacccttacgctacccgcgctggctactggtattaatggtcggcctctcctgcgcctgcttttgtaaattgaacaacggcggttgggatggcgcggtggttaccttcttcgccagtaccgtcgccatgtatattcgccagttgctaacccaccgttccatgcatccgcagattaatttctgcattactgcctttgtcgccaccaccatttccgggctgatgctgcgtctgccggcatttagcgagacgccgactatcgccatggccgccagcgtgctgttgctggttcccggctttccgttaattaacgccgtggccgatatgttcaagggccatatcaataccgggctggctcgctgggcgatcgccagcctgctgacgctggcgacctgtatcggggtggtaatggcaatgaccatgtgggggctacgcggatgggcataa

SEQ ID NO: 101605 - DNA, 723 bp, Enterobacter aerogenes
atgttgccaggacaaggtaaatttggcgtcatcatcagtagaataccagttatgcaatctggcctgaaggctattttgagggagcatctccctgattacgatctgagtttctgtggctcgcaggatgaactcacgttactgcagcttcgccgcgccgtactggtcgtcgttgacctctccggacacattgaacgcccgcgagatatttgtgaacattattattcgttaatgaatcaataccgggatattcactggatttttatggttggccactcctgcttccctttggcagtcgagtttctcatgcggccggagagttcgctgatttctgatagcgagccggtaagacgtttcattgaagtcatccgcgccggcaaactttccgctgagagaattagccagacacttttttcacccgagatggataacttaggtgatgacgctggcgagacggtcatcttaactttttcagaacgcaaagttttgcggcttctggcaaaagggtggggaattaatcagattgccgctttgttgaaaaaaagcaataaaacgataagcgcgcagaaaaatagcgccatgcgccgactttcgttacgcagtaatgcagaaatgtatgcctggatcaatagcgctcaaggaatgaaggaactgaatctgtattcagcctatggagataacacggaatggaaaaaaatctcacaacacgatgtgtcgctatcgtag

SEQ ID NO: 101606 - DNA, 294 bp, Enterobacter aerogenes
gtgaagaaaccagcaaaagttgctaacgccgaaccgcaggccactcgcgcacagcgaatctggcaacagctaaacgcatggcttatttttccggcgctaggggtttacgcgctctatttagcaaccgactatctgccattactgaaattacgcggttggccggacttcgcctccgtttccttactgaaggccaattttaccggctccgcgctgctcttttttcattcgcctggcggatgggcagagtgctgcgtggtaaaaccgtcgatggaagttatgaaaatcgcctgctga

SEQ ID NO: 101607 - DNA, 354 bp, Enterobacter aerogenes
atgaaaaaggcaaccgagttagaacctcgtaacctttcggcagcagtacgaactcgtttagatgagatcgagggctggctggataaaggtgtatcgaggcaagagattgctcaactgcttgatgctgaatatagcttttccgtaacaccgaaagcgctggaaatggcattgtaccgggccaggttaaagcgtaaaaaaggtggattgcacaatccagaatcagaaaagttagttgaggatatgggcgggaacaaagaatttctgtccgataccgattttaaaaaaatcggggatgaggcaaaaaaagttgcgtcctcattcaaaggtagcgtaggtaataaaaaaggtttctaa

SEQ ID NO: 101608 - DNA, 2910 bp, Enterobacter aerogenes
atgctgaacattacgacgattacccgccagcgtgtcgataaggttgttgattactatgctgatggcgcagacgattactatgcgaaagacggtaacgcgatgcagtggcaaggcgctggcgcggaagaactgggcttaaccggcgaggtagaacaaaaacggtttgcgaaattgcttgatggcaaagtaacggatgacatttccgtgatgcgtaaaacggccaacagcgaaagcaaagaacgattgggatacgatcttacgttttccgcgccgaaaggcgttacgcttcaggcactggtcaacggtgataaacgtatcattgaagcgcacgatcgggcggtcactaaagccatcgaggaagcggaacggctggcactaggccgctttaccgtcaataaaaaaacgcacgttgaaaacacgaataagctgattgtcggcaaatttcgacacgaaacgtcacgcgagctagacccggatttgcacacccatgcctttgtaatgaacctcaccaaaaccagcgatggtaaatggcgttcgctcacgaatgacggcattgtgaactcgcttacgttattgggtaacgtttacaaatccgagctggcaagagagctggagctggccggttacaacctgcgttatgatcggaatggtacgtttgatttggcgcatttcagccaggagcagatagcccaattcagccagcgcagccagcagattgaggccgagttagcaaagaatggtttaagccgtgaaacggccagccatgagcaaaaaaatgcggccgcgctgaaaactcgtaaaagcaaaggcgaagtagatcgcgatgtactctatgagggctggaaaaaccgcgccaaagagcttcagattgattttgatagccgggagtggaaaggtgcggccaacgacgatatagcgcggaatacgcagccagcggcgctggaaaagcctatcgagtaccaggctgacaaggtaatgacctttgccattcgttcacttaccgaacgtcaatcggtgattaccgagcgggagctgatggacgtggcgatgaagcatggctatggccgcttaaccctcgatgatattcgggctgcgagagaacgggccataacctccggcaacctcatcaaagaagaagcaacatacgcagcggccacgaccaataaaaaacagcagaacgtagcaatgacccgcgaacaatgggtaacggaactggtgaaagctggccgcaataaagatgaggcccgtaaactcgtagataagggcatcacaaacgggcggctggtacagcaaaagccgcgttttaccacacagttagctcaacaacgcgaacgcaacatactgaagatggagcgggaagggcgcggaaagatccagaccccatacactcgcgagtttagcgagggctggttagccagcagaacgttaaaacccgaacagttaaaagcggttatgggaattattcatacccccaaccagtttatttctgtacatgggtttgccggtactggcaaaagttatatgaccaaatcggcagcggattttctaaaagagcagggcgtacacgtcaccagtcttgccccctacggtagccaggttaaagcgcttcaggctgaagggctggaatctcgcacactccagtctttcctccgggcctcagataaaaaaattggccccggctcagtagtttttattgacgaagcaggggtaatcccggcccgccagatggaggaaaccatgcgcgtgatccgcgatgcgggcgcacgagcggtattcctgggcgataccaaacagactaaagccgtcgaagcgggtaaacctttcgagcagcttattaaagccggtatggaaacggcctatatgaaagatattcagcgccagaaagacccggaattgctgaaagctgcgctaaatgcagcagaagggaaaataaaggcgtcgttgacccacgtaaccagcatcgtagaagaaaaaaatcatgatcagcgctaccgccgcattgtcggggattacgtggcaatgccgccgacagaccgggctaacgccctgatcatcaccggcacgaacgacagccggaaaaaaattaatgagtacattcaggccgagctggggctaaaaggccagggtatcaattacccgcttctgaaccgtcttgataccactcaggcccagcggcagcacagcaaatattacgaaaaaggagccgtgattatcccggaacgggattacagcaacgggctgaaacgcggggccgtttataccgttctcgataccggccccggcaataaacttacggtaagcgacggcagcggcgacacaatcgcattttcaccggcgcgattttccaaattatccgtgtactcagttgaaaaaacggagctggccgtaggcgaccaggtaaggatcacccgtaacgatgcgcatctggatttagcgaacggcgaccgttttaaggtaaaaggcgtccagagtggtgaggtactgctggagaacgagaaagggcgactggtaaaaattgatgccaacaaacctatgtatttagggctggcttacgcttcgaccgtccatagcgctcaggggctaacctgcgacaaggtttttatcaatatggatacccgatcactcacaacggccaaagatgtttattacgtggctgtcacccgcgctaaacacgaagccgtcatttacacagacgatgagaagaagctggataaagcggccagccgtgaagggttcaaaaccgccgcgcttgagctggaacaactcaaacgctatgccaaagagcagcagcatgatgcccgcgaaaaaggccgagacaaaaccgagccgacgcaggaaaaagacaatgccaagcgtaaaggcaaaggtcatgacaaaaataacgacgagagagcatttacctcgctctaa

SEQ ID NO: 101609 - DNA, 543 bp, Enterobacter aerogenes
atgaaaaaagaggatagatcctttattagatgggtcagccttagttgtaagatttttactgctgccttagctattggggtggtgtgctacgctgcaatgggagtgttaggcttagttaataatccagttccatattatttttctgaatggattaactggatgcagcctacgttaaaactacctgttacttatcatgattcgagcttataccttgataacggaacttacagtataggtgattatattctctctattggttatcttttcgttattttcatggctcaatcgtatgcggctgcatattttcttgggagacttagttataccttaatcagcaaggtaataatatataaagcaactaaagaatttcaccaaagatattcaggtataaaagcggctcatttcgaaaggttattgagtgaaaatcttacagatacagatctagaagatgtaagtcgcaagcattgggagaagtggcgggaacattacaaaagtaatatgagttacaatgagtggaagcagaaattcaaaaaggttctttag

SEQ ID NO: 101610 - DNA, 321 bp, Enterobacter aerogenes
atgacgagagaaaacaagaagcgcctagccattctggttatgtacattgcacgaattgtcggccagagcctgcgtgatgtaccacttgtattacttatcgcgggttttctgtttctgctgtttgcgccgcccacggcgtggatggccataaatcaaatctggtatcacctgcgccctttaactgaccgtgaagcggtcatgttaggaaaaagtgtgtctggcttactccagcttgcctggctggttgctgccagttctcgcttcattctttctgttgatgaactctcttcccggatgaaagaggtaaaagatgaccgctaa

SEQ ID NO: 101611 - DNA, 453 bp, Enterobacter aerogenes; identical to SEQ ID NO: 86350

SEQ ID NO: 101612 - DNA, 567 bp, Enterobacter aerogenes; identical to SEQ ID NO: 86351

SEQ ID NO: 101613 - DNA, 846 bp, Enterobacter aerogenes; identical to SEQ ID NO: 86352

SEQ ID NO: 101614 - DNA, 1026 bp, Enterobacter aerogenes; identical to SEQ ID NO: 86353

SEQ ID NO: 101615 - DNA, 357 bp, Enterobacter aerogenes; identical to SEQ ID NO: 86355

SEQ ID NO: 101616 - DNA, 228 bp, Enterobacter aerogenes
atgaataaatttattgccatcgttgccctttcacttgtagcaattatttcaggatgcaaggaagaagcgaaaacaacgaaatggtatcgtgatcaccctgatgaattaaaagttgtttatgaaaaatgtcaaaaaagcggagacgcttctgaaaactgcaaaaacgcaaatgaagcccattatcaaatacagcaattaaacgcaccaacgctaaaattccatgattag

SEQ ID NO: 101617 - DNA, 420 bp, Enterobacter aerogenes; identical to SEQ ID NO: 92004

SEQ ID NO: 101618 - DNA, 318 bp, Enterobacter aerogenes
atgagcattgaacaagaaattattgattatatatatactcatcatagccataagaaatactgtttttttggcgaacgtccagaagtcacgttagatactgaattaacaaagggggggctgaatatcatctgggaagatgcagaagatactttagattactatttcaaacaatggaatgtaaaaatgaatggcttcgaaattatctattactttgaacctgagtttttaggttccatgcctccagagaagccgcttaaaccgctaacagtacaaatgttggttgagtccgcaaaagcaggtgaatggctgtacgattaa

SEQ ID NO: 101619 - DNA, 969 bp, Enterobacter aerogenes; identical to SEQ ID NO: 99311

SEQ ID NO: 101620 - DNA, 180 bp, Enterobacter aerogenes
gtgctcgtttctttctgcgggatgattcagtttggcatcgttcgcggtcgcgcgctaattacttccgatggtgaagcgatcgaaggtgacgccctggacgatgtggaggtgaagggcgttctgacgttcctgattaaccgcgcaactttcgttgatgaagacccgaaccccgttatttaa

SEQ ID NO: 101621 - DNA, 321 bp, Enterobacter aerogenes
atggtgctggggctgtggatggtgaacgtggtattctcgctgggccaccgcctgctcaacttccagtccgctcgggtgacttacttcgtcaacgcctcgctgtttatctacctggtgcatcatcccctcaccctgctgtacggggcgtggattacgccaataatcaaatcgaatctgttaggttttatcaccgggctggtgtttgtggtgggtattgcgctggtgctgtacgaaatccatctacgtattccgctgctgcgcttcctgttctcaggcaaaccgcagcaaaaaccggcgaaagcgccggtgtcggttaactaa

SEQ ID NO: 101622 - DNA, 279 bp, Enterobacter aerogenes
atgcgcattgcgctgcgcatcgctgagtcattacagtacggtattaatttctgcaaccttgaagtattgataaccacccatctcactggcgtatttatgcgaggagttgaggaccatcttgttggcgctgatggtgccgacatcacaggtattaaatttaaaccaaccgcaaccacgaccgctgttgactacctttttcgccgtcatcgtcagggtgccatccgcatcgatcagactgtagttatagatattgcctcttttttgcgtatccagaactaa

SEQ ID NO: 101623 - DNA, 720 bp, Enterobacter aerogenes
atggggtacatttacagggctggtggggttgctaatgattccagcgcgtatggtagcttggcgttaattcttggtgtcgcatcccttatagggcttcgccataccagcaaaagtaaaatactttacctcttgatactccttggcctgatatttaacatttatatatcactaacgcgaacgcttgtttttgcgctggcggtatatgtattctttgatttaattagaacaagaagccttagcgtattcaagatgttattcttcgcggctatcggtgctggggttatcatttacggtatcagtaacgattatatcatagccttgttggacaggatcaccggttctggacagattgatatcacgtctggacgacttgctacctgggttgccgttcctgatattcttggggaaaacccaatatttggtgttggttaccgtatggctacggacaagtacggcattgtgcctgataatgtgttcatttcatcaatactggaaacaggtgttgttggtttgtttttatacatggggatgcttatagcgctgtgctactgcgtgtacaaaaataattcagaaagcttacctcttatcctggcgtttatagcctcagggatgtttgttgatatctcgacgttctggattagtatccctgctttaatcttctttgtagctgtaaacagtcagcgcgatgatgatgaggatcgccatcgcgccatagaatag

SEQ ID NO: 101624 - DNA, 156 bp, Enterobacter aerogenes
atgaagccttacacagtaatactgtgtgataactttaggtttgctgattatcatgttttagctgaagacaactcagttgctgtcactagagagatatcagaacactgctgggacgattcagaagagagaaaagaggaacggtgctcagatcgctga

SEQ ID NO: 101625 - DNA, 294 bp, Enterobacter aerogenes
gtgttcttcaaccgccttggtgaaatccgtgaccgcagtttcgagcagcagcgctaccgggccagcggcctcaacctggtgacggcggccatcgtgctgtggaacacggtctacctggagcgtgcggcgcatgcgttgcgcggcaatggtcatgccgtcgatgactcgctattgcagtacctgtcgccactcggctgggagcacatcaacctgaccggtgattacctatggcgcagcagcgccaagatcggcgcggggaagttcaggccgctacggcctctgcaaccggcttag

SEQ ID NO: 101626 - DNA, 837 bp, Enterobacter aerogenes
  misc_feature (798)..(807): n is a, c, g, or t
atgtctgagagaataaatttctcagtacttattgatgagactaataaaaaatatgagcaagaacttctcaaggctggcattagcaatgaaagaatcattaaagtaaaaacatgtacagttggtgggcgggcgttaggaggagttaaattgttcacaacggtgttgcaagaggcaagtagattccatattgtccattgtaatactttctatgatggtctttttgcaatgcctgctgcaagattacgtgggaaaagaacaatattccgagccagatgcgggattgaactatcaaatcacggcataatcgataatgtcatttatcagttttcaacaaagattttagccaactcagactatgttaaaagtacttttagtagggtttctaaagatctaagcaaggttatttcgttatataatcctttggatatgaagtttaaacgagatattgctatctgcaatgctagccccaaaggtgatcttgacaggaattatgttattgctgtaatcggcgctattactgaagtcaaaaatcaaatggaagtgcttagagccttttctaaacttaaagatgcatcactaaaattgaaattcataggtgagccaagaagcactgaaaaagataagcaatactataacgaactattaaaatatgcggaagacaataatcttgcttctcaagtcatatttactggttttgtttcagatgtgagagagaagcttaatgatgtagatttagtctgcgttccgtcagatcgggaaccacttggtcgagttatttttgaaagccagttatatggnnnnnnnnnngttatatggtattcctgtattagcttctga

SEQ ID NO: 101627 - DNA, 720 bp, Enterobacter aerogenes; identical to SEQ ID NO: 95330

SEQ ID NO: 101628 - DNA, 141 bp, Enterobacter aerogenes; identical to SEQ ID NO: 36145

SEQ ID NO: 101629 - DNA, 564 bp, Enterobacter aerogenes; identical to SEQ ID NO: 62449

SEQ ID NO: 101630 - DNA, 348 bp, Enterobacter aerogenes; identical to SEQ ID NO: 6026

SEQ ID NO: 101631 - DNA, 2805 bp, Enterobacter aerogenes
atgccccgccgttcgatcctctccgccgccgagcgcgaaagcctgctggcgttgccggacaccaaggatgagttgatccgtcactacacgttcagcgaaagcgacctctccatcatccggcagcggcgcggcccggccaatcggctgggcttcgcggtgcagctctgctacctgcgctttcccggcgtcatccttggcgctgatgagccaccgttcccgccattgctgagactggtcgccaaccagctcaaggtcggcatcgaaagctgggacgagtacgggcagcgtgagcagacccgacgcgagcacctggtcgagctgcaaacggtgttcggcttccagccgttcacgattggccactaccggcaggctgtccagttgctgaccgagctggccatgcaaaccgacaagggcatcgtgctggccagagccttgatcgagcacctgcggcggcagtcggtcattgtgcccgccctcaacgccgtcgagcgggcgagcgccgaagcgattacccgcgccaaccggcgtctctacgacgccttggctgagccgctgacggacgtgcatcgccgtcgcctcgacgatctgctcaagcgccgcgacaacggcaagacgacgtggctggcctggctgcggcaatccccggtcaaaccgaactcgcggcacatgctggaacacatcgaacgcctcaaggcgtggcaggcgctcgacctgccctccggcatcgagcggctggttcaccagaaccggctgctcaagatcgcccgcgagggcggccagatgacgcccgccgacctggcgaagttcgagccgcagcggcgttacgcgaccctggtggcgctcgccatcgagggcatggccaccgtcaccgacgaaatcatcgacctgcatgaccgcatcctgggcaagctgttcaatgccgccaagaacaagcatcagcagcagttccaggcatccggcaaggcgatcaatgccaaggtgcggctgttcgggcgcatcggccaggcgctgatcgaggccaagcaagcgggccgcgatccgttcgccgccatcgaggccgtcatgtcctgggatgctttcgccgagagcgtcaccgaagcgcagcggctcgcgcaacccgaggacttcgatttcctgcaccgcatcggcgagagctacgccacgctgcgccgctacgcgccggaatttctcgacgtgctcaagttgcgggccgcgcccgccgccaaggacgtactcgacgccatcgaggtgctgcgcagcatgaacagcgacaacgcccgcaaggtgcccaccgacgcgccgaccgagttcatcaagccgcgctggcagaagctggtgatgaccgacaccggcatcgaccggcgctactacgaactgtgcgcgctgtcggagctgaagaacgcgctgcgctccggcgacatctgggtgcaaggctcgcgccagttcaaggacttcgaggactacctggtgccgcccgcgaaattcgccagcctcaagcaggccagcgaattgccgctggccgtggccaccgattgcgaccagtacctgcatgaccggctgacgctgctggaaacgcagctcgccaccgtcaaccgcatggcgctggccaacgagctgccggacgccatcatcacggagtcgggcctgaagatcacgccgctcgatgcggcggtgcccgataccgcacaggccctgatcgaccagacggcgatgatcctaccgcacgtcaagatcaccgaattgctgctggaggtagacgaatggacgggcttcacccggcacttcgcccacctgaagtcaggcgacctggccaaggacaaaaacctgttgctgaccacgatcctcgccgacgcgatcaacctgggcctgaccaagatggcggaatcgtgccccggcacgacctacgccaagctggcctggctgcaagcctggcacatccgcgacgaaacctacggggcggcactggccgagctggtcaacgcgcagttccgacatcccttcgccgagcattggggcgacggcaccacgtcatcgtcggacggccagaacttccgcaccggcagcaaggccgagagcaccggccacatcaatccgaaatacggcagcagcccagggcggacgttctacacccatatctccgaccagtacgcgccgttccacaccaaggtcgtgaacgtcggcgtgcgcgactcgacctacgtgctcgacggcctgctgtatcacgaatccgacctgcggatcgaggagcactacaccgacacggcagggttcacggaccacgtcttcgcgttgatgcacctgctgggcttccgcttcgccccgcgcattcgtgacctgggcgacaccaagctctacatcccgaagggcgatgccacctacgaggcgttgaaaccgatgatcggcggcacgctcaacatcaagcacgtccgcgcccattgggatgaaatcctgcggatggccacctcgatcaagcagggcacggcgacggcctcgctgatgctcaggaagcttggcagctacccgcgccagaacggcctggccgtcgccctgcgtgagctgggacgcatcgagcgcacactgttcatcctggactggctgcaaagcgtcgagctgcgccgccgcgtgcatgccgggctgaacaaaggcgaggcgcgcaacgcgctggcccgcgccgtgttcttcaaccgcctgggggaaatccgcgaccgcagcttcgagcagcagcgctaccgggccacggtcaagccgtcgatgacggcctgttgcagtacctgtcgccgctcggctgggagcacatcaacctga

SEQ ID NO: 101632 - DNA, 1038 bp, Enterobacter aerogenes
atgatgaccacacgttttacccgtcgtcgtttcttacagtttaccggtggcctggcgctggccggggcgtctgtgccgctatgggctcacgatatggcggagatggcgagcggcgatgaacatccggcgctgcgtctggcgcagccttataaaatcaagttggcgattaacaaaagcgcagtgtgcctggcgccggtcgccgtcgctgagcagcagaagatttttagtaaatataacctcgacgttgagtttgttaactttggtaactcgacggatgtcctgctggaagcgattgccaccggcaaggccgacgccggggtaggcatggcgctacgctggctgaaggcgctggagcagggctttgacgtcaaacttaccgccggaacgcacggcggttgcctgaatctgctgacggccaaaaactcgccttttggcgcgctggagagtctgaaagggcaaaccattggcgttaccgatatggccgggccggataaaaacttcttcgccatcttgctgaaacgctacggcatcgacccgataagcgatgtgcagtggaaagtctatccggcagacctgctcagcgtggcgttggataaacgcgaaatcgccgccattagcggcagcgagccctttagctatcgcctgctggaaaccgggaaatatcagctaatcgccagcaatatgaccggcgattatgccaatctcagctgctgcgtgctgggcgtcagcggtgcccttgcgcgcgatcataaaccggcggcggccgcgcttacccaggcgattctggaagcgcacagctatgccgccgcgcatccggaaagcgtggcgcaatcttttctcgcccatgcgctaaatactaacgaagcggaggtgagcggcattcttcacggccaggggcacggtcatcatgcggtgggcgaggcttttgttaaagagctgacgcagtatgccgtggatctgcagcgggtacaggtcatcaaaccgggaaccgatcctcatcagtttgcggagagtatttatgtcaacgttttcgcctga

SEQ ID NO: 101633 - DNA, 558 bp, Enterobacter aerogenes; identical to SEQ ID NO: 7707

SEQ ID NO: 101634 - DNA, 867 bp, Enterobacter aerogenes
atgatgcctggcgatgcgtttggtctgcctgataccgcggcattgaataaagcagcagatcagaaaacatctgtcagtatgccggttcgtggccgtctggttatgaatgatagcggcattctggatgttcagctggtcaaaaccaatactgccggtgccgtgaaggtcgctcgtgctgtactggataaggaaaccggctactggggctatactcttcccgctgtcgcagatgttccggcgcaaactatttttgtcagcccggctgacgcacctggtgcaaacggaccactgacgctaagcgggccggtaccactaccggagcgtattctgcataccggtgatcagatttcggcgccacaggctacagataaaaccgtgacgccggtagcggatgacctcgattttgacgatattattctggtgtttcctccggaatccggcctaaaaccgctgtatgtgatgtaccgtagccctcgtaacatgcccggtacagtgagcggcaaagggcagaacgttggcaataactggatggggggggccagtaccggggatggtgctcctgttccttcccagattgcggataaattacgcgggaagactttcggtagttttgattctttccgtcgggcgttctggaaagcggttgctgacgattctgcactgagcaagcaatttagtgaagctgatattaatcagatgaaagctggaagggcacctactgcggactttttagaatcagtagggaaacgtgttaaaattgaattacaccacgaaaaagaaatatctcaaggaggggctgttatggatgtcgataacattaaggcgctaacacctaaaaatcatattgagacacataaaggaaaataa

SEQ ID NO: 101635 - DNA, 546 bp, Enterobacter aerogenes
atgccattacctgagcgaatgaaacccgcacgggtcacccgtaaacagatgaaagaactgatcagtcagctgaatggcattctcgatcacatcgataacgggatggacgaaaacaatgaagaactaaaacagatgatggcagactggaatgcaaaggtcgtcatgccctgcgggttctctgattttcgtgatttttcatcctggacaagtgcactagatttcaccaggatggcgcttaatcaggaaaaatacctcgatgactttacatggacagaactgaacgacgttatcaacttcatacgcaaagcagaaggtagtgaatctgaccacagctatgcactccagttactggagattaatttcaaggcaaacccactggatctcatctatcaccctgactgctggttcaatgatgaagcattgtttcatgcccggctgactaccgaagaaattggtggctacttaatgaaaaaatcaggtcgatggctcaacgatgcaccggatatccaactggtgtatgccatcccccaggatatttatgattaa

SEQ ID NO: 101636 - DNA, 330 bp, Enterobacter aerogenes
  misc_feature (303)..(312): n is a, c, g, or t
ttgagtcatttacccgccagcattttccagatttcacgtagcgacgcctggaatttaaccctctctcccgatgcagcccgtaatatgcgggatcttgcagcacagattggcgcaggaatgccgaaatatctgatagcaccggaagtctcactgcttctctcctacatcgatgatctgaacatccgtatgtattttgagacgctctggaataccggagcacgactgaacgaagctctggcactgaaacctgccgattttatgctgactccgacgcggcagtacccgcaacccgtggtgatcctnnnnnnnnnncactcaagcaacgtctaa

SEQ ID NO: 101637 - DNA, 309 bp, Enterobacter aerogenes
  misc_feature (195)..(204): n is a, c, g, or t
ttggctactgacgctcaggtaaaagaaattaatgcactcatcaaaaaatacccggactcatgctccatctgtcatgaagtctatgatgaggatgatgtgacctacaccgtttttgggtatgaccggaaaggtaaaatacaggtcaccacgggatgctgtgccggaatgctgacagagccggttctgctgggtgtnnnnnnnnnncagagtgattccgtatctgttgagtctgaagcccgccttgtgcgggctttttcatatctgcgtgaaatgagacgttatggtaaatgcgcacaaggtgctgtgtga

SEQ ID NO: 101638 - DNA, 300 bp, Enterobacter aerogenes
atgaaatgctcatctgtttttacttcaaccactaatcatgttttcacattcgaacgagtaacgctttgcactattatccttatgcataaggatactggacaacagtatgttgtcatatttactgataacaataaaattcgtgactataaagccggaattgttcctcagtttggcgaacttaagcagagtgatattgatttagtccttttctacagggacgaatatgaaaaatattttgattcattaaaagatggcgatgaatgcttgagttttaaagattttattgagtgtctttgttaa

SEQ ID NO: 101639 - DNA, 591 bp, Enterobacter aerogenes
atgggcgagctcggctatgtcatgtggccatgccgcgatgagtccgacgccgaccaggggacgtcgtatctgtttaaagagaagttctctacgccgagcggtaaagcccagttcttcacctgcgactgggtcgcgccgggagataaactctctgcacagtatccgttggtgctgtcgacggtgcgcgaagtcggccattactcgtgccgttcgatgaccggcaactgcgcggccttaaccaggcttgccgatgaaccaggctatgcgcaaatcaacaccgccgacgccgaacggttaggtatcgaggatgacgcgctggtgtgggtcaattcgcgtaagggccgcatcatcacccgcgcgcaggtcagcgatcggccgaataaaggcgcggtgtacatgacctaccagtggtggatcggcgcctgtaacgagctggtgtcagagaacctgagcccgataaccaaaacgccggagtacaagtactgcgcggttaacgttgaacggattgccgatcagcgcgcggcggagcagtacgtgatcgaggagtacaacaagctgaaagcccgcctgcgcgaaagcgcgatgggttaa

SEQ ID NO: 101640 - DNA, 141 bp, Enterobacter aerogenes
atgctcaacagctggctaaacatggttttatcacgctggcttatgacgcatctcattatggcgaaagtggtggtgttccacgtgacctggaaaatccagccgatcgtgttcaggatatccgtagtgccgttggctatctga

SEQ ID NO: 101641 - DNA, 216 bp, Enterobacter aerogenes
atgagcgcagaaagctcaggagtgtttactttgaaagagatcaaccggatcaagattatacaggacgtcattgaacgtcgcatcacaacgcgccgtgcggccgagcacctcggtatcagcgacaggcaatgccgcagacttcttgcccgttaccgtgaaggcggaccgcttggtatggccagcagacgatgtggcatgcgtggtaacggggtttga

SEQ ID NO: 101642 - DNA, 237 bp, Enterobacter aerogenes
atgctcagtatggttcaggatgtagcggcggcggcggcggataatgcacctggtaaagatcgtaatgtggattataccgaaaactcacgacaggcaatggctgaaatggctaaagtcgcacttgagaattcgataaatattcctccaacaatgtataaaaaccagggtgacataatcactattatggtcggggaagacattgatttttctgatatctatgagttaaaggtaaaatag

SEQ ID NO: 101643 - DNA, 213 bp, Enterobacter aerogenes
atgcagaccgtcatgcataacggcgtgtcctccccaggcaagtgtagccagcgccacgcccccactcatcgtcatcagcaggcaggacaatactctcttattagtgtaaaggaacaaagcaccgagtgtggtaaacagggcacagagtctgacaatccagctaatacccacatcagtttcttctatcaccatctcgataacatggatggataa

SEQ ID NO: 101644 - DNA, 171 bp, Enterobacter aerogenes
atgtttgcctctcctgccataaacaaacagagccatttcttccaattgactggaactcaaacgattacgattggctaccttatgaagatgaatactaatgctgaatacttcacagtcataatacagattgttctttattcaaaagacaaccatctattgaaagtgcattag

SEQ ID NO: 101645 - DNA, 300 bp, Enterobacter aerogenes
atgcttagcgaaaagatcagagaactgaggacatctcgcgggctgtccttggagcaattagcagcacaagtaggctcaacaaaaagctatatttgggagctggagaaaaagccagatataaaaccgtcagcagatcttgtatccaagatcgcccaagcattagatgttacaatcgattcactaatggatgctcgaaaaacaaacgatagggatactgtattctttagagaatacaaagagctagatgatgaaacaaaagaacaacttatgagcatacttaaagcaataaaaccaaggtaa

SEQ ID NO: 101646 - DNA, 123 bp, Enterobacter aerogenes
atgttatccgaaatctccctgaactgctcctcccagccgtcctgcagctccttgattgccgcgatctggaaagcaacactgaaaggcgttctgcccagtttctcggaaagccagaaaagatga

SEQ ID NO: 101647 - DNA, 198 bp, Enterobacter aerogenes
gtgctgtgggccctcatggtgttgctgatgaatatgcatgacgtgagtgaatcagtggccgggctggcgattgcgctgctgacgctgatggtgtgctcatctgccggagaacgtgtgaaacgcttctggccgcggcagttcttcgcgatgttctatgcggtgcacctggcggtactcggtattgtcgtctcgatgtaa

SEQ ID NO: 101648 - DNA, 180 bp, Enterobacter aerogenes
atgtttttaggtgcttttattgttttggcgggaatcctttctcttttggagagccttggcattgttgctgccgaggttaagtggggaatgccgttagcagttatttgctttggcttgcatttggtttatgaagccattagagctaggaaagaaagaatgagtgagaaaggatcttcttga

SEQ ID NO: 101649 - DNA, 774 bp, Enterobacter aerogenes
atggcaaaaccggactgggaggccatcgaatcggcataccgggccggagtccttagtctccgtgatataggcgataaatacggcgttactgaaggggctatcaggaagagggctaaaaagtttgactgggtacgcaatagcggtacgcaggtacgcaaaaatggtacgcaaagtggtacgcaaaagagcaaggtgcgtaccagcgaaaagcctgccagtgctggccgtacgcaaaaaagtacgcaaccaaaagctgaacctccaccagaaacgaaaccgatacgcggagtgcgtaccaatcctccaaccaatccatttcagaccggtaatcagcacgccctgaagcatggcggctacggtcgtcgaatgttgctttctgatgctactactgaagatgctcagatgcttacactcgacgatgagcttttctggctgcgtgcggcaaatctgaccgctgcagagaatattggccgctggaaagcagagcttgagaccgcgaatgccaaggcggctaaagacattcacaacttgatttcgtcagctcagacagccatgcatcgcaatactgcgcgcattgaatctctggagtacaccaaggtatcaatcattaagcagcgcgctgacgttacttatagagaggccgctactgataaggtgtcgctggaggccgatcgtcttcgccgtgatgctggtatagatgatggcaacggagagcgtgacctcaatgacttctactctgacatccaaaccgacgctgaatccggtcctgcgtag

SEQ ID NO: 101650 - DNA, 702 bp, Enterobacter aerogenes
atgaaacttattaagtattggcgtgttcaacttttcaaagctgaaaatcgtggaatggctccgggtaatgccgaggtgcttatttttgagggttattccaaagataagcccaaaatcaagctcggcgccggggtcagcttcgagctgtttatagcgcctgactcactggaatcccatatcttccgtgatcacctcattgacagcgtgcgcttcatccctgtgtatgaagatgatggcgacaatgtagatgacggaactcaggaagagcagactaagccgccctcacgtgaagcgatgattgcttgtatcatgcaggctattgggggaggctatcagcctaaatccttcgataagctacttagccaccttgatatgatttggctcttgcacgacaaggtgctcgattatgaatatcacgcgtgctggaaatggtgccaaaaccaccacgttaccgacgtgaataagactcgcagttctgctaaggcatcttctttgatggggagggctggatatgtagtcaaccatggcaatctctcagttccattaaaagcaaaaatgccaacacctggcgagattttttccatcgtaaaacaggttgaagatgagatggttggaaaaccactcacagcagaaacggctttttcttttgcggaagaggttaaaaagcgcgtggctgacctgatcgttattgaagttgcctaa

SEQ ID NO: 101651 - DNA, 324 bp, Enterobacter aerogenes
atgcaaaagagcagatcgcactggacgcatcgggagcctcggctgatatccgggttgctgttgcgaatgatgattgcactaatcgccctgtgccttctggcgcagttaagcggctgcaacaattcgcgaacggtctacgtcaaggttccggtggtcccgttaccggccagcctgacggctgacaccccgcaaccggaaatccctgacaacttgacgtggggccagagcctggatttaaacgtcagtctgctatcagcgctggggcagtgcaaccgtgataaggctgacatcaggcaagcagagaaaaaacgagcctcgcaatag

SEQ ID NO: 101652 - DNA, 525 bp, Enterobacter aerogenes
atggcgcaactgactaaaagagctggtgccaccggcgcggtttgttctgtggcagcgattatcgcaatagtgctgaatgccggtcacgtgcgtaccaacgagcggggccttgaactgattggcaatgctgaaggttgtcggcgtgatccgtatgtctgcccggcagctgtgctcaccgatggcatcgggaacacgcacggagttaagcccggtgtgcgcaaaactgacaagcagatcgccgctgactgggaaagaaacatccttgaggccgagcgttgcgtaaatacctatggcaatggccgacggttgagcgacaacacattttcagcagtaacgtcgataacctttaatgcgggctgcgccaatatgcagaaatcgacattgtttgcgctactcgtgaaaggtcaggttacgcaggcatgtaaccagttccctcgctgggtgtacggtggtgggaaagttcttcccggccttgttactcgtcgcgccgcagagaaacagctctgtctggacggtgtgaaatga

SEQ ID NO: 101653 - DNA, 321 bp, Enterobacter aerogenes
atgaaaatgaacaaccaaaacgagaatatcgttacccatttctttgcgtggctggctgctgttgcctcaatgctggggatcactacacaggacatggtttatatcctctttggttttatcggcgtggtgatttctctcgcgtcgtttgtgctggggagaatggatgcacggaaagagcgtaacgaagacagtaagcgaacgcagttgctggctgattatctccatggcgtgcagcagaaaccggttcgtgaacgcccatcgtctgctgaagtgatcaccgaatcaatgaacaggataaacaacgatggcgcaactgactaa

SEQ ID NO: 101654 - DNA, 579 bp, Enterobacter aerogenes
atgatcaacccttctgaagttggtaagtcaggtgaaatgattcgcctccgtacgctggaaagcatctggatacagggaaagctgcgcatgtggggccgctggtcatacattggaggcggtagcggcggcaacatgtttaaccagctattggcatccgggaagataacgaaaactgccatcaatgacgtactgcgccgtatgaagaaatcgggcattaccaaacctgagctggaagccttcttcagggaaatcctcagcggtaaaaataaaagcggcctggcgttttgtactgacgaggagggattgaaaattgattcagtgcttagcaccgagcttgtgcgctccgggaataaagctctctataagctaatcaaggatcggtatgtttatcgcatgagcaagaaggccatggcaaaagagctaaacgaaaagcatccagaatggtgcttgaggacttgcgagagcagggttgacgtttggctaaatttagcagaatcgatgctttacgcaccaatgtgtgacgcgtttggcacaaatagcgacagattttacttgaatagttgcgcggaaagtgcttga

SEQ ID NO: 101655 - DNA, 660 bp, Enterobacter aerogenes
atgacgaatctttactgtgaagcccttacggcgctgcgttcagcaccccatcactatttaaaagaagtcggcgaccagtggcggactccggatctgcttttctggggcattaatgcgatgtatggcccgttgatgctggacctgttcgcagacgacagcaacgctaaatgtcctgtctggtacacggcagaagataacgcgctgacacaggactggtcggaaatgctttcctcaatcggcggcgcagcctacggaaacccgccttacagccgctctcagtaccacgaaaagcaagccatcactggcatgacgcacatcatgaactatgcagctgctcaacgagagaagggcggtcgctatgtcttcctggtgaagtcagcaacaagcgaaacgtggtggccggaagatgcggatcacgtctgctttattcgtgggcgaattggtttcgatctgcccgagtggtttaagccagccgacgacaaacaaaggccgaccagtgcgtttttcgctggcgccattgtcgtgtttgataagtcatgggctggcgagcggtttagttacatcaatcgagcggtgcttgaagataagggccgcgcatttatgtcactggcgcagtttgctgctggccagagcaatacccaaaatgaggtgaatgtatga

SEQ ID NO: 101656 - DNA, 306 bp, Enterobacter aerogenes
atgagcaaatctaaaaccaaggctgaaaagctccatctgagccgcgtagctgcattgggctgcatcgtatgccggaacctcaattacggcgaatcgcctgctgaaatccatcactgcagctctggtactggcttgtctgtccgcgctgataacttccatgtcattccgctatgccatgcccatcaccgtactggtggctacggcgttgctattcatgctggccgtaagtcatgggaagaaaagttcggcactgaggctgagttactgagtcaggtactccaggagttgggggaggcctgcgcatga

SEQ ID NO: 101657 - DNA, 141 bp, Enterobacter aerogenes
atgtcgcaaaaatcgcttacggccatcacgttctgcgtgacggtaatcctcatcatctggatgctacacggttcgctgtgtgaaatacggatgagcttctggggagcggagtttgcggcgttcttacagtgtaagcagtaa

SEQ ID NO: 101658 - DNA, 261 bp, Enterobacter aerogenes
atgttccgttgtccgctttgtggcgcatctgcccgaatccgcaccagtcgtccggaaaacgattcaaacactgtgcggcaaaagtattaccagtgtaacaacctggaatgcggcgtatgcttctcaacactggaagctttccataaattcacatcaaaacacgcctccggcgttcactcttcgggaggtatcccgtggcatgagctgccagcttcacacaggggaaacaatcagatgagtttgcctttacctcagaattaa

SEQ ID NO: 101659 - DNA, 1125 bp, Enterobacter aerogenes
gtgaaattaggaagaaatgataagtgctggtgtaattcaggacttaagtataaaaagtgccatcttggtcgagaccgtgaaactccggtatccaaagccgaggcactgaaattttcaaagtctctctcgcagagaaaggcatgttatgcgccagcatccatgcacgaagattgtgataaacgcatcgttcaggcgcatacgatatctaagagcagtagccttaaggcgatcgccgactccagcaatcacgtcatgggggtgataatgaacttagcaagcctgatgagaaacaacggaaaatggcttcccgagaagatcggtatcaatcaggcatccacttttacaggattttgtgcagttcatgacagaatcttgttttcatgcctagagaacgaaaaatttacaggcacggacgagcagtgctttgccttaatgtttcgttcattgtctaaagaaatttacgccaaagaagggggagtgctatcttccgattttgctaaaaatgccgataaaggaaagctacaagttgaacagtattatattcagaaattaatcgaccagcaccaaagtggcttaaatgcagcaataattgaattaaataatcttaaaactagcctcgaccgcatcctacttagcaggcaattttcagaaattgaaagtgttatcttcacttttgcagagcctttaccaattgtagtttcgtcaattctttcaccggagagggatttcgatgggaccaaaattcaggatttgagcgatcttacagtgtcggcggaacaagtatgtttcaatgctttttcctgcggaggtaagggatatgtagtgttcagttggctgagaacttcaacaattatcagacgttttatacggacactaattaagatcccggctaacaggatgttcaatacccttctgtattttttcttcacaaaggccgaaaatacatattcatcccctgagtggtgggacaggctcagtgataaacagcgagagaatatcggcaacatgattatgtcaggggttgaattttttggcagacctacatcacaggttgatcattccgttgattataacgccgctgcacttgaagagataacatgcagcaacaacgaaatttgcagttga

SEQ ID NO: 101660 - DNA, 1110 bp, Enterobacter aerogenes
atgaccgacaccaccatgcaattgctcagtcagggcacagaccccgtgaaaatgccagattttgatattctcgcggagggtaaaacgctgtcaggcgtggcagagcgcctgatgagcctgtcactgaccgacaaccggggatttgaggcggaccagctcaccatcacgctggatgatgcggatggtcagttgcagctaccgccacggggcgcgcgcctgacggttctcattggctggaaaggagaaccgctgacagaaaaaggcacttacattgttgatgaaatcgctcacgaaggaccgccggacaggctgactgtttcagccagaagcgcagattttcgggatgaatttaacgttaaacgtgaagtgtcctggcatgatgtgaccgttgagcgcgtggtatccgccatcgctcatcggtacggcctgaaaccgcaaatcagcgaaatgctgatggatatcgaaatcgaccacgccgaccagaccgaagaaagcgacatgtccttcctcacgcgcatggcggaaatgctgggcgcaatcaccacggtaaaaagcggtaacctgttattcatcatgcccggcggtggcgtgaacgcacagggccagccgttgccctcgttcgccatcacacgcagcagcggcgatcgccatcagttccgcattgctgaccgcgaagcgtatacgggggtacgcgcttactggcttgatcttaattacgggaaaaagaaaaaagtcagcgtgaaacgccgcaaaccgccaaaacccaaaaaggagaaaagcagcagccgtgaaggtgattatatggaaggcgcagaaggcaatgtgtttgtgttacgcaagacttatcagaacgagcaggcagcaagacgcgcagcggcggcaaagtggcagcagctacaacgcggagccgcatcattttccatcacgctggcgcgtggacgtgcagaactctaccccgaaatgcatggcacggtaacaggatttaaaagcgagattgataatcaggactggattattgcaaaagccgagcacactattgatgacagtggctttaccacacagcttgagcttgaagcaaaaatcccggaatggatagcggaaacagaatga

SEQ ID NO: 101661 - DNA, 1185 bp, Enterobacter aerogenes
atgagtgaaactcgttttcatggtgcccgtgttacggaaaataccgacctggtaacagcgattaacgatgttgattccagcgttatcggtatcgtggcaacggcggatgatgcggacgcggagctgttcccgctgaacaagcccacactgctgacccgcgtcaatgatgtgctgggaaaatgcgggacaacggggacgctttatcgtgcgcttaaggccatcgcagaccaggtgagcacaaaggtggtcgtcgttcgcgtggctgaacacaaagaagaagacggaaagacgcaggatcaactggttatcggtggttctgaggatgacggcagctatacggggatgtatgcgctgcttgttgcagagcaggatgaaagcatcggataccgtccgcgtattctggccgcgccggagctggacacggaggctgtaacaaaatccctgtgcgtgattgcaggtaaactgcgcgcgtttgtgtatgcctcatgtcacggctgtaacacgatggctgaggcgattacctaccgccagaaattcaacgaacgtgaggtgatgctcttatggccggacttcatcgcctacaacccgaaaagtggcaaaaacgaaacgttccccgcgcctgcctatgcgtgcggccttcgtgcgtacattgaccatgagcagggctggcacaaatcattgtccaacgttccggttaaaaatgtgctggggatgtcgaggcatgtgttctggtcgttgcaggccgaagacagcgatgccaacagcctcaacaacaaagaaatcacgaccattattcgtcgcaacgggttccgcttctggggcaaccgcacaccggaaacgaacgcctacatctttgaggtgtatacccgaaccgcacaggtgctggctgattcaattgcggaagcgcagtttgaaaccatcgacagtccactgacgcctgcgaacgtgaaggatgttatcagtgccatcagggcaaaactggattcactggtgactgccgggaaactgattggcgcggagtgctggtatgacgtggtggataacagcaccacggatttacgtcaggggcgtgtgcgtattcgctacaaatatacgcccgttccgccactggaagacatggagctttaccagacgtttactgatgaatactttgaacccgcatttgcggtgctgggaggtgcctga

SEQ ID NO: 101662 - DNA, 513 bp, Enterobacter aerogenes
atggctgtgccaaaacatcttcgcttttttacgctgtttgtggatggtgaaaacgaagtgggtaaggtgacgtccgtcactttgcctaagctgacgcgcaaaaccgacagctaccggggtggtggcatgatgggggcggtaagtattgatctcggcctggacgactccgcgcttgatgcgagctttgtcatggggggcgcagttcgtgagctgttccttaagtatggcggcacgattgacggcacgctgctgcgttttgcgggtgaatactacaccgatgcagaaagcgacctgtatgaagtcgaaatgcgcggacgtgtgacggaaattgatatgggggaagccaaacagggcgaagccacatcacacacttacgccattaaaaacacctactacaagctgagtgttaacgatcgcccgttgtgggagattgacctactgaacttcatttaccggaaggacggcaaggacattgtgcccgatcgcatccgttccgcgcttgggcttggctga

SEQ ID NO: 101663 - DNA, 360 bp, Enterobacter aerogenes
atgaaagagacgaaaaacatcgataacacggtagttactgacactgtgaaagaaaccagtgagcgtggcgtaaaacttacccaaccaattgagcgaggcggcgaaaaaatcacgtatgtggagatcaccggggctattgagcaggctggatctctgcgagatttgtcgctgtctgatgtgctgaatctgaaagcggaatccatgtttacgctgctgtcacgcgtgacatcaccgcgactggatgaagtgacgatcaaaaaaatggcatcccgtgactttattcagttatgtgtggttgccgtaaattttttgagcggtgcggactctggcgggaagaacgaacaggcgacggaagcctga

SEQ ID NO: 101664 - DNA, 2808 bp, Enterobacter aerogenes
atgaagactcttgatatccgggtcgctttcagcgccgttgacaggctgacccggcctgccgaaaacgcccgccgcctgatggggcagtttggtgactccatccagcgaacgcagggggcgatcaaaaatctcgagcgtcaggcgcgatcatttgagcgcgcccgcgacgctgtcagtaaagcggatacgggtatcgtgaaagcacgacgccagcttaacgcccttaatcagttacaacgtacgggtacagtgctcagcgaaaaacaacaaaagctgatgcagcagttaagcacccggcttgaacgcctgaatgaatcgcgcacacgggaaattcagaaaatgcgggagcttggcggagagctgaaacgccacggcatttccctgacaggcagcgataacaccatccagcaggccatcagacgcaccgaacagtacaacaaccagcttgaacacgaacggcaggcgcttgcgcgtgtaacgcgggcgcgtgagcggtattcgcgtgcgcaggaaaccgcgggaaaactgaaaacaggtggtgcactggctataggtgcggcagcggcgggcggctatgctgccgggcgttttttgcagcccgcgattgggttcgggaaagagatgtcccgcgttcaggctctgacgcgaatcgacaaaaacagcccgcagtttaaggcgctgcgtgagcaggcgttaaaacttggctctgaaacgcagttcactgcaggcgatgccgccagtgggcaggcatttcttgcaatggctggcttcactccgcaggccattcaggctgcgcttcccggcgtactgagcatggcaacggctggcggtatggatctcggcgaaacggcagatattggctcaaatatcctgacgcagttcggcctttctgctgaccagatggaccgggtcggtgacacactcaccgcagcgtttacccgtaccaacactgaccttcgcgcactgggcgaaaccatgaaatatgcaggtccggtggcgggtaagctgggaatatcgctggagcaggccgcagcgatggcgggcgtgctggcgaatatgggcatcagagggagtgatgccgggacggcaatgcgtgccagcctggctcgtctggcatcaccgccaaaggcggcggcagaagctctgaaagagctgggcgtgtccgtctcggatgccgggggcaaaatgcgcccgatggaagatctgctggctgacctttataaagctacccgcaaatacggggaagttgaccgggtatccttctttaaggacatcgccggggaagaggctttcacatcgtttatggcactcgttgatgcggcgggtgacggttccttacccaaactgagaaaagaacttgagggcgcacgcggtgaggctgaacgcacggcaaaggttatggccgacaaccttgatggcgacctgaaaaatctcgacagcgcatgggaaggtcttcgtattcgcatcagtgatctggttgacggtccgctgcgttctgtcacgcagtggctaacgcgggtggtctcaaaggtgacggcactggcgcaggcccatcctgtactgacgcgccagctactgattgcaggcggtgcgctgctggcagtgactgcaaccgtaggctcgttgtcgcttgctcttggtgtgcttgctggcccactggcaaaactgcgtcttggtttttccctcctgactggttcaatgaatgctgtcagactcctgccagcactatggggaatggtgacgggttccgtttcgttactggggggcgctatcggggcgttgttcagtccggtcggtcttatcgtggctgcgcttgccggagctgccgttctcatctggaaatactgggatcccatcagggcattttttgccggggtgttcagcgggattatggaaagactgaccccgttgcgcgaaacctttgaacggtttggtcctgtttttgacgcaatcggaagcgggatcagccaggtgtttaactggtttaaatcgctgttgtcaccgatggagtccagcaaggaaacgctggataaatgtaccagtgctggcgagatattcggtaacgttcttggtggcgcgttacagcttgttctgacgcctgcaaaaatgttgctggatacgctggcgtggatacttgaaaaactcggtgtgcttccggatgaagcggaaagggcgagaaagaaaatcgaagacgcacagcgtgcggctattctccaggacaaggttgccttgcttcagggggacctggcgaaaatcaatccgccgaagcctgtagaaaatggcaatggcaccggaggtgataaacccaaagataataaaccgctcacagacagcaataccggtacgctacgcaggctcagcaaaattgctgataacacaggtaagctggttgatgagacgaaaaaacgcattggccccggcgatattgtctttaagaacctgccccgcgcacttgccgttcgtggggggtggcaggagcggaagattgcgcaggtcagtaagcctgcccccgcaattaatatcacgcctgtggttccggccccgctgcctccggcgctggtccctgttgttgcggccagctcccgcccggtggcggaggccatacgatcgccagtggcatcagccccaacaccttcgcgtaaccgggaacctgttgcctcaggatttggcggtgaaattcatgttcatctgcataacgttgttacgcagaatccccgcgaactggcgaaactggtcggtgaaatggtcagggcagaaatggaacggcgcgcccgtgccgggcgtggcagtttttacgataaagattga

SEQ ID NO: 101665 - DNA, 489 bp, Enterobacter aerogenes
atgatgatgatctacggcatgtttgtttttgagctgcgcacgctgccgcatcagcagttacagcaaaacaaaagctggcggcatgtgaaaaatgaacgcgttaaccgttcagcaagctggcagtatatcggtgcaggtgatgatcgcatcgttctttctggtgtgctttatcctgaaattacaggtggcgaagtgtcgctgtcgctgctgaccacgcaggcgtatacaggacgaccctggcctttgattgatggcgtcgggcagatttacggcatgtatgtcctgaccggaacgaatacgacccgttccgagtttgatcgctacggtaaggcgaaaaagatagaattttcactaacccttgaacgctgtgatgaggatttgcgggaacgcctgcaatcctcatcgttcagcgatatgctgtccggcttcaaagataaggtgacatcatctcttaacagcgcggccagttcagttaaagggctgttctga

SEQ ID NO: 101666 - DNA, 609 bp, Enterobacter aerogenes
atgagtaattcactgttaccaccatcagccagcagtttcatgcgttgtgccgaagctgtcggaacgcgcattacagacatcccggtagacctcaacacgctgtggtcgccggacacctgcccggtgcacctgctgccttatctcgcctgggcattttccgttgaccgctgggatcgcaactggccggaagagacaaagcgacaggtgattcgtgatgcatggctgatacaccgacacaaagggaccatcagcgcactgcgaagagccgtagagcctctcggctacctgattgaagtaaaggagtggtggcaactcaacgaggagccgggaacatttcgcattgttgtcggagtacttgatcagggcatcaccgatgaaatgtatcaggaacttgagcgccttattgcggatgcaaaaccagtaagtcgccatctgacagggctggcgatcagcctgagtgtgaacggaaatattttcgttggtacgggatgctatcacggcgatgccctgacggtttatccctacaccccggagtccattattgtcgaaggggattatttccctgccccggccattcatttaattgataatctgagagtaaacgcatga

SEQ ID NO: 101667 - DNA, 897 bp, Enterobacter aerogenes
atgcccgccgttgacctttcacagttaccggaccccgccatcatcgcggagcctgactttgaggcaattctggctgacacaaaagctatgatgattgcgtcctatcccgccgaacagcgtgaagccgtttccgccgcgctggagctggaatcggaaccccttaacgttatcgctcaaaccatgtcgtttcgtgaaatgctgttacgccagcgggttaacgagggcgcacgcgcctgcatgttaagccacggttcagggacaaacctggacaacctcgcgggcaatatgaacacaaagcgcctggttatcactccggcaacggataccaccgacgcggtgatggagagcgacacctcgctgagactgcgggcgcagcgggcgtatgacggcctgagtgttgcaggcccgtcaggcgcatacgagtattttgcacgcagcgccagcggtctggtgcgtgatgcgcgagccatcagcccgtctccggcaaatgtgacggtttccattctgtccactgaaggcgacggcacagcaacggaggcgttgcttaataccgttcgcgccgttctgaatgcagaggatacccgcccggtggccgaccgcctgacggtacagagcgccagaatcgtgacatggcggctgaatgcaaaactgtacttttaccccggtccggaatccgaacctattctggccgcggcggaatcgtcattcaggaagtggctggctgaacaggggcttatcggtcaggacgtggcgttgtccgccattgctgccgcactgcatgtgcacggtgtgcaacgcgtggagataatcgaacccacacagaatatggccatcagcgacatacaggcggcgcgctgtgagtcattcaccatcagcgaaggtgggcgcaatgagtaa

SEQ ID NO: 101668 - DNA, 351 bp, Enterobacter aerogenes
gtgacaacccgctacacaggaatgaatccggacgggacgggaaacctgaacgatatggagcacctgaaacagtcagtcagggatatcctgaccaccccgctggcaagccgggttatgcgacgggaatatggcagccttgtgcctgatttgattgacgaacccatgaataacaccacgcgtctgcaatgcatgagtgcagccgtgattgcgctgacacgatgggaaccccgcattgccctggatgccatcgacgttgtctggaaagcgggaggccgcgccggggtgacgctgtcgggcactgtcatgcagaccatgcagaatgttgaattaaccatcacgctaagggagtaa

SEQ ID NO: 101669 - DNA, 582 bp, Enterobacter aerogenes
gtgagcgcagaactcatgcgactgctgagcaacatcatccgtaccgggatcatctctgaagttgatgaggaatcctggtgcgtgcgcgttcgcagcggcgaactggaaacaggctggctgcgctggaacaccacgcgcgcgggagccttcaatgtgtggctgccgccatcaccaggcgaacaggtggtaattgcctgcattggcggcaacccggaaaccgccatgataattggcagcctgtggagtgatgccagtccggcacccggcaaaagcctgaaagaaatcgtgatcagcgcgccggacggcgcggtgttccgctacgacgcggatgcaggcgcactgagcgccagcggcatgaaaacggccactttacaggcatccgtcagcgtgaaactggatacgcccgtcgtggaatgcacaaaccttctgagaacggcgacgcttgacgtcacaaaaggaggaaagatgagcggcaatatcacgcacagcggcggcaacttcacctcaaacggcattaccgtgcatacgcataaacacggtggcgtgaaaggcggcagcgattcgacaggaggcccgcagtga

SEQ ID NO: 101670 - DNA, 645 bp, Enterobacter aerogenes
gtgaaagcgatggataaggcattcacccgcgtggatgaaacctttgaggccatccgcgacagcctgaatcagcaggccatcaataacatcgccagaaagctggcacaggatttacgccgcgcccagcaggcgcgtatccggtcacagaaagcgccggacgggaccgcgtggacaccacgcagacgccgcgtaacccggatacaggaacgcattcgctttatctggaataacgaagcacgcacgctgaaaaactggcatcacgacacggggaaatacgggcgaaccattaccgggtgggatgaggataaaaataatatccgcacgttttaccgggatgacatcgaccgttttctggaaatacgcacccggcgcatcaaccaggacagcaccaggcgcgtccccatgttcgtaaaactgcgcaccgcccgctacctgaaagcccgtgcagatgcttccggtgtgacggtgggttacagcggcgtggccgcacgtattgcccgcgttcatcagttcggtgagcgcgatcaggttgcgccgggcattttcaccgattacccggtacgtgagctgctaggtatcagccaggcagatgagcgcctgatttataacacggtgctgggccggattgcggaggctgtacggtga

SEQ ID NO: 101671 - DNA, 468 bp, Enterobacter aerogenes
atgctgaaaactgattccctgcgtgaagccatgacccgttcatgccgatggtgtcaggccaacccggagaaattcaccattttcgtggagagcggcaacattgaaacgaccggagaaacgccctcgtttgtttaccgctatcagatggtgatgtttgtcatggattacgccggggagctggacgacctcacgctgccgctactggcgtggttatccgaaaatcagccacagttgttgctcaatccggagcgtaatcaggacatcaaattctccgccgttatcaatgacgatgacagcgccgatctcctgtttacgctccccctgcgggaacgcgttcgcatcacgcgcagcagtcagggcacgccgcaggcagaacacctgccggagccaaaaccccgcctgccatcttccgaaggcgactggtcgcatgtattccaggatgtgacgtggggtgaaagcgatggataa

SEQ ID NO: 101672 - DNA, 408 bp, Enterobacter aerogenes
atgaagctctggcccacgctgggcgtcgcttttcttctgattgccgcctggggagcatccatgcgtctgtcgtggtcactgggccgggagaacgccagaaacgaagcgcaggccagcaccctgaaaagtaccgtcgacaccctgaatatcatcagcgccggggtacaggatatgcagcaggtgctggcacaactccgcgcggaaaatcagcaacgcaatcaggacggagaggccagacgtgaacagctacgcaacgatattgcaaaagatgaatgcgcccacgctttgcctgacgctcgttttactgacaggttgcgcaggcacgcagaacgcgccacggccagcgccgtcagtccggcttataccgcagacgctgaccataccggtaatgcctccccccttccctga

SEQ ID NO: 101673 - DNA, 393 bp, Enterobacter aerogenes
atgagcaacacatttaaattcagcagccggagcgaaaagaatttgcagggcgtaaatcctgatctggtgaaagtgacccgacgggcactggaaatctcggaagtggattttggtatcaccgaagggttgcgcagccgttaccgccagaagcaactggtggccacgggtaagagcaagaccatgaacagccgccaccttacggggcatgccgtggatgttgtggcttatatcggcagccaggtgtcatgggaatggccgctgtacgaaaaaatcgcagcagcattcagacaggccagccgggaactgaatattccggtggaatggggcggcgactggaagactctgaaagacggaccgcactttcagttaccacacggagcctatccggcatga

SEQ ID NO: 101674 - DNA, 324 bp, Enterobacter aerogenes
gtgagcaccattcaaacagggatcacagagcaggttattgcgtggctctttgaccacctgccaacggtgtatgcagtaggcgcggcggtcagcatttccgcgctgatgagtctttatgacggacgaacactggttcagaccgtaacgggatcgctggcgtgcggcgttcttgccatggccgtggccgggtcgttgcgcttcttcgggtttcctgaagatgccgtgacgtttatcggcgcatcaatcggttttatgggtgcagagaaagcacgcgacaaggttattgcggcctttaatcgcagggtgaaggagaaggacgaatga

SEQ ID NO: 101675 - DNA, 201 bp, Enterobacter aerogenes
atgaaagtgaaggcactggaaagcgacaccgtggattcgctctgtttccggtactacggcacgacgcagggcgtcaccgaaaaggtgctggatgccaaccccggactctgtcagcaggtatttctggacgccgggcaggaagtggagatgccggagccggagaagaagaaacgagaaatgattcagttgtggggggagtag

SEQ ID NO: 101676 - DNA, 495 bp, Enterobacter aerogenes
atgagtatggttgccagaaatgaacccggacccgcagaggacgacatcaccgataccgatgatggcgatacccgcatttcagcgggtgcattctggccggatattgtgctgcgcgagctgcgtctggcggtacgactgccgggccgcgtgaccacctcccgcctgctgcatactgccaccggggctgtggcacacgttacccgcgagctggaagcatggcagcaggaacagcaggcagctggccatcagacgctggccgatgttccggcacccgtaattaacggagaaagcgtcaatctctggcactggcgcaatgctgtttataccgccacgcgcgccctgattctggagcgttaccgcgatgcggacacaacggacaagggcgaccgccgggcggacgcactggatatacagacatcggatttgtggcgcgatgtgagctgggccatctctgacattctgtgccgcccgcgaatctttgcggaattgtgctga

SEQ ID NO: 101677 - DNA, 801 bp, Enterobacter aerogenes
atgattactcctgcacagcaacactggcagaacgtgatggcacagcgcgcaggccgggcgaatgaaggcgtggaccacgccgcgcgtaccgcgcatgaagaggtgctgtatcgtctgcgtctggcacaggcccggcttaagggcgtacaggccagaagcgcgaaagccgccatcaaaaaagagttgttgccggatttttccggctggattgagggaacgctggaggctgacggcgggcagcaggatgaagtgattgccacgctgatggtgtgggcgattgactgcggcgatcttccgctggcgttgcgtattggtgcgtatgtggtccgtcataacctcattatgccggataactttggccgtactgctgccacggtactgaccgaagaaatctgcaacccggtactgacgcaggccgggacggatgccgacgcggatttatccgcctttatcgaaccactggataccctccgggagattgtcaccgaccaggacatgccggacgaagtgcgcgccaaattatgcaaagcgtgcgcctttgcccgtcgtggtctgagtgatgcggacggcatggccctgtcactgaagctgctgcgcgaagcaatgcacctgaacccgaacgcaggtgtgaaacgcgagattgcaaccctttcccgcgccctgaaaaaagccgattccgcagccgcaccagaagacgccagcgcacagcagacgcaggacgaaagcagcaaaagtaaaaagacaacgcggaagcctgcaacacgaaaaaccaccgcgacgcagaaggcgaagcgcggttaa

SEQ ID NO: 101678 - DNA, 1053 bp, Enterobacter aerogenes
atgaatctggtgatgtcagatattacccgcaacaagctgggttgctatatggcgcagcaggcgtcgcttaacaatatcccggtatctgcactggtatcgcgatttaccgtagaaccctcggtgcagcagcgttttgaaaacgcagtaaaggagagcactgaatttacaaaaaaaattaacgtgttcggtgtgaccgaccagaaaggcgaaaaaatcctcctggacaccaccgggccgattgcgcgcacgaataccagttatgacggcacaaaacgccgtaacccgaataacgtggttgatctgaaaaaccgcaaatatcagtgcgaacaggtgaactacgacacgtttatttcgtatccgcagcttgatgcctgggcggcacaccctgattttcagtcacgcgtcagcacacaaattgcccggcaggtggcgcttgaccgcatcatgatcggtttcaacggcacgtctcacgcagatgagtccaacttcagcaccaacaagctgcttcaggacgttaacgtgggatggctggagcacatcagaaccgacgccagcgagcgcgtaatgaatgacgtgacgctgacctcccgcaacatggacaacaccgtggcgcacgcgggtaagtatgcgaacgctgacgcactggtacaggacgcgcgctcatccctgctggatgaatggcacaaagaagctgacgacctcgtggtgattatggggcgcaacctgtttaactcgctgcgtctgcccgtactgaacagcatcagcggccagaatcccaatgcggaattacttgccggacagctcatcctgtcatcgcgcgccattggcgggctggatgtattccttgcgccgttcttcccggatgcaacgatgctgatcacctcgttcaacaacctgtcgatttactggcagaaaggaacaatgcgtcgcctgatgaaagacgagccggaatacaaccgcatcgccacctaccagtccatcaatgacgcttatgtcgttgaagactatggcaagtgcgcgatggtcactggcctgaagttcgccgacagctaa

SEQ ID NO: 101679 - DNA, 837 bp, Enterobacter aerogenes
atggctaatgaaaaaaagacatcccgcaaaaagtttcgcgtggctgtctccggatcaactgttgatggccgcgaaatcagtccggtgcatctgcgtgaagccgccgagaacttcaacccggatgtttacgctgcccgcgtgaacgttgagcactatctctcgccatgcccgtcaagcgaattttccgcaatgggcgatgtcaccgcactgagtacggaagacattacggaaggtccgctggccggacgtactgcgctgtatgcagaaatcgaaccgaccgagcgcatgaagcagcttgtcgcggacggcaagaaaatctattccagtatcgaactgcacccgcagttctccgttaacgggcgcgcctatctggtcgggctggcgatgaccgacaccccggcaagcctgggcactgagcgcctgaaattcacggcacagcagcgtcaggcggtgatgacgttcaacagtgtccagggtgaagcaccgctcatttccgaagccatcgagtctgaaatcatcgaaatggcagaacaacgccaggaagaaggcacccagtggtttaaccgcgtaatggggattattggtcgtggccgcaaagcggatgacgccagtttctcccgtattcaggaagcggtggaaggcgtcgcaacgtcacaggccgacattatcgaccgttttaatgtgctggaaacccgccatcagcaggaccgccagaaaatcacgtcactgaccacagagctgacagcactgaaggaaaaactgcgcacgcaggacggcgatccgcagaaccgcttcaccgcaacgggcgcagcctccgaccagctggctgacttctga

SEQ ID NO: 101680 - DNA, 1752 bp, Enterobacter aerogenes
atgattcaggacgcttttgtgcgccagcgtgcgcggcaactttactggcagggttatccgcccgcagaaatatcacgtctgatgggaataaacccgaacacgatttatgcgtggaaaaaacgcgaccagtgggatgaaacgccacccgtgcagcgtgtcacgcagtccatcgatgcgcgcctcatccagcttactgaaaaacagaataaaacaggcggtgactttaaggaaatagacctgctgacccggcagcttaaaaagctgcatgatggccagccggatgcgacggccgcaggaaagaaaggccgggcgaaaaaactcaaaaatcatttcacgccggaacagattgccgcactgcgggaaaaaatcatcagcaggctggagtggcatcagcggggctggtttgactccctgaccctttgcagggaagccgggatacgtaacaggatgatcctgaaatcccgacagattggtgcaacctggtattttgcacaggaagcactgctgatggcgctgcgtgacgatgtggcgcaaccttaccagcgtaaccagatttttttgtctgcgtcgcgtcgtcaggcgttccagtttaaaagcattattcagaaggccgcggctgaagttgatgtggagctgaaagggggcgataaaatcatcctctccaacggcgcagagctgcattttctcggtacttctgctgcgacggcacagtcctacacaggcaatttttattttgatgaatttttctgggtcagtcgctttgctgaactgcgcaaggtggctggcgctatggcaaccctcagcgggctgcgacgcacctacttctccacgccatcaaccgaaacgcacgaggcatacgtctactggaacggcgaccgctggaacgagaaaaaggccgcgcataaacgccagcatttttctgtggactggaaaacgctgcataacgggcttatctgccccgaccggacgtggcggcaaattgtcacgctggaagatgtggttaatcacggctggaaacacaccgatattgatgaaattcgtgatgaaaacaccgaagacgagttccgcaatctctatatgtgtgagtttgttcgcgaaggggaatcggcatttaacctgaatatcctgattggctgcggtgttgacggatacgacgactggaaagactggaaaccttttgctccccgcccgatggggaatcgtccggtatggattgggtatgacgcaaacggcagcagtggcaacggcgacagcggcgctgtgtccgtggtggttcctccggctgttcctggtggccgttttcgaacggtggagacgcgacgcgttcaggggctggagtttgaagaacaggccagagtcattgaagagttcacgtatcgctacaacgtggaacacatcggcattgatgtgacgggcgggaacggggaggctgtttatcagatagtgaaacgttttttccctgctgctattccgtacaccttcacgctgtcatcaaaacggtcgctggtactgaaaatgctgcaaataatgcgtgccgggcggtgggaatacgatcgcgccgaacgcgagctggtcgcggcctttaacgccgtgcgtaaggtgaaaacaccgggcggctttatcacttacgaaacggaccgcgcgagggggatcagccacggcgaccttgcgtgggcaaccatgcttgctgtcattaacgaaccgattggcggcgaaggagaaaacgagcgtttcacggttatggagttctga

SEQ ID NO: 101681 - DNA, 1047 bp, Enterobacter aerogenes
atgagcagaaaaaataaaaaagtgcgcatgagttcacgcattgatctcgctgatgcgctcaggaaagaatcatcgctcagtgcattcacatttgatggtccttatcgcctgaccgggcatgacctgctggacaatatgtactgtgctgataacgggcggtggtacgaaaccccggtggactggtacggtctggcaagagctgcccggcaaacgtcctggcatcagtctgcgctttactttaagcgcaatgtattgctcggctgctatattccgcacccgctgctttcccggcaggatttctcggcgctggcgctggactggtttgtgttcggtaacgcattccttgagcttcggagcaatatgctcggcgaaccgcttaaattacgacacgccctggcgaaatacatgcgacgcggaagcgatcttgaatcatggtggtatgtgcaggatggcaaggacgcgtttcagtttcgccctggcaaagtgtgccacctgatgaatccggacattaaccaggaaatctacggcatgccggaatatcttggcgcattactctcggccagcctgtctcattcggcggacatgttcagaaaactgtattacgacaacggatcccacgccgggtgcatcatctacatcggtgcagcgcaggtaaaccgcgaaagcatggactccctgaaagaaacgctacagggtgcgcgtggtggtggtgcgtttaaaaacgtgctcattcatgcgcccaacgggggcaaagagggggtgcaaattttgccgttccagcagatcaccgcaaaggatgagttcatgaatgttaaggcggcatcccgtgatgatgtgctggctgcgcaccgcgttccgccgcaactgatgggggcgatgccgggcgaaaaaagtgcgtttggtgatgtggagaaggcagcgcgggtttatgcaattaacgagctgatgcccgtaatggaggccatgaagcatatcaatgactggcttggcgaagaggtgatccgctttaacccttacgcactgctggacactcagcccacatcctga

SEQ ID NO: 101682 - DNA, 132 bp, Enterobacter aerogenes
atgaaattacagtgtgcctcatggaacgtccttaccatgtctaaactctaccttcatacaattgatgatttctttcttggttattttttcttctcgctattgcctttgtcctgcaacagacccgccttgtga

SEQ ID NO: 101683 - DNA, 2784 bp, Enterobacter aerogenes
atgagtgcgtttgcatggagctggaatgaaccacgaccagctattgatccggccagatttacggagcgcaggcaggaaactgaaaccgacctgcaacgcgccatccgttactaccttgaggcggacaaaagggcacaggaagaacaggaagcgaaggaagaagcctttttcgcacaatccgccatgggtaaaaaactcatggtatcccttgaggaagccggacagcgtgaaaagctggcacagagcatcatcagtaagcgccgggcaacagaacaagacccggtagcccgtgcctttgccacactgaaggcgcttcccgtttatctgcgagaacctctgagccgccacctctctttcctgcgcaagaagcaggaagccgatcgtcagaaaggcaaaaagagctggcaggcggaacgctatacacgcggaaccctgcgcaaaatattcgaacgtctggatcgcactgacgggcgctggctgacacctggttatcgctcccttgccggacgcgaacgcctggacgatttgctttacctgccgcagctcaacaaacaccagatacagacgctggccaccatgacggcggcgatgttcagcagcaccttcgaaaaactctgcgatggctttggcgcgaccgatggcgaactgaccatggatgtaacgctgaaggcgtatcagatgctggcccgcatggcgttacacctgcacatcatgcccccacattatgacgcactgacaacagataaagaccggaggaacgaaccggacacggagctgctgccgggcgcaatccttcgcctgacctgtacggaatggtggaaacgcaaactgtggctgttacgttgcgagtggagagaagaacaactccgcgccgcctgtctggtttccagaaaaacatcgccctatctgagccaggacgcattaagcgagtttcgcgcacagcgcgagaaaacacgcgatttcctgacaagtttcatgctggaaaacgaagatgggttcacgattgatctcgagacagtgtattacgcgggagtaagtaacccggttcaccgtaaggcagaaatgatggccaccatgaaggggctggaacttctggccgaagcccgtggcgacaaagcggtgtttctgactgtcacctgcccgtcaaaataccacgccacaacagagaacggtcatccgaatcccaaatggaacggggccaccatgcgcgactccagcgattacctggttaacacgttttttgcggcggtccgcaagaaactgaaccgcgacggcctgcgctggtatggcatccgcacggtggagcctcaccatgacggcaccgtgcactggcatatgatggtctttgctcatccggaagaaatcgacactattgtgtcccacacccgcgatattgccattcaggaagatcgtcacgagctgggtgatgatattaccccacgctttaaggcggagtacgtcgacggctcaaaaggcacaccgaccagctacatcgccacctacatcgggaaaaacctggacagccgtgccgtggatggcatcgacccgaaaacgggcaagccacgcgttgaccacgaaaccggaaaatcaatggccgagagcgtggaacgcgccatcggctgggcgcgccttcaccgggtccgccagttccagttctttggcatcccctcccgccaggtatggcgtgaactgcgccgccttgccagccagatggcacgcaacccagaaggcccgcaacggctgaaggatgacgcaatggatgcggttcttgccgccgctgatgccggatgttttgccacctacatagagaaacagggcggcgtacttgttccacgcaaagactacctgattcgcaccgcctacgacctcgccgatgagctgaacgattacggcgaacagagcgtacagatttacgggatctggtcaccactcatcggggaatcctcccgtgtgtgcacgcatccggataactggaagctggtaagacgcaaaccggaagcggaagacagtgcccgcgaaaatggttttgaccttcagggcggccctgccgccccttggactcgtggcaataactgtccccgtgtacaggaaacggacaacaacgggacagaacagccggaagaacggccagcaccgtggccgcagctccctgacggcgttgaagtgaacgaatggatgcgctcactgaaacggcacgaacgccgggcgctgatgcgttcgcttcgtgacaaacaggcaaaaaacagcagtgatgaaatgcagagctggacacagagccgcaaacagcagcggcctttgcctgataaccacgaattactcgctaaagaatggcgggaatctgccgaatctctcggcctgcatatcggtgaacagcagatgcagcacctgttacgaggcggcagtctgtacgttgacggcagcatcattgcaccgcagggatttgaaattgtacgcaaaccagatacccgaccggacagccgaatcacgcagctctggcagcgcctgagccgtaatcacggcgtaaacagcacggaaatccgccataacccggtttccagctatctgaaacagctcggggcatcagaccctgaagccgctgcacgcctggcatccacaattcagcaggaccagaacaccatgaaaactcccgttaccgtgctttctgacatgctgcgcgccatccgtgacgcagagcacgcacagagaatcaatgaaaccactgaacgcgcacgtcacaaggcgggtctgttgcaggacaaaggcaatagcgagaagaaaaaataa

SEQ ID NO: 101684 - DNA, 390 bp, Enterobacter aerogenes
atgattgacgctcatgacttcacaagatgggtgcgcacacaggacacccgtctggctcccgttcttcaggggttatttgatctctacatccgtggtcgtgacaacagagcacgcaccacaaaaccggagaatgcagacaccctttatttcacagtagacgactgctaccgcgtggatttcacaccacacggactggcgttgcactgcctgacaccgcacggcgaatcactgctggcgtattacgactccccggcctccgtgtttgcagcaatgctggcgcatcgcactgctggcgggtgtgcctcgctgagtgaatacaccgctgaatttaaccgcctttccgccctcttctcgcaggagtggcagcgcgtgacgggataccagccatga

SEQ ID NO: 101685 - DNA, 231 bp, Enterobacter aerogenes
atggcagaccgcaaacagcaccgcgctatcgcggagcgtcgtcacatccagactgaaatcaaccgcagactttcccgcgcatcacgcgtcgcgcaaatcatgcacatcaatatgctgcatgagcgcagccacgcactatcaaacatttattccgcctctgttttcagctatctggcggatgatctgcacgagcttcaacagctcatccagcagcaaaacaaactccattaa

SEQ ID NO: 101686 - DNA, 291 bp, Enterobacter aerogenes
atgagcaccatcaaccaccagaagctacgcgaactggcatttgccctgcaacgaatggcaacgcctcaaaaattactggcatttcgcgcaatgctctcgccgtctgctgtgctggcactgctggatcagctggagcacgccagaaccacggctcctgccattcgcctcacgctccatcatgaaatcgctgatttctgcgcaacgctgggggcacctggcgaaccggaaacgccggaagcaatgcagcaagagctgctgcaacgcatcgataacgtttttgattttttctga

SEQ ID NO: 101687 - DNA, 267 bp, Enterobacter aerogenes
atgaccattctggactacatcgctactcatccggggtgtagcggcggagagatcgccgcagcactgaataccccaaccacagccattaatgctgagttacgccgactttggcgcggcggcttagtcatcagaacaaaccgcagcacaggtggtcgcgctcgcaaaacaggaggccaggcttcttaccacgtaaacccgatgccgttcgggtgtagcaatccacttaccaacatgtttaaccagctactgaaggaagccagagcatga

SEQ ID NO: 101688 - DNA, 204 bp, Enterobacter aerogenes
atggcaattaagcattttcccgtcgttcgctttacctccagagggcgcgaatacgaggtcgacgaacgcctgattaccactatcgacaaacatcgttcggaaaaggatgcacaccacatctacctcactgacggcacttacttctgcgccaccaacgtggcgcgagtaaatcttatccgacaggtacaggagccacgcagatga

SEQ ID NO: 101689 - DNA, 417 bp, Enterobacter aerogenes
atgaacgcaaaagaaaaaaacattatcaatacattaaaaatagtgtcagcagagcaagacaagctgtccagggcagcccagaaagataatcaacatatggcagcgctttacgcactgaccatcgcaatagccacctctgaagcagccaaagttattgaggaacagagcaaagaaatcgacactcttaaaacacagtcaacagttgcagccatgaatccgtccagcattggacgctgcatttatattcttggttcagcaatgatgctgcaatacaccattattgccgaactgcacggcaaatacctgataacgccttaccacacaaaagagtcagagcttctgacaaatctccgcctgatagaacgctctcaagctgtattcattgatgacgcgcaacgtgccgtatttaacgcatag

SEQ ID NO: 101690 - DNA, 243 bp, Enterobacter aerogenes
atgggcaaagaatataaaactctcattaacaaagcacttgaacgattttattttcgcttaagtgcatcaggcgctcatgctgaacatgcagcccgtgactcattgaccagggcaatccggagtttgtatgacgttgctttttacgctgatgatctggatgcacttaacgaactttccgagctgatctgtgccgcagaatgcggggaacacattgaaccatataagctggggaatatcgcatga

SEQ ID NO: 101691 - DNA, 267 bp, Enterobacter aerogenes
atgcacaaggtgtatttatccgttttattgattttcgcggtgaactgttattacgcgcatcagccattgacggagttgttccatccgaaaaaaaacgcagctacttacgtttatctgaacggtacgcgcctgactgtggagcttccgtaccagaccgtacgagaaatcattagcgaagctgaaaaggcacgtcaggttaatggcgatgaaccctatatcgaaattatttgtatggattcagaagctgaaattcagaaagcagattaa

SEQ ID NO: 101692 - DNA, 351 bp, Enterobacter aerogenes
atgaaaaaaaacgctaataatccatactccaaatttcgtaatggcgtagaacgccatgtacaccacgtcgctaccagtgcatcacgtagtaacagtcgctataacctgaacgagacgcacgcaacaccggatggccacgctgtaaaacaaatcggcgaacatgcctggctgattgagaaagctggaatcgtggtccacaaatgcccacgcaatccgtttaccggaaaccgcatttttgcattgaactgcggcgacaatcacttcgggcaggatttcacattatacgaagcacttcgcacggttgatcgtctgcttcgcgggcaaagttttattaaacaggctgatttttaa

SEQ ID NO: 101693 - DNA, 204 bp, Enterobacter aerogenes; identical to SEQ ID NO: 18193

SEQ ID NO: 101694 - DNA, 405 bp, Enterobacter aerogenes
atgaaaaatgatattggtcagcggttgcgtgaggaaagggaaagattgggacttagtcaagttgccatgagcgacattggtggagtcaaaaagctaactcagcttagatatgagaaaggagatagctttcctgatgctgcgtatttggcagcgctgtctcgttttggccttgatgttcagtatgttgtgttgggaattcactcacctgaaacttataacgatgatgagcaggaattgattactcgctttcgagcagcttcgttagatgtgaaaaacgcggtgattggggctttaaaaggtgcgatcagtgaaaaggaaactcagccatcaggacgtgagttaaatatttctggtggtaataaccgtatcgctggtcgtgactataacgaaactaagggtaggtga

SEQ ID NO: 101695 - DNA, 651 bp, Enterobacter aerogenes
atggccgtcaactcaaacggttcaaacaatcgcgttgctgggcgtgattttcacgaaaagaatattcagatagagcgatatgatggttctcataccgtcaatatcgcaatcccttcgaataatgatgatgacgatcgccctttgcttaaggctcagcgtaaggagctaaatagcttggttgctgctattgcagaagctagcaatactgaagcgtttattatttggcaaaaagtacatgcggagattggtgtagctggtattgatgatatgacagtaaatcaatataaaacagcggagagttttctgcatgcaatgcttgagcgatgtaaagatcatgatgcctgtaaggctcttgtaagtttattactacgtaacagtgaagactgtggacttcgacaaaaacttctgcggtattgccatatcaatttcggtacaggacgtttaaacgatcttactcgttctcagttacagtctgcattgtcgtggttagagcaacaatcggcatcaagccacacagagagttcgaccttaccagaagtccgacttcgtgcttcagaattaatccgactttatccaaaagaaataatattctttatctgcgtaggggttttggtaggcggtgtcatttctagggcgttttttaatttgtaa

SEQ ID NO: 101696 - DNA, 348 bp, Enterobacter aerogenes
atgaaagtaaaaaaggttcaactattagttacttttttatctatgttttctttttccgccgtcgcaatgccttttaaaactattgaacgtgagagtttcaatggggtatggccatttaatactgatgaggttcaattacagtgtcttgatggtaatccttatgtgatgaattttgacgataataagttatatgcacttacaggtttggctcgaataaaaggtaaaacatttggtgcgttaccgttagataacaataatccattttggctagataatgatgccgccccagggttaaaaaagagtctgggggatgtcactaaggctgcatttgatttatgtgataagtaa

SEQ ID NO: 101697 - DNA, 876 bp, Enterobacter aerogenes
atgaatagtagagttggagacgagtttcaagatggttctggtcctcgtctttctgagttgattgctcgttggtttgagatgtacggtaaaaccttgtcctctggtgcagagcgcaaagtcaaacttgaggcgatttgttccaggctgggagatccatttgcttctcagtttgacaaaaatatgtttgctacttatcgggaaagaaggctatcaggagaatggaatcccaaggggaagaaaaaacttagtgaagcaaccgttaatcgcgagcagtcatatctacatgctgtttttgccgaactgaagcgccttggagagtggtctggtgaaaaccccctgactggtattcgcaagtttcgtgaggaagaaaaggaactggcgtttctgtatgtagatgagattgaacgccttctgattgcgtgtgatgagtcacggaataaagatttgggggttgttgtccgtattgggcttgcgactggtgctcggtggagtgaagcagaaggattaaagcaatctcaagtactgcccggtcgaatcacatttgttaaaactaaaggaaagaagaaccgcactgtaccgatttcacctcaattgcaagctatgcttcctaaaaaacgaggagcgctattttcaccatgttatgaggcttttgacgctgcaattaagagagcgaagatcgagcttcctgatgggcaattaactcatgtgctacgtcacacgtttgccagtcattttatgatgcggggcggaaatattcttgtgttgcaaaaaatactggggcatagcgatataaaaatgactatgcgttatgcgcattttgctccaagtcatttagaggctgctgttgaattgaacccttttgacaatagagggtaa

SEQ ID NO: 101698 - DNA, 195 bp, Enterobacter aerogenes
atgaataaagatgataaggcttggcttttggccgttgtttacgcatcaactcaacccaaagaaatcacccctgaagagttcctttttgaagtcgaccgctctgaggttgattttctctccctgcttacaaagcgtgaggaagaggaaagtgggcaagcgatcaagacttgggagcaactaggctcttcaaactaa

SEQ ID NO: 101699 - DNA, 219 bp, Enterobacter aerogenes
atggaaagcaaagatctggtagtgattaacggtcagctatgcagcaaagacgttgccctgctgattattgagaaggttttacctaccgttcttttggtggtggcggaaaaggtgaaggacaggcgaactaatgatgaagtgaaagaagcagccacaaccgtagttgaagccgctatctcagcaattagtttgaagagcctagttgctcccaagtcttga

SEQ ID NO: 101700 - DNA, 246 bp, Enterobacter aerogenes
atgacacacctgaaactcacccccgctgaagagaagcgtctggcggacgcctttgtcgcccaggcgctggccatgggcctgaaagggaataaatcactgccaaaggcggtaaaacagcaggtgcgggaaagggtgcttcgcgccattcaggacgaacgtgaatccaggctggcgaagaaaatgcgccgggagaagtatgaggcggcggaagacaccttcacctggcagccgcagcgccggcgttga

SEQ ID NO: 101701 - DNA, 258 bp, Enterobacter aerogenes
atgggacttaaattagatttaacctggtttgataagaaaactgaagagtttaaaggggaagagtattctaaagactttggtgatgatggttctgtcattgaaagtctggggatgcctttaaaggataatattaacaatggttgttttgatgtgaaaaatgagtgggtttcattattgcaaccctactttaaacataaaatcaatctttctgatagttcatattttgtttcatttgattatcgggatggcaactggtaa

SEQ ID NO: 101702 - DNA, 537 bp, Enterobacter aerogenes
atgaaaaaagtatatacagcaatcatattaatagtactcttatgtggtggtgttttatctgccaactacatttttcttcaaaggcacatgaatgaggttctgaaagaagatccaaggaatgatggtattagcgtttgggtttattataagtggtttgtaaactcttccgagattaattatgaccttcgttctgtttctgcagaaaatagttcactggatgttagtagggtgatgctgcaatttgctgaaaaagtgaaagattatgattttagtaaggtttatcttagttacagagggaaagataagttttacttaaaaggagagtattttaaaactcttgggcaggaatatggtattcaaaaccccgtatatacattaagaacaattccggaaaacgtgtatatgttaaatggagagagagcttatagtgtttgggagggtgggcttctgggtgtaatgggaaaacagatggaagatcttagtgatttctctaaggcttggtacttagatgatttcattaaaagcatgagcgattaa

SEQ ID NO: 101703 - DNA, 237 bp, Enterobacter aerogenes
atgaaacgactgataaacctgacgcctgccgagaaaagatttctcgacgatgctgttgccgccgctgagagagcgtcaggcaagaagctgaatcagcccaacaggcacattgtccttaacagggctcgtgcacagatcgaatcgcagcgccaggcagaacggcagcgatctgcgcgtgaggaggagcggcagcaggcggaatttacctggtcgcgtccgcgggcgccgcgtcgctga

SEQ ID NO: 101704 - DNA, 213 bp, Enterobacter aerogenes
atgagaaggcggggaaaagcagtgtggggggataaaattcagaataaaaaaaacctgcgcatccgcgcaggccggtgcaagataatcagtacgaagtgcgtacttaagaaactcaccaatcaatacctctgggatagccagagtatcaatgcatcactcaacgaaaccagcgaacattcgcaacagctaatcgcaaagtgtaagcaaagatga

SEQ ID NO: 101705 - DNA, 429 bp, Enterobacter aerogenes
atgtataaaactatcattatgtcggttgatgtctttgaaatggagctgagcgacaaggctgtccgccatgcagagtttctcgcccaacaggacggtattattcatttacttcacgtcttacccggttcatccagcttcaccatgagccgttttaccgccgatctgcgccgctttgaagagcatttgcagcatgaagcggaaacccgcttgcagaccatggtcggccacttcagcatcgacccttcacgcatcaagagccatgtgcgtttcggcaacgtccgcgatatggttaatgaactggccaatgaaatcaaagctgacgtggtagtcattggttcacgtaatccgtcgatcagcacccatttgctgggttcaaacgcctcaagcgtgattcgtcatgcccatattccggtaatggtcgtgagataa

SEQ ID NO: 101706 - DNA, 1224 bp, Enterobacter aerogenes; identical to SEQ ID NO: 86938

SEQ ID NO: 101707 - DNA, 1719 bp, Enterobacter aerogenes; identical to SEQ ID NO: 97712

SEQ ID NO: 101708 - DNA, 543 bp, Enterobacter aerogenes; identical to SEQ ID NO: 90161

SEQ ID NO: 101709 - DNA, 594 bp, Enterobacter aerogenes; identical to SEQ ID NO: 90545

SEQ ID NO: 101710 - DNA, 1008 bp, Enterobacter aerogenes
gtgatattcgcctggtttatcgttgccgatatctggatcccgctaaccccggattccaccgtgatgcgcgtggtgactccggtctcgtcgcgggtctccggctacgtctcgcacgtctacgtgcacaacaatagccaggtgaaaaaaggcgacctgctgtatgagctcgatcccacgccattcattaataaagttgaagcggcgcaaatcgcccttgaacaggccaaactgagtaaccagcagctggatgcgcaaatcgccgccgctcgcgccaacctgcgcaccgcgcagtacaccgcgcgtaatgacaaagtcactctcgaccgctaccagcgcctgagcaccatgcaaaacgtgtcgcaatcggatctcgataaggtgcgcacgacatggcagaccagcgaacaatcggtcagcgccctgaatgcgcagattcagaacctgctgatccagcgcggcgagcgcgacgacaagcgcaacgtgacgctgcagaaatatcgcaacgcgctggaagaggcgcagctcaacctcggctggacccaggtgcgcgctgagaccgacggtatggtcagcaacctgcagcttaatccgggaatttacgccaccgccgctaccgccgtgctggcgttggttaacaacaataccgatatcgtcgccgactttcgtgaaaaaagcctgcgccatacggcggtgaataccgatgcggcggtggttttcgatgccctgccgggtaaagtcttcccggcgcacgtgaccagcagcgacgccggtattcttgccggtcaggaagcggtgaatggccaactgtcgcagcctgagcagtctacccgctgggtgcgcgatgcgcagcgcatgcggattcacgtcgcgctggatcaacctctggataagccgctgccgaccggcgcccgcgccaccgtccagttgtacaatagcgacggccccttcgcccgcacctttgccggcctgcagatccacctggtgagctggttgcactatgtctattaa

SEQ ID NO: 101711 - DNA, 1698 bp, Enterobacter aerogenes
atgcacgatatatttaatatgctgctggcggtttttgaccgcgcggcattaatgctcatttgcctcttttttcttatccgcttacgcctgttccgcgaactgctgcataaatcggcgcatacgcctcgcgagctgctggcggtcaccgccattttctccatgtttgcgctgttcagcacctggtccggcgttccggtagagggttcgctggtcaacgtacggattatcgcggtgatgtccggcgggatcctgtttgggccgtgggtcggcgcgattgtcggcgtgattgccggggtacaccgctatctcattgatattgatggtgtaacagccatcccctgctttatcaccagcattgtcgccgggctactttccgggcttattaatcgcaaaattccgaaagcccagcgctggaaggtggggattctggccgggatgctgtgcgaaacgctaaccatgatcctcgtggtgctgtgggcgccgacgctggcgctggggatcgatattgtctccaaaatcggtattccgatgatccttggcagcatctgcatcggttttattgtgctgctggtccagagcgtggaaggcgagaaagaagccagcgcggcgcgccaggcaaaactggcgttggatatcgccaacaaaacgctgccgctgttccgccacgttaacagcgaatcgctgcgtcaggtttgcgatattattcgccgggacatcaatgccgatgcggtcgcgattaccaccactgaccgggtgctggcctatgttggttacggggaaaataactataacgatcgcaacaacgatatcagcccaaccactcgtcaagccattgaaagcgacaccatcatcattaaaaacaacgacgaagcctacagaacgccggagatccactccatgctggtcattccgctacgtgagaaaggcgtggtgaccggcacgttgaaaatttactactgccatgcgcatcgtattacctcctcgctgcaggagatggcgatcggcctgtcgcaaattatctccactcagcttgaagtctcgcgggccgaacaactacgagaaatggccaataaagcggaactgcgcgccctgcaaagtaaaattaatccccattttctgtttaatgcgcttaacgccatctcctcttccatccgcatgaatccggataccgcgcgacagttgattttcaatttgtcgcgttatttacgctataacattgagttaaaagatgacgagcagatcgacatcaagcgcgagctataccaaattaaggattatattgcgatcgagcaggcgcgattcggcgacaagctgacggtgatttatgatattgacgaggacgtcagctgcgtcatccccagcctgctcattcagccgctggttgaaaacgccatcgtccacggtattcaaccctgtcggggtaagggcgtggtgactatcgccatcaacgaatgcggaaaccgggtgcgcattagcgtacgggataccggtaacggtattgacccagcggtggtagcccgcgtcgaagccgacgagatgccgggcaatataattggtctgttgaatgttcatcatcgggtgaaactgctctacggcgaagggctgcatatccgccgcttgacgccgggaacggagattgcgttctacgtccccaaccagcacgccccggcgagtgaaccggtgtcgctgttgccatga

SEQ ID NO: 101712 - DNA, 525 bp, Enterobacter aerogenes
atggtcgccgtgtggtgtctgccgcgtctgcacgcgctcatccaccggctgaaaaatccggtgttaatgctgggaatcggtggttttttactggggatcctgggcgttatcggcggacatattacgctatttaaaggtctggacgaaatgcagcaactggcctccagccagacgcttggcgccggcgattttctgctcattgccgtggtgaaattggcggcgctggtgctggcgtccgcatgcggtttccgcggcgggcgtattttcccggcggtgtttgtcggcgtctcgttggggctaatgctgcatgctcacgttgaagcggtaccggccgccattaccatctcctgcgcgatcctcggcctggtgctggtcgttacccgcgacggctggctgagtctgtttatggcgtcagtagtggtgcctgacaccaccctgttgccgctgctttgtatcgtgatgctcccggcctggctactgctggccgggaagccgttgatgattgccaaacgccgcggcgattag

SEQ ID NO: 101713 - DNA, 993 bp, Enterobacter aerogenes; identical to SEQ ID NO: 90737

SEQ ID NO: 101714 - DNA, 543 bp, Enterobacter aerogenes
atgaacaatttacaaatagcgcctttcctgaccgaagctttcgctgtgaccttcacggcagattcaggactaataccattagacaggaaacggcttagggataagagatatggattatctgactttgacgcagatggatcgctgatttgtgctggtatcctcttgtcagaatcatcaccatcgatgatgactttggccgtcatcctatgtgcatcaaattcagtaaagaatattctatattctcgcagtccaaggacttcatcatcatcaagcttatcgattatagctttatcatcttcatcaattactgcaggtttaaagccatttccttgtgagacgctaattttttttcaagtgttcccaatcggtgaaactgcttgcctaacagatgggcgcaactctccggccatcttgttgataactgatatcaaaccttcgatggtatctttgtctttgtttccgagagcttcaatagccttctcaagtgcgtctttaaggtatttcatttcctctttcttctgcgcattttttgcgaagatataa

SEQ ID NO: 101715 - DNA, 1026 bp, Enterobacter aerogenes
atggcaaaaggtagcgtgttaacatacaggccggatgttgacggacttagagcaatagcagttatgtcagtactcttatatcacgcatttccaactatttttcgaagtggatatataggcgttgatattttttttgttatctcgggttttttaattacaacgataattcgcaaagaagtaatttcaggtaatttttcattattgccattttatcagaaaagaattcgcagaatttacccagcattaattataacattaattgggatattgtttttatcgtggtttttattatccacagatgaatacgtagtgactctaaagcatgtgattttttccagtatatttacggagaatttcctgctatggagcgaggatggttactttgataaggcttcaatatttaaacctactcttcacatctggagtctatccatagaagaacagttttatatattctggccattgattattacattgctggttaagaagaaatgcgaagttaaagggatactgatatttatcctggtttcttttttggtgaatatctatgatatatccaatcatcctgcagcagcctattactcgccgcttggtcgttcatgggaactaatggtcggtagtttgttttccgtaatctacacggatataaaaaacaaaaacaccaactttaaaggaaattctgcactggcagtatcggggttggtattagttatactgtccatttttctcatacccactcaaaaatacttccccggattttcagccatcccggtagtactcggttctgcgctaattattctctatggtgagaatacgatagtaagcagaattttatcaatgcgaaaagttgtatatgtaggcctgattagttatccgttgtatttggtacattggccactaatgagtttttcctcaattattattggccacgagtcgaataaagcaaacgcaatatgtctggtcatctcgtttgtgttggctatgctgatatatgttattgtcgagaaaccaataagcaaacaataa

SEQ ID NO: 101716 - DNA, 471 bp, Enterobacter aerogenes
atgaggcaatttctttatgctatctccttcgctgttgccctgttgccagctacattgtgtgctgctcagattcaggggaaggttattcgtgtacttgatggtgacaccattgaagtattgcaggagcaacaatctgtcagggttcgtctcctgaatatcgatgccccggaaaagaaacaaccctttggacgctggtcaaccaatcaacttaaatccctgctcgcaggacaacccgttaccgtctcttatacgcaaacagatcgctacgggcgagtcctgggacgagtggtgacagcgaacggcactgaagctaaccgctatatggtgcagtcaggcgcagcatgggtttacgagcgctacaacacagataactcactaccagctttgcagcgggtagcccaggaacaaaaacacggcctgtgggctgaaagtcatcctgtgccgccgtgggaatggcgacataacaagtaa

SEQ ID NO: 101717 - DNA, 393 bp, Enterobacter aerogenes
atgaacgattgtttaggttgtgggcatccatatccttctgatcattggatgtattatgtgagtgattctatcgaaaatccttttttctgggctttcatcattttgctggttgttattgccattctgattattcgctttgttgatgttgttaaagccaacatgcgtaaagccgatagaattgactcaatttatgaaatcataaaatgtacacaaggcggtattaacaagcgaattggtgaaaacagagagttacttcaactgattgaaaatcaagccccacaattgcttgataaaaacccatggataaatggctggattgattcgcaggaacaatatttgttagccattgctgaaatcgcacatatagatgttcggacacatagtcgaaggtaa

SEQ ID NO: 101718 - DNA, 234 bp, Enterobacter aerogenes
atgaattatgttgatattgccagggtatggcgtcagcacaaccaggaacacgctgattcgggcgtggttctgatttgggacgggaaggtgtattgctggaaaaatattctccgcgaccctcagcatgagcgccccggagtgatagcggtagatactgaagagaatgtgtttattgctgaaggtggcaatgaatatgacggcgcgaaatgctgggttgtctttcaggagtcctga

SEQ ID NO: 101719 - DNA, 261 bp, Enterobacter aerogenes
atggggcattacacaatcagaacgaatgacgacgaagatcaggccattaaaaaggcgcaggaagcgaccggacaggcatcagccagcaaaacctttatgacggctatccttgagcttcagcgcaacagagacgagatagagcagctcaggcgcgcactggcgcaggaacaagccaaaaataaagagctggttggatcagtgcagcaattcagaaacagcatgaatgttatgtttgaactggctggcaacaataaaagttaa

SEQ ID NO: 101720 - DNA, 483 bp, Enterobacter aerogenes
atgaataaattaagtgataaatcctcaaatcctgtttttacagtaattgctatcgtgatttttttcttcttccttcctgcaatcggcgcggcactggggactacgggagaaatttacattgaaggtctgcgtgaattaccatcttttggtgtgaaagctataattgttgcaatctggatgcttgtagtcgcatatctgatgtgccacttaatgaaagctaagaaagatttcattcgagtacctgcaattctgacgcttattggtgcagttctcctgcctctgacaagcagttttcagaatatgatgactatttcagatccagacgtttccaccagaacagacttttatgcaaagtctatagaagggctggaaacgattaaaaatggaattatgtttatagcacctgctttattatgtgcaatatcttcaatcattctggcagttggaatgataagtattttacgtaaacgttatcatctgtga

SEQ ID NO: 101721 - DNA, 354 bp, Enterobacter aerogenes
atgaaatatcagctcaaagaggttattaacgaaaaatatgctaaggctgttaacattttaaaggataacctcaaagaacactaccatgttttttatggtttgagattaagtgagattcttttccctgccagtgaatacggctctgatactttctttaatgagttcgaagcaataaatagtattacattgccattaattatttttgaaatgaatgaacgtaagcctgtagctatcatcggctttgagaaaatttcaggtgctgtttttgtcgaacaatttgacattagggtattggttattgatgacctgtctgaattactgactaatgaaacgctgaatttattataccactga

SEQ ID NO: 101722 - DNA, 873 bp, Enterobacter aerogenes
atgaggcttatcgtgaagacagtaacgggattaacgaaagttagacatagaaatgaagttggggtaactcttgcatccctttccctttcagcaaaaagagtgctttttctggctctttgccagattgatacaaaggaaatgttagatgatgatattttggaggttgatgctgactttttttcaaaagctacttctttagataaatatgcctcttatgcagctctgaaagagggagctaaagttctttcttcaactacgttagttttaaacagagatgatttaaaaaatttggctgatgaacttgggatactatcatctaagaataaaattcctgatcgcttggatttaaacctaacagaattctgtgcctattacgatcatcttgccactgtacggataaaattcacaaatacagctaagcgatatttctctaagttgattggttctgaaaatagatataccactcaggtcttgaaatcagttgtgttgttgaatagtgtaaactcaacaaacctttatcaagtcattaggaaatattacagtcagaatagttcaagaaaatcttttgatatatcagtggatgatttaaaagaggaaatggggctttatacaattgaggaaggggagaagaaatataagtatcctaaatactcattttttgttcgtgatgttatcaataaaagcattaatgaaataattgagaaaacggaaataaataagttatctttctctgttgttgggaaaaaaggaaggatggctcacatgcttagatttgagtttagtataaatgaaaaatccccatccttttcggaagatgatatggcatttttagaggagtttgacaaagtcgttccaccaaaaacgaataagtga

SEQ ID NO: 101723 - DNA, 528 bp, Enterobacter aerogenes
gtgcagctcatgccatcccatgacgcggtatcccttatcaccgtgttgccggagcagctgcaatcgccccttctgactgctgagtgggagtaccggctgggtgagatcgagcgtggcgagctggccccggaggatttcatggctgggattagtgccatgctcaaagaacttgtgggaacctatcaagctatcaagggaacggagtatttgttcagcccttcccacgaagtggtgggcaaatgcccccgctgtggcggagaggttgcagaaatgcaaaaaggcttcttctgtcagacagaatcttgcaaatttgcaatttggaaaaacaacaagtggtgggagatgaagcacaagcaacctaccaaagccatcgtaacggcactgctcaaagatggccgcgctcatgtgaggggcttgtactccgagaaaaccggcaagacctacgatgccactgtggtgttggcggatgatgggcagtacgccaacttcaagctggagtttgaccagcagaaaggtggcaaacgatga

SEQ ID NO: 101724 - DNA, 282 bp, Enterobacter aerogenes
atgaagctctcacgctatgaacaggaaaccatcatcctctacaaccaggccgaagccaccgccgaggtctatacccatgacccccggctgctggagaagctgcggcgactggcagagaaatacccggaccagattgtgaaaaaggaccgccagacctttctcgttcccaaacgctgtgtgtccgtccgggaaccttacagcgccgagcgccgtaaggcagccagtgaactggccaaggctgccggatacaggccgcccacccccaagaaaggcaatgagtaa

SEQ ID NO: 101725 - DNA, 3222 bp, Enterobacter aerogenes
atggctgaaagtgtctttgaggctgtcaagcagtccatcaccgtccgagaagcagcgcagatgtacggaatcgaggtcaaccggagcggcatggcctgttgtcccttccacgatgacaaaaatcccagcatgaagctgaacgaggaatatttttattgctttggctgcggagccaccggcgatgtgattgacttcacagcgaggctctacaatctgtcccccaaagaggccgccgagaagctggcccaggattttggcctggcttatgacagtcaggcccctccccggcgacgccatgtccgccagaaatccgaggcgcagaaattcaaggaggaccgagaccatgcctttcgtgtcctggccgactactttcatttgctccgcaagtgggaaacggactacacacccaaaacaccggaggaaaatccacatccccgattcatggaggcaatccagaaaaaggactatgtgggctatctgctggatttttttctggagaacagcccggaggagcaaaagctgtggattgccgaacatcaatcagaaatagccaaattggaaaggagagtgaaattcatggctgataagaccaccaatcgagaacggttacaagagatcacagcgggcattgaacagggtatcaaggaactgtttgagagcgagaagtatatgcgctatctgtccgtcatgtccaagttccaccgctactccgtcaacaacaccatgctcatctatatgcagcgcccggacgccaccctggtggccgggttcaacaagtggaaaaatcagtttgagcgccatgtgaaaaagggtgagcatggtatcaccatcattgcccccacgccctacaaaaagaagatcgaggaaatgaagcgcgacccggatactcatgcacccatcctggacgcggatggcaaggcggtcatggaggaaaaagaaattgaaatccccatgttccgtccggtgaaggtgttcgatgtgagccagacggacggaaagcccctgccagagctggcctccagcctgtccgggacggtgccgcactatgaggctttcatggaagctctgcgccgctcggctccggttcccatcgagtttgagccgatggccgagaacatggacggctatttctcctctgaccagcagcggatcgccatccgggaaggcatgagcgaggtgcagactgtttccgccgctgtccatgagaccgcgcacagtaagctccacgaccccaaaaagtacgaagcggagccgacctggaagatcgtgatggtgagcgagggcggcaccaagcatgacttccgtctggacttcgccaccgaagcagaggcggaacaggccgccgccgaggaaggctggcgctatgtggacgagaatcggtttgagtggcggttggaagtggaggaagatctgacggcggtgaaacaggccgccaagaaccgcaacaccgaggaagtggaggccgagagcatttcttatgcggtttgccagtatttcggcatccagaccggcgagaacagttttggctacatcgcttcctggtcgaaggacaaggagctgaaggagctgcgggccagtctggagaccatcaacaagacttcctgcgagctgattaacgacatcgagcgcaactacaaggaaatctgcaaggagcgcggcattgacctgactgccgccacggaaccgcagcaggactctatcgagcagctggcagcagacatcgaccagttcactttcgattatgacccttatgagtatcggaacaatgcagatagccgtgaggacgcactgcacgaactgactgccacactccgaagcggagatgccagcggtgtacgcgaatggctccagaatatcgtgaacgaggatgaaccggatgaaaccacccaaaaagctgccgagcttatgggacgcttggatcagctggtgccgatgactgaaccggaacagctgaccgagccggaaaataccgaaagtgtccagcccagcgccgagtaccgggaggccctgttggtgctggatgataccagctaccttcatgttcagccctgcgacaccggctgggactacacgctctacgatgtggcaaccatgaagcagatggacggcggccagttggacgggccggatatgggccgttccacagcggttagccatatctgcgaggacctggggatgggcggcaagtccatcaagtatgcgccgctgtccatgatcgagactttgcaggaggcggcttaccaccagatgcaggaacaggtcagccagcagaccacagaagctgccgccacccagctgccggatgcccaggagcaggcgttggacgagtatcccatgccggacccggcactgactcaggatgatctggagaaatgcggctacctggacggtgaccttctgcccctctccaaagagcgagcctatgagctgatggagcgagacctgaccgtttatatcgtccaggagggtgaaaacccggaaatggcctttgacactgccgacctggacgcccatgacggtatctttgctgtgtcccgcgaggaatgggagcaaagcccggactttcacgaaaaagttttggaacgacaggatcggcagttggaacgggaacaggcgtttctttcccatgagggaaattgttttgctatttatcaggtgagcaaggatgacccgcagaatgtgcgttttatgaatctggattggctgcaatcgcacaatctgtccgtagagcggagtaactatgaccttatctataccgcccctctggacggttccggcagcactatggagcagctggaaaggctgtatgagcagttcaatctgcaaaagccggtggattttcacagcccgtctatgagcgtcagtgacatcgttgccatcaagcagaatggtcaggtatcctgtcattactgcgacagcttcggctttcagcaggttcccggattcctgccggacaatccgctgaaaaatgcggagatgatgttggaggatgattacggtatgatcgacggcatcatcaacaacggccccaaagagccgacagtggcccagctggaacagcaggcccgcagcggccagccgatctctctcatggatttggctgctgccgcccaccgggaggaccgggaaaagaaaaagtccgtcatggagcagctgaaaagccagcccaaggcggaacacaaaaaggcagcgcccaaaaagagcgcggaaagggagatttga

SEQ ID NO: 101726 - DNA, 216 bp, Enterobacter aerogenes
atgggaaacttcacttttgaggaaacgaacctgctttgtatctacaacaccggaagccgcaccgggctgatcgacgccctgacggagatgcgcggcgagctttcgccggaggaagtcgagctgcgggagctgaccgacagcgcccttatgaagctccgggccatgagcgacgccgagtttgccgagctggagctgtacccggatttcgacgagtaa

SEQ ID NO: 101727 - DNA, 1125 bp, Enterobacter aerogenes
  misc_feature (808)..(817): n is a, c, g, or t
atgccatccaaagctgaattttaccgacagatggccgagcaggtatcgacccggcttgtgggcagctggaaggaatggacggcctttctcacgactgccgcccgcctctacaaatatccgttccatgaacagatgatgatttacgcccagcgcccggacgccaccgcctgcgccgagtacgacctgtggaatgagaaaatgggccggtatgtgcgccgtggctccaagggtattgccctggtggacgattccggcgacaggccccggctgcgctatgtgttcgatatttccgacaccgggacccgtgaacattcccgtaccccctggctgtggcagctggaggaacagcacatcgggcctgtgtcggccatgctggaacgcaactacggcgttgccggtgacgatcttgcccagcagcttattgatgtggccggaaagctggccagtgagtattgggacgagcatcagcaggacttccgctatatcgttgacggttcgttcctggaggagtacgatgaactcaacatcgaagtccaattcaagtccgccgccaccgtcagcatcgcctacgccctgatgtcccgctgtgggctggatacggagcaatatttccagcatgaggacttcatgccgattttcgatttcaataccccggccacggttggggcgttgggagcggcggtcagtcagatgaaccagcaggtgctgcggcagatcggcgtcaccatccagaattatgagcgcgaacaactcgcggaaaggagcaaccaccatgaagaacaacctgacttacacgcagaacggggannnnnnnnnnacctgagcctgagcgaacagccggagaagcccctgggcaagtacgggcggctgcggaaagcgtatctgaaggaacaccggcccctgatttacaaccaactgctgctgaccgagaagctgtacccgcacctcatcgagatcgacgagacggcgaacagccgtctggagcagatgatgccccagctggcggagtcggcgggcgcgacggaggagctgaaagcccgcgatccgatgcgctgggtgggcctgatgaacacctgcaaggcccaggccgaggagattctgatggcggagcttatcaacagctga

SEQ ID NO: 101728 - DNA, 3093 bp, Enterobacter aerogenes
  misc_feature (2929)..(2938): n is a, c, g, or t
gtgcaaacatcctctgctttttcttttgcccagaccgacatcgaccatgtgctgcggctgggaggcaacacggaccggcagcgtgaacgcattgtggcagcttttgaaaagcagaagtccaccgccgagatcgcagcctatctgcaaaacctctataccggcggcaacgggattggcagcattaccgcatggtatgccgaggacggcatccacctgtctcacggaaagtctgcccgttatgacaagtccgcccaggtcatttcctgggagagcgtcgccgagcgtatcggccagcttttgcagaccggccagtttgccaccaatgtggagctgtccgaggccgagggctatgaacgttccctccttgcggaaaagttctggaatctgtatcacgatttcagcgatgaagccagagaatccgggtatctgcccagccttgccaacaatctagggcgcggtttcccggaagaatccgcgtggcttaccgagcagttgaaaagcccggagttccgccagacccttgcagaagaatatgaagcattctggacggcctatcagcaggaccgggacttgctgcggttccactaccacaagccaaaggagatttggggaaacctgaaagatctgtccctgccccgcaccgcctttacctctcagatgacggaagtacctgcggtcaagcagtttatcaccgaggacgagatcgaggccgccatgaccagaggcagcggtgtttctggtgggaaaggccgcatttttgcctatttccaaaattcccacaccgataaagaaaaggtggatttcctccggcacgagtacggcattgggggccactcccatgccctgtcaggcgctgggggcagctgggaagatcatgacggaaagggcctgcactacaaaaaaggcggctgcccggatgtgcatttcacatgggagaaggttgccaagcggatcaccgatttgattcagaagggccgctatctcaccgaacaggaacaggaggagttcgacaaaatccaggcggaaaaggctctggccgaagaagatgccctgcaagcccagccgcccgacacggaacctgccgatgttctgcgggaggatgtgccggagcagcccattcccaccctccgggagctgcatgagcgatacaagcccatcgtgctggaggctgttacccaggacatcagataccggaacgcctgcggtcacagtgattatgaaaacgctatgatcgagtgtaatgctgctgtgcgccgcgccattcttgattcccacgatatagagctgatccgcctgttctccgatgtgccggaatttcgacagcggctgcaccgagaagtggcagacgaaacctatcccaagctccatgagctgctgcgccctctctcggacaatgacattgaccgggctatccaggagtggaacggcaggatcgagagcaaacacgccgttgtccgctacatgaaagaccatgcacgggagaaagacaccgccgcgtggctggcccatgagtttgacggcggcgacggcaaaactccgtttgcggttcgcccggaaagccccgaaggaacggcgcttccttggcccaaggtacagcgccggattgcccagctcatcaaggaggatcgcttctacacccaggtcgaacaggacaatctggacgatgtggaccccatcgccatccgggagaccctggcccagcgcggcattgtggacggtcatgtggtggacccggaaaagctggacaacgatccctttgttcagcagatcatgcgggatgtggaggccatatccagggagaccgcccaagcagaccagccggaacagccttcctccggcaattcgcgtgttcccgtgtcagacgaagaatacgctgcggcccgtggcacggtccgggagcggacttcctatgatccaacagtccctccctaccatgtgggggatattgtctatctggatgaccgcgctcaccagatcacagagctgcgggatgacaccgtggagctgctgcccaccggcatgagctaccccatctaccgggccgagcgtcaggaacagtttgagcagcttcttcgggcagataaccgcaacgacttctataccgagtttcttccggcaaacccggatgcggtggaccaggacctgcgggatgtgctggcccacggcctgatcggtgaggcggacaaggcggagctttcccaactgctgcacaacggcaagagcaaccgggaggtggccctgtggttgagccgcgcctatcccaacattgtggaaacgatggaactggagaccggcgacaccgccgattaccgcacgatgcctgaaggtatcgagctggaagtgctggacgcagaggaaaagcgtctggctatgctgttcttccgctgggatgaggttgcgcctttgctgcgcgggctgtatgcccgtcagctggacggttttggacaggaacgcccggaaccggctgccgaaaccccggcttatcacgccgagacggtggctgtctatccgggcgacaagaaccatctgccctatgatgtggtggttcagaccctgcggaccgatgaaccggagcctcccgcacctgccatcgaaccggaaaagaccctggatgaagtgctggacgaacatcccatttccatccaggtcaatggcgagtggcagaccttccccaatgccagggctgccgaggaagccgcctatggggagtacaaggagaacttgcgccgcaccgccgagaatttccacatcacggacgatcatctgggcgaaggcggccccaaggccaagttccaggccaatgtcgaggcaatcaagctgctgaaatacctggagaaaaccaccgggcaggcaacgccggagcagcagcaagtcctctctcggtatgtgggctggggcggccttgccgacgcctttgaccctgacaagnnnnnnnnnngacaaggaaagctggagcaaggaatatgcccagctgaaggagctgctgaccccggaggaatacgctgccgccagagggtccaccctcaatgctcattacaccagccccacggtgatccgagccatttacgaggctgtgggccgcatgggatttga

SEQ ID NO: 101729 - DNA, 2520 bp, Enterobacter aerogenes
  misc_feature (2183)..(2192): n is a, c, g, or t
atgggatttgagaccggcaccatcctggagccgtcctgcggcgtgggcaacttcttcggtatgctgccggaggaaatgcgaaatagccgtctgtacggcgtggagctggattccatcagcgggcgtattgcccagcagctctatcccaaggccgacatcaccgtggcaggcttcgagaccaccgacaggcgggacttctatgatctcgccatcggcaatgtgcctttcggccagtatcaggtccgggacaaagcctatgacaagctgaatttcagcattcacaactactttttcgccaaggctctggaccaggtgcgtcccggcggtgtggtggcttttgtgacttcccgttacacgatggacgccaaggattccagcgtgcgccggtatctggcccagcgcgccgagctgctgggggccatccgtctgcccaatgacgctttcaaaaagaacgcaggtgccgaggtcgtttcggacatcatcttcctccaaaaacgggaccgtccgctggacatcgtgccggagtggacgcagaccggccagaccgaggacggctttgccatcaaccgctatttcctggaccacccggaaatggtgctgggccgacaggaaccggaaagcaccgctcacggcatggactacaccgtgaaccccattgaggggctggagctggccgatcagctgcatgatgccgtgaagtacattcgcggcacctaccaggaggccgagctgccggagctgggcgagggcgaggccatcgacacctccatccccgccgaccccaatgtgaagaactactcctacaccgtggtggacggtgcagtgtatttccgggagaacagccgcatggtgcgccctgatctcaatgccaccgccgaggcccgtgtcaagggcatggtgaggctgcgggattgtgtccaggaactgattgacctgcaaatggacgccgccacaccggacagcgacatccgagagaaacaggcggagctgaaccggctctatgacgatttttccgctaagtacggccttatcaatgaccgggcaaaccggctggcctttgctgacgattccagctattatctgctttgcgcgctggagatcgtggacgaggatggcaggctggagcgcaaggcggatatgttcaccaagcggaccatcaagccccatgaggcggtgacttctgtggacaccgccagcgaagccctggccgtatccatcgcggaaaaggcccgtgtggatatggagtacatggaacagcttaccggcaagaccagcgacgagctggcctctgagctgcaaggcgtgatcttccgcctgcctgggccggtgccggagggagaacggcctgcctatgtgaccgccgacgaatacctgtccggcaatgtgcggcgcaagctgcgtcaggcacagcgggcgctggaggtcagcgagattttccgtcccaatgtggaggcgctggaaaaggcgcagcccaaagacctggacgcttcggagatcgaggtgcgcctgggcgctacctggatcgacaaagagtatatccagcagttcatgtatgagaccttcaacaccccgtactacctccagcgcgctatccaggtcaattatgcctctttcaccgccgaatggcaggtcacgggcaaaaactctgtatccgaaaaagatgtggcggcctacaccacctacggaaccagccgtgccaacgcctacaagattttggaggacagcctgaatctgcgggatgtccgcatttacgacaccgtggaggacgcggacggtaaggaacgccgggtactgaatgccaaagagaccaccctggcagcccaaaagcaacaggccattcgggaggctttccgcgattggatttggcgggacccggagcgccgccagaccctggtgcgccagtacaacgaggaaatgaactccacccggccccgtgaatacgacgggtcccacatcactttcggcggcatgaacccatccatcaccctgcgggatcaccagctgggcgctatcgctcatgtgctgtatggcggcaatacgctgttggcacacgaggtcggtgcgggcaaaacctttgaaatggtggccgctgcgatggaatccaagcgcctggggctgtgccagaagtccctctttgtggtgccaaaccacctgacggagcagtgggcttcggagtttctgcnnnnnnnnnnctgcggctctatccctccgccaaaatcctggtcacgaccaaaaaggactttgagacccataaccgaaagaagttttgcgcccgcattgccaccggcgactacgatgccgttattatcggccactcgcagtttgagcgtatccccatcagccgggagcgccaggaacggctcctctacgagcagatcgacgagattaccgaggggattgccgaggtgcaggccagcggcggcgagcgtttcacggtcaagcagctggaacggacccgcaaatccctggaggcgcggctggaaaagctccaggccgagggccgcaaggacgatgcggtga

SEQ ID NO: 101730 - DNA, 1221 bp, Enterobacter aerogenes
gtgactttcgagcagctgggtgtggaccgtctattcgtcgatgaagcacacaactacaagaacctgtttttatacaccaagatgcggaatgtggcgggcctctctaccagcgacgcccaaaagtccagcgatatgttcgcaaagtgccgctacatggacgagatcaccggcagccgaggggttatctttgccaccggcaccccggtcagtaactccatgaccgagctttacaccatgcagcggtatctccagtatgaccgcttgcaggaactgagcatgacccactttgactgctgggcgtcgcgctttggtgaaacgacgacggcgctggaactggcaccggaaggcaccggctaccgggcgcgcacccgcttctccaagtttttcaatctcccggagctgatgaacctgttcaaagaggtggcggacatcaaaaccgccgatcagctccatctgcccacgccggaggtggaataccacaacatcgtggcccagcctactgaacaccaaaaagagatggtgcaggttctctccgagcgcgcctccaaggtacacagcggcagcgttgacccatcggaggacaatatgctcaagatcaccggcgatggccgcaagttgggtctggaccagcgtatcatcaaccagctgctgccggatgaacccggcaccaaggtcaaccaatgtgtggcaaacatcatgcagatttggcgggacggcgaggccgacaagctgacccagctggtgttctgcgacatttccacgccccaggcggcccctgcgaaaaaggcggccaaggcgctggacaaccccacgctccatgcgctggagcaggctgtgccgctggacgagccggagccggtctttaccgtctatgaggacatccggcaaaagctcatcgcccaagggatgcccgccgatcagatcgcgttcatccatgaggccaacaccgaagtcagaaaaaaagagctgttcgccaaggtccgcaccggccaggtgcgtgtcctgctgggcagcaccgccaaaatgggcgctggcaccaatgtgcaggaccgcctggtggcgctccatgacctggactgcccgtggcgtccgggagaccttgcccagcgcaagggccgtatcgagcgccagggcaaccaaaatcccctggtccatgtgtaccgctatgtgactgagggaacctttgacgcttatttgtgggtgcgacacgaagtcgcataa

SEQ ID NO: 101731 - DNA, 1659 bp, Enterobacter aerogenes
atgaacgggaaaccgtgtgcatctcccggcattgcaacgtgctgggaagaaatagactggcaaaaagcacgggcgtatgtcaaaaagctgcaaatgcgtatcgtaaaggctcaaaaggaaggtcattacagcaaagtaaaatcgctgcaatggctgctgacacactcgttctacgccaaagccctggcggtaaagcgagtaacaagtaactcaggcaaaaggacatccggcgtagaccatgaattatggctgacgccacaggcaaaattcaacgcaatctcaaaactcaaccggcgggggtatcgcccccaaccgctcagacggcactatattcccaagaaaaacggaaaaatgcgaccactgagcatcccgaccatgaccgacagagccatgcagacactctacaaattttcactggaaccgatagcggaaacctatgccgaccccaactcctacggattcagaatcggcagaagcactcacgatgcaatcgagcagtgcttcaccgacctgaacaaaggaaaatccccgaaatggatactggagggcgacatcaagggctgcttcgaccacatcagtcaccaatggctgctggaaaacattccaatggacacgcagatccttgaaaagtggctgaaatgcggatatgtggaaacacagaaattattcccaacagacgagggtacaccgcaaggcggtacgatttctccgacgctgatgaatatgactctggatggtctggaacgcttgctccatgacagactcccgacccgtaaaaaggtcaatgggaaaacacactgcaacaagatgaatttcgtgcgatatgcggatgattttatcatcacaggagaatcgccggagtttctgcgtgaaaaggtgcttcccatcgtgagagagttcctgacagaaagaggattgcagctatctgaagaaaagacggttattacccacattggcgagggctttgacttcctgggcaaaaacatccgcaaatacaacggaaaactgctcatcaagccctgcaaatctgcggtgaaatccttcctgggcaaagtgcgggacatcattaagagcagcaaatccataaagcaggaaatcctgattcgtaggctcaacccggttatccgggggtgggtaaacaatcagagatatgttgtttcttccaaggtgttcagcacggttgactatgagatatacaaatgcttgtggcaatgggccaagcgcaggcacaagaaaaagagccgcaaatggattgccaggaaatactggcacgacatcgactctcgccagtggacattctctgttccctatgaaaaccagggcacggagggcaaaccgctctattgcaaactcgaatatgcaaccgatacgaaaatcatacgatttaagaaaatcgtggcggaagcaaatccgtttgatgaatattggacggactatttcgaggaacgagagggcgaaaagctgctcaacagcaccaagggacgggaaaagctgctgacgatctggcggcggcaaggccgccgctgccctgtctgcggggaccttatcacctcagaaaccggcttcaaagtgcataccccagccggaaagagcagccggaaaatcatggtacacaaggaatgccacgaagaaaattcacagcctgattactgcttttga

SEQ ID NO: 101732 - DNA, 912 bp, Enterobacter aerogenes
atgggcagcaatgtccatctcttacccgaccagacggtggagaacaagcagaaatttatcagccagattatgacctctaaatcgcctgtgagaagctgcgacgatgtggacgaaacggcgctgtcctttgccgagatcaaggccctgtgcgccggagaccctcgtatcaaggagcgcatggacctggatgtggaggtctccaagctgaagctgatgaaagccgaccaccagagcaagcagtatcgtctggaggaccaactgctgaaatacttcccggaggaaatcgaaaagcacaagggcttcatccagggctttgaagcagacctggagaccctggccgcccacccccacccggaggacggctttgccggtatggaaatccggggcgataccctgacggacaaggagaacgccggtgccgccctgctggatgcctgcaaggaggtcaaaggctccgagcctgtgcagatcggcagctaccggggattcactatgtccgtggagttttcggcctggaaacaggaatatacgctcctgctgaaaggccagatgacccaccgggcaagcctcggcacagacccacgcggcaatctcacccgtatcgacaatgcgctctctcagatgtcgcagcgtctggaggcgaccaaggcccagctggacaatctgtaccagcagcaggccgccgccaaggaggaagtgggcaagcctttcccctatgaggatgatctgcgggtaaagtccgcccgcctggtagagctggacacacttctgaacctggatggcagaggccgttctcagccggagtccgtgatcgccaagagcgcacggccctcggtgctggacagcttgaagcgcccggtgccgccccgaagccccgaaaagaaaccgaagcagcatgaggaggtgcgataa

SEQ ID NO: 101733 - DNA, 1065 bp, Enterobacter aerogenes
atgaaacccaacgatctgaatacggctctctatgagaagatgaccgccgaacaggacaaattccgggactggctgaaaagccagcccccggcagaggtcctgaaccacgcctatgagtacactgtccgggaggacatcgtgatggcgatggaggagctggagctgactgacgcccaggcccaggcgctgctggattcgcccacgcccctggccgatgtgtaccactactttgagaaggtggagaccgaccacatggatgtggttcgggactgtatcgaaatcagggccgatgatgtgtgcaggacccaggcggagctgcggaaagccgccatttaccctcactccgctgcctatgcgaaagagcatggggagctggagcagtaccgggcttccaataacgccaatctccaatgcaaagaggccattgaagcagcggtacgggaacatttcgacgggatgtatctcagtcacgacgccgccaagggcgtgattgagacctacggtatggaccgggtcatgctggtccttgccaacaccgtccagctccaggactgggatgggcgctactcgccccgcaacaaggaatgggcaaagaccatccccaactataactccgataccgtccgggttggctatgcggtaaacagccaccccgccgtactgaatggctttattgatctggtgcgcgaggaacatctgcgccgccagcccttgacggcagaggacatccaggcagaggcggaacggattttgcgggagctgcgcgcgccggatgtgccgaacagcccccacggaacccattacatggcccgcatttccccggagtttttgaaccgtgccgggagcaaagaccatgaccggctgatgaatctcctgccgtttcgcagtctggcgtttaccggcatgaaagggatgcccggaacctatgccaccatcctggccagcgaggatcgctccaaggagctgcgccagccccggccttctgtccgggagcatttgaagcaggaaccgaaacaggcagcccccaaagctccgggccataagaaacgggagccggaacggtga

SEQ ID NO: 101734 - DNA, 345 bp, Enterobacter aerogenes
gtgagcgccccgaagcgcaagcgggatgtccaggtgaatttccgggtctccccggaggagctggcgctgatcgagcagaaaatgtcacaagttgggacaaagaaccgggaagcctatctgcggaagatggccctggacggttatgtggtgcagctggatttaccggagctgaaggagctggtatccctgctgcgccggagcagcaataacttaaaccagctgacccgtaaggtacatgaaaccgggcgtgtctatgacgctgacctggaggatattgcccagcggcaggaacagctatgggagggcgtgaaggaaatcctaacccagctttccaggctttcgtaa

SEQ ID NO: 101735 - DNA, 216 bp, Enterobacter aerogenes
atgggagggcgtgaaggaaatcctaacccagctttccaggctttcgtaacagggatatatgccccatctgcggagggaggaacggcgttcttttcgccgcgccttcctccgcttttttcttttgcctacatccttgtctttttgaaatgttggaaggataatatgggtagaaaacagattgccgcaaaggagttgagaatagatgaaaacctttga

SEQ ID NO: 101736 - DNA, 306 bp, Enterobacter aerogenes
atgaaaacctttgagaaggtgttggagatttttcgtgagtatttggactgtgatctggaggaagaagtcctcccttgtcgagaaggttatctccgcgtaacatggaatggtgattcccgctactgtgtggatggacttctcagccggacaccggacgaactattcgaggtgctgttatccgattatcgcaactatgaagaactgcggctgactaaaggatgccgagaagtgacggaagaagatgaaagacaggcagaaattctctgtcagagctttcgggaacgatggaaggaggaagaaaaatga

SEQ ID NO: 101737 - DNA, 312 bp, Enterobacter aerogenes
atgagggcgatctggttcattctgaaactgctgttgaagattttaatggctccggtgattctgtcgctgaccctgttcatctggatttgtgtggggattgtctatgtctccggtttggtgctggggcttatcagcatggtggttgctctgctgggtgtggcagttctgattacttactccttgcaaaacggcattatcctgctggtgatggcatttctcattagtccatatggtttgccaatggctgcaatctggctactgggcaaggtacaggacttgaaatttaccattcaagattttgtttatggataa

SEQ ID NO: 101738 - DNA, 240 bp, Enterobacter aerogenes
atgaaactaaatgaggcggtgagcaaacgtctttctgaattactggatgaaagaaatatgacgcagtatcagctgtatatgaaaagcggtgttcccaagtctacgattggaaatgtcatcaactgttcgtatgattcggttaagctgcggatcattcacgaaatgtgtcaaggaatggggattgggatagataccttttttgcatcgccgctttttcaagaagataacctggaaccataa

SEQ ID NO: 101739 - DNA, 1404 bp, Enterobacter aerogenes
atggcaaccacacgcattatgccgctacacattggcaagggccggaccgagagccgtgccattagcgagattatcgactatgtggccaatccgcaaaagaccgaccacggcagacttatcaccggttatgagtgtgatagccgtgtagccgacgccgagtttatgctggcaaagcgccagtatattgccgccaccggacgggtccggggcgtggacgatgtaatcgcctaccatgttcgccaatctttctgccctggggagattaccccggaggaagccaaccggctcggtgtagaatttgccaagcggttcaccaagggcaaacacgcctttatcgtttgtacccacattgacaaggcccatgtccataatcatatcatttggagttcggtcaacctggactgtgaccggaagttccgcaacttttggggcagcacaaaagccgttcgtcgattgagcgacaccatctgcattgagaacggactgtccattgtcgagaacccaaagccccacggcaaaagttacgaccaatggctgggcgatcaggcgaagccctcccatcgggaattgctccgtgctgccattgacaacgctatggcacaaaagcctgctgacctggacgagctgctgaagctgctccgggaatctggctgtgaagtatccaagcgcggcaaatcctaccgtttgaagctccccggctggggcaaagtgtcccgcctggacagtctgggcgatggctacaccctggagcatctgctggctgtcctcgccggtcaaaaggagcatacaccccgtcagaaaccgggcaggcaggcagatccgccgaaggtcaatctgctggttgacatccaggcaaagctccaggccggaaaaggtgccgggtatgtgcggtgggccaaggtctttaatctgaaacagatggcacagaccgtgaattatctcacagagcataatctattggagtatgctgtgctggaggaaaaggctgcggcggccacggctcaccataatgagctatcagcaaaaattaaggcagcggagaaacgcatggcggagatcgccgtcctgcggacccatatcatcaactatgccaagactcgtgacacctatgtggcctaccgaaaagctggctactcaaagaaattccgcgaggaacatgaggaagaaattctgctccatcaggcggcaaaaaatgcctttgatgatatgggggtcaagaagctgcccaaagttaaggaactgcaagctgaatatgctcggctgctggaggaaaagaaaaagacttatgccgagtaccggcgctcccgtgaggaaatgcgggagctactggcggcaaaggccaatgtggatcggctcatgagcatggaagaagaaaagcagtcagaaaaggagcatgagcgataa

SEQ ID NO: 101740 - DNA, 363 bp, Enterobacter aerogenes
gtggacagtagatatattcaacaattcaagaaaggctctcttgaaatgattcttctctgtctgattgcaaagcgtgaaacctacggttatgaaattattcttgaattgaataataacggcgcttctgttctgggttatgcaaaagaaggaacagtttaccccattctttatagattacagcaagccgaactcattaagtgtagaattgcaccttcaacggcaaatggtggttcaaagaaatattattctcttacaggaaagggacgggaaaccttggaagaattattaaagttttgggatagttacacggagtgcgtaaacggttttattaaggggtacacccattcggagaaggctatatga

SEQ ID NO: 101741 - DNA, 822 bp, Enterobacter aerogenes
ttgaacacgcaaatcatcgccattgccaaccagaaaggcggcgttggcaagacaaccacctgcgcgaacctggggattgggttggcacaggccgggaagaaagtgctgctgatcgacggggacccgcaaggcagcctgaccatcagcctgggccacccccagccggacaagctgccctttaccctgtccgacgcgatgggccgtatcctgatggacgagccgctgcgccccggcgagggtatcctgcaccacccggagggcgttgacctgatgcccgccgacatccagctctccggcatggaggtctccctggtgaacgccatgagccgtgagaccatcctgcggcagtatctggacacgctcaagggacagtattcccatatcctgattgactgccagccttccctgggtatgctcacggtcaatgccctggccgccgccaacagggtcataatccccgtccaggcggagtatctgcccgccaagggcctggaacagctgctccagaccgtaaacaaggtgaagcggcagatcaatcccaagctccagatcgacggcatcctgctgacgatggtggacaaccgtaccaactttgccaaagagatcgctgccctgctgcgggagacctacggcagcaaaatcaaggtgttcggcaccgagattccccattctgtccgagccaaggagatcagcgccgagggcaagagcattttcgcccatgaccccaatggcaaggtggccgaggggtacaaaaatctgacccaggaggtgataaaacttgaaaagcagcgcgaaaaaagtagagctggctccatacgatga

SEQ ID NO: 101742 - DNA, 936 bp, Enterobacter aerogenes
ttgaaaagcagcgcgaaaaaagtagagctggctccatacgatgacttgttttccaccgaggaaagccgccaggatgccaagctggaaaaagtacgggaaatcccgctgtctgagctgcatcctttcaagaaccaccccttcaaagtcaaggatgacgaggccatgatggagaccgccgacagtgttcggcagtacggtgttctggttccggcgattgcccgcccggacccggagggcggctatgagctggtggccggtcacaggcggcaccgggccagtgagctggccgagaaagaaaccatgccggtcattgttcgggatctggatgatgatgccgccaccatcatcatggtggacagcaacttgcagcgggaaagcctgctccccagcgagagggcctttgcctacaagatgaagctggaggccatgaagcaccaaggtgagcgcatggatttaacttgttcccaagttgggaacaagtctgctggaaagaagtccagcgagcttttggctgaacaggtcggccagagtaaaaatcagattttccgctatatccgcctgacggagcttatccccgaactgctggatatggttgatgaaaagaaaattgcgctcaacccggcttatgagctgtctttcctcaaaaaagaggaacagcgggacttgctggacgcgatggacagcgaacaggctaccccttctctctcccaggcccagcggctcaagaaatacagccaggaggggcatttgaccctcgatatgatgcgcgtcatcatgggcgaggaaaagaaaagcgatctcgacaaagtgaccctttctgctgacatcctgcggaagtattttcccaagagctacacaccccagcggatgcaggagaccatcatcaagctgctggaggggtggcagaaaaagcgccagagagaccaggaacgatga

SEQ ID NO: 101743 - DNA, 273 bp, Enterobacter aerogenes
atgagggatatttcagcccgtgagctgaaaggacacaatattctcgccgtggagcgttttcaggacaacacccgttggatgatcgagttttccatcctgcgtccctgttcctacggcagccccggcgatgaaatgcggctgtttcttaccgaggacgggtatcaggccgccctcgtaagccagaagcgccgggaaatcaaaattaagcggtatgcccgtgtgatcgagggccatgtcctcgacttcaagccgggcaagcgccgccacccgtaa

SEQ ID NO: 101744 - DNA, 198 bp, Enterobacter aerogenes
atgaatatgtgtactgtccagagcatcaaggatgccatccgagaaaactgccagtcccaatatgacatggaatccaccgacattgaccgggttttgcagaccctcccgttttcggggcatgaatcgttgttcgaccagccgccgctgcccaagcgtccctaccggccccggaagaacacgaaaaccaagaacagctga

SEQ ID NO: 101745 - DNA, 894 bp, Enterobacter aerogenes
atggcggtctttcggattgaaagaacccgcgactatacggtaatgagcaatcatcacctgcggaaccatgaattgtcgctgaaggccaaggggctgctttccatgatgctgtccctgccggatgactggaattataccacccgtggccttgcgaaaatctgcaaggagggcgtggacgccatcggtaatgcgctgcgggagctggaaaccgccggttacatcgtgcgccaccagctgcgtgaccggcagggccggatcagcgacaccgagtatgtcatctatgagcagccccagccccggcagccggaaacgccccagccggatacggctgtaccggatacggcttcaccagatacggaaaacccgtatctggataaaccggatacggaaaagcccgcagaattaaatatagagaaatcaaatacccaaaaatcaattacccagggagtaagtaccgattccattcccttccgggagacggcggcagcacagctgccggaacggaaaggaagggatgcgatgtcactcacagagatggaaagttatcgggatttgattctggagaacatcgagtatgaccacctgtgccgggagtttaccacctaccgggaggacctggacgagattgttgagctgatggtggagaccgtctgcgccaagcggaaaaccacccggatcgctggcagcgacttcccccatgaggtggtccgctcccggtttttgaagctggacagctcccacatcgagtttgtcatggagtgcctgcggaacaataccaccgaaatccgcaacatgaagcagtatctgcttgcggtgctgttcaatgcgccgaccacgatcagcaatcactacaccgcacaagtcaaccacgatatgtacgcaggcggctggtaa

SEQ ID NO: 101746 - DNA, 363 bp, Enterobacter aerogenes
atgaaacgaccccttgcttacattacggctccctggagcaacagccagtatgagaacgccgagaacgctgcggcctactgccgccaggtgtacgacgccgggtattcgcccatctgcccggtgctgttcctgcctacttttctgaaggacgaaatcccccaggaacacaaggacgggttggatatggcgcgggactacctgcgccggtcccatgtgctggtggtctgcggccacggtatcgacgagactgtgaagaatgacattgccaccgccgagcgcctgcggatcaccgccaccaccctggacggcattttgacagtgaagggccaggggcgcgggaaaggaggcgcacgccatgcctga

SEQ ID NO: 101747 - DNA, 312 bp, Enterobacter aerogenes
atgcctgagcgtaagactgtgggccagctgatggaggaaatgcgcctcaaggccggggcgcagaactatcacggccatgattacatggatttggagcggtttgccgaggacacccggcacatgattattttcgatgtgctgacctatgattccccggtgggctggaaaggcgaacgaacccgcctgtttctgacggaggccggataccagaaaagcctggagaaccaggaaaagggccacatcaagattctcagccatgccaaggtgcgccagggccacctgtactatgaccgctccgaccagctgcgctga

SEQ ID NO: 101748 - DNA, 501 bp, Enterobacter aerogenes
atgcaggaggaagtggaaaacaggactttgacgctggcagtcagcggaacgaagttcaccgggcggctgttgaaagccgccatcaccaagtaccttgcccaccgcaaggaaaagaagctgcaaaagcagaaaagccgggatacccccgtgattccccacggcaagcagaccgtgaaacagctgatcgggcagaaccagggcgtttccaatatcgagatcaccgacccctccatcaaggagtttgatcggatcgcccggaagtacggcgtggactatgcggtgaaaaaagaccgcagcagctccccgcccaagtacctgatctttttcaaaggccgggacgcagatgccctgaccgctgcctttaccgagtacaccggcaaaaaggtcagaaaagcggagaaatccgagcgcccgtccgtgctggcaaagctgagccagttcaaagagctggtgaaacacgccgtcgtggaccggaacaagcggaaggagctggaacgatga

SEQ ID NO: 101749 - DNA, 1830 bp, Enterobacter aerogenes
atgaaaaagcagctggacatcaagaagctccttttgctgaacctgccctatatcctgatggggctgttcgccaccaacttcggtgaagcgtggcggatggccgcgggtgcggacgcttcggcaaaaatgctctcgttcttctccacgctgccggtggcgctggccagctggtggcccagcctgcaccccctggacctgctggtgggcctgtgctgcggagctggcctgcggctggcggtctatctcagaagcaagaacgccaagaagtatcgccacggcatggagtacgggtccgcccgatggggaacccatgaggacatcgcgccctacatcgacccggtgttccagaacaatgtgattctgacgaaaaccgagagcctgaccatgaacagccgccccaaggaccccaagaccgccagaaacaaaaatgtgctggtgatcggtggctccggttccggcaagacccgcttctggctgaaaccgaacctgatgcagatgcacagctcctatgtggtgacagaccccaaaggcaccatcctggtggagtgcggcaagatgctccagcggggcacccccaagctgggcaaggacggcaagcccatgaaggataagcgcggcaaggtcatctatgagccgtaccggatcaaagtcctcaacaccatcaacttcaaaaaaagtatgcactacaaccctttttcgtatattcacagcgagaaagacattttgaagctggtcacgacgctgatcgccaataccaagggagagggcaaggccggggacgatttttgggtcaaggcggagacgctgctgtactgcgcccttatcgggtatatccactacgaggctccggtggaggaacagaatttctccaccctcatcgagttcatcaacgcgatggaggtccgggaggatgacgaggagttcaagaacccggtggacctgatgtttgacgcgctggaggcggagaagcccaaccacttcgccgtccgccagtacaaaaagtacaagctggctgcgggcaaaactgcaaaatccattctgatttcctgcggtgcgcgcctcgccgtgttcgacattgcggaactgcgggaggtcacttcctacgacgagctggagctggacaccctgggagaccaaaaaaccgccctgttcctcattatgagcgacacggacgatagctttaacttcctgatctccatgtgctacacccagctgttcaatctgctctgcgaaaaagcggacgatgtgtacggcgggcggctcccggtccatgtgcggtgcctcattgacgagtgcgccaacatcggccagattcccaagctggagaaattggtcgccaccatccgcagtcgtgagatttccgcctgcctggtgctgcaagcacagtcccagcttaaagccatctacaaggacaacgccgataccatcatcggcaacatggatacctccatcttcctgggcggcaaggagccgaccaccctcaaagagctggccgctgtgctgggcaaggagaccatcgacacctacaacaccggggagagccgtgggcgggaaacctcccactctctcaactaccagaagctcggcaaagagcttatgagccaggatgaactggccgtcatggacggtggcaagtgcatcctccagctgcgtggtgtgcgtcctttcctctcggacaagtacgacatcaccaagcaccccaatttcaaatacacagccgatgcggaccccaaaaacgcctttgacattgaggcgtttctgtctactcggctgaaactcaagcccaatgaagtctacgatgtgtacgaagtagacgcggagggtgcgtaa

SEQ ID NO: 101750 - DNA, 219 bp, Enterobacter aerogenes
atggcatttttcaatcaggctatcaccgttcttcagaccctcgttatcgctctgggcgctggtctcggcatctggggtgtcatcaacctgctggaaggttacggcaacgacaaccccggtgcgaagtcccagggcatgaagcagctcatggctggcgctggcgtcgccgtggtcggcatggtcctcgtacccctgctctccagcctgttcaccgtctga

SEQ ID NO: 101751 - DNA, 870 bp, Enterobacter aerogenes
atggatttcttactcgatgcccttactgactggctcaaggaaatgttggtaggcggcattatgagcaacttatcggggatgttcgatagcgtgaaccagcaggtcgcagacattgcgacacaggtgggccagaccccccagggctggaacgggagtattttcagcatgatccaaaatctctccaactccatcatggtgccgattgctggcgtgatcttggctatcgtgatgacgctggagctgattcagatgattaccgacaagaacaacctgcatgatgtggacacctggatgatcttcaagtgggtgttcaaatctgccgctgccatcctcatcgtctcaaacacctggaacatcgtgatgggcgtgtttgacgcagctcaaagtgtggtggcgcaggcggcgggcatcatcggttccgacgcttccatcgacatctcctctgtcatgaccgatatggagtcccggctgatggatatggacctggggccgctgttcggcctgtggttccagtcgctctttatcggcattaccatgtgggcgctttacatttgtatctttatcgtgatttatggccgtatgattgagatttaccttgtgacctcggtggctcccatccctatggccaccatgatgggcaaggaatggggcggtatgggccagaactatctgcgctcgttgatcgccctgggcttccaggcatttctcatcatcgtctgtgtggcgatctacgccgtgctggtgcagagtattgccaccgaatccgacatcattatggccatctggagctgcgtgggctatacggtcctgttgtgctttacgctctttaagaccggcagcctcgcaaaatccgttttcaatgcacattaa

SEQ ID NO: 101752 - DNA, 2487 bp, Enterobacter aerogenes
  misc_feature (1269)..(1278): n is a, c, g, or t
atgacattgttcacggcaatcaaaagctggctgcaccggctgttcggaaaagacgaaaagaccgcgcagccggttaatcagaaaaagatgaaaaagctgtcccgtgccgacagaaagcagatcgaggctgccattgcccgtgccaatcgcacagacaaaaaggaaaaatcggctcaggacagcatcccctatgaacggatgtggccggatggtatctgccgcgtggcagacggccactacacaaagaccatccagttccaggacatcaactatcagctctcgcagaacgaggacaaggcggcgatcttcgagggctggtgcgatttcctcaactactttgacagctccattcagtttcagctgtcctttttgaacctcgcggcctctgaggagacctttgcccacgccatcaacattcctctccagggggatgattttgacagcatccgggtggagtacaccaccatgctgcaaaaccagctggcaagaggcaacaacggtcttatcaagaccaagtaccttactttcggcatcgacgccgacagcctcaaggccgccaagcctcgtctggagcgcattgagaccgacatcctgaacaacttcaagcgcctgggtgtggccgccgagaccctggacggcaaggcgcggctggcacagcttcacggtattttccacatggatgaacagctgccgttccgctttgaatgggagtggctggctccgtccgggctgtccaccaaggactttatcgcacccagctcttttgagtttcgcaccggcaaacagttccgtatgggtaaaaagtacggggctgtttcttttttgcagattctcgcgccggagctgaatgaccggatgctggcggattttctggacatggaatccagcctgattgtcagcctgcatatccagtccgtggaccagatcaaggccatcaagacggtcaagcggaaaatcaccgacctggaccgtagcaagattgaggaacagaaaaaggccgtccgcgccggatatgacatggacatcattccctccgaccttgccacctacggtgccgaggccaagaagctcttgcaggatttgcagagccgtaacgagcgaatgttccttgtgaccttcctggtgctgaacacggcagacaatccccggcagctgggcaacaatgtgttccaggccagctccatcgcacagaagtacaactgccagctgacccgactggacttccagcaggaagaagggttgatgtctgcgctgcccctgggccttaannnnnnnnnnggccttaatcagatcgagattcagcggggactgaccaccagctccacggccatctttgttccgttcaccacccaggagctttttcagaacggcaaagaggcgctgtactacgggatcaacgccctgtccaacaacctcatcatggtggaccgcaagctgctgaaaaaccccaacggcctgattctcggtacgccgggttccggcaagtccttcagcgccaagcgcgagatcgccaactgtttcctgctcaccaatgatgacatcatcatctgtgacccggaggccgagtatgcgcccctggtggagcgcctgcatgggcaggtcatcaagatttcgcctacctccaccaactacatcaacccaatggacttgaatctggactactcggacgatgaaagtccgctgtctctcaagtccgacttcatcttgtccctgtgtgaactgatcgtgggcggcaaagagggcttgcagccggtgcagaaaaccatcattgaccgttgtgtgcggctggtctatcagacctatctcaatgacccccgcccggagaatatgcccattttggaggacctttacaatctgctgcgggcgcaggaggaaaaagaggcacagtacatcgccacggcgctggaaatctatgtgaccggctccctcaatgtgttcaaccaccagagcaatgtggacatcaacaaccgcattgtctgctacgacatcaaggagctgggcaagcagctgaaaaagatcggtatgctggtggtccaggaccaagtgtggaaccgcgtcaccatcaatcgtgccgcccacaagtccacccgctactacatcgacgagatgcacctgctgctgaaagaggagcagaccgccgcttataccgtcgagatttggaagcgtttccgcaagtggggtggcattcccaccggcatcacgcagaatgtcaaagaccttttgagcagccgcgaggtggagaacatctttgagaactccgacttcgtgtatatgctcaaccaggcgggcggagaccggcagattctcgccaagcagctgggcatttccccgcaccagctttcctatgtgacccactccagcgagggcgagggcctgctgttctatggctccacgatcctgcctttcgtggatcacttcccgaagaataccgagctgtaccgcattatgaccaccaaaccccaggaactgaaaaaggaggatgaatga

SEQ ID NO: 101753 - DNA, 375 bp, Enterobacter aerogenes
atgaccatgaaacccaatactgaactgaacaccatgatgttttttgacgatgccctggagagtgagcgcacctatctgctcaccgagctggccgatgccgtcagcgagacccgcacggcggcggatcaggcagcggagctgaacgaagatggcgaagcgggcctgctgcgcctgacggaaatctggtgtgccatgaacggtgttcccgccatcgtcatcttcgagggcagccagtctgagctgctggccaatgtggtggcgcagatctacgcccatctgcttcagcaccccttccatgaccctgtggggctggccgtctgtgtggagctgcgctacatgacggacgccctcatgctgggtgaatggtttgaataa

SEQ ID NO: 101754 - DNA, 1743 bp, Enterobacter aerogenes
gtgaatggtttgaataaggaaccgcgcctgcgctttacagacgaggaacgggctgacccggcgctggagaagcccatccgcaaggtggacaaggccgccgccaaagcggataaggcgcaggctaaaattcccaaaaagcaggtccggcaaaagatggtagacccggagaccggtaaagtgaccaccaaactggtgctggaggacaagaagaagccgccctccaagctgtcccatgcggtgcgggatacccccgccaatgccgccctggggaaagttcacaaggaaatccgggagaccgaacaggacaatgtgggcgttgagagcgcccacaagtccgaggaggctgccgagaccggcgcacggctgatgcgggaaagctaccgcagccacaaactgaagccctaccgcaaggcagcccaggccgagcagaagctggaaaaggccaatgtaaacgccctgtatcagaagtccctgcgggaaaatccccagcttgccagcaaccccatttcccgctggcagcagaaacaagccatcaaaaaggaatacgctgccgccaagcgcgctggtcaagctgccgggaataccgcaagcacagcccaaaagaccggcaaggccgccaagacggtcaaggaaaaggcacagcaagcgggcgcgtttgtcatgcgccacaaaaagggctttctgattgctggcgcgatcttcctgctggtctgtatgctgctcaacaccatgtcctcctgctccatgatggcgcagagcatcggttctgtggtgtccggcaccacctatccgtcggatgacccggagctggtggcggtggaggcggactacgctgccaaggaagcggcgctgcaagccgagatcgacaacatcgaaagcagccatccggggtatgacgagtaccgctacgacctcgacatgatcgggcatgacccccatgagctggcggcctacctgtccgctgtcttgcagggctacacccgacagagcgcccaggcagaactggagcgtgtatttgatgcccagtatcagctgacgctcaccgaggaagttgaagtacgctatcggacggaaacccggactgacagcgagggcaatagctacaccgttcaggttccttacaactactacattctgaatgtgaagctcaccagcaagcccatttcgtccgttgcctcggagctgttgaccccggaacagctggagatgtaccaggtgtaccggcagacgctgggcaacaggccgctgattttcggcggtggttcctccgacaccagcgattccgagagtttagctggtgttgagttcgtcaacggcacccgccccggcaatcaggccgtggtggatatagcgaaaagtcaggtgggcaatgtgggcggtcagccctactggagctggtacggcttcaattcccgtgtggaatggtgcgcctgcttcgtgtcctggtgctacggccagatggggctgtctgagccgcgttttgccgcctgccagtctcagggcatcccgtggttccaatcccacggacaatggggcgggcgtgattacgccaatattgcccccggcgacgccatcttcttcgattgggacctggatggcagcgccgaccatgtgggtctcgtagtcggcacagacggcagccgagtttatacggtcgagggtaacagcggcgacgcctgcaagatcaagagttattccctgtcctacgagtgcatcaagggctacggcctgatgaactggtaa

SEQ ID NO: 101755 - DNA, 258 bp, Enterobacter aerogenes
atggctaagaacaaaatccagcgcattgaccaggagattgccaaggtccgcgagaagatcgcggagtaccaggataagctgaaaaccctggaggcgcagaaaaccgaggcggagaacctggagatcgtccagatggtgcgcgccctgcggctgaccccggagcagctgaacgccatgctctccggcggtacggtccctggcatggccgctgcctccgccaactacaacgaacaggaggacaccgatcatgaagaataa

SEQ ID NO: 101756 - DNA, 774 bp, Enterobacter aerogenes
atgaagaataagagaattttcaagaccttttcgaccctctgcgccgccttggtgctgatgatgggcctttccgtgaccgcctttgcccaggggacggaccagcctccggcggaggacgccacaaacgacgccaatgtggtggtggaggaaaccgaggacagtccggctctgaccccggatggcaacgccgccctggtggatgatttcggcggcaacaaacagcttatcaccgtcaccaccaaggcgggcaactatttctatatcctcattgaccgggccaacgaggacaaggaaaccgctgtccacttcttgaaccaggtggacgaggcggacctgatggcgttgatggaggacggtcagaccacccaggagcagcccgccacctgtacctgtacggagaaatgtgtggccggtgcggtgaatacggcctgcccggtgtgtgccaccaatatgagcgcctgcacgggtaaggagccggaaccggagaccccggaagaaaccccggaaccggaagaaccggcgcagaaacccgcaggactgaatccggccattcttttggcggtgctggctctgatgggtggcggcggcgcttttgcctactttaagctggtaaaaagcagacccaagaccaagggcaacgacaatttggacgattatgactacggcgaggatgataccgatcaggaggacgaggactcctgggagaccgaggaatctgacgagccggacgctgacgggggcggcgacgaggaaagcgaggacaagacggtttga

SEQ ID NO: 101757 - DNA, 459 bp, Enterobacter aerogenes
ttgctgggcggtgaaccccagcagccggttggcgtcccgttggagggtggtcaggtcatagagggcgggcggcttctcggatttgtttttgcgccccacttttttcactgtggcagccgcaccttggcaggccgttttcagctgttgggcggcagccttgtctgccatgcgctccccggaaacggtgaaaccgggcagctccagtgtgaccgtgtagaatggcaccggcttgaaggtgtcgatctcggcttctcgctggacaatgagggccagcgtcggggacatgacacgtccgatgttgagggtccggtggtacagcacggaaaacagccgggtggcattgatacccaccagccagtccgctttggcgcggcagagggccgcatcccgcaggccgtcatagtctgcaccggggcgcaggtttgcaaagccctcccggatggcggaatcctccattga

SEQ ID NO: 101758 - DNA, 570 bp, Enterobacter aerogenes
atggcattcaaagcatcctgtgctgtgagcttgccctccagcattctcttgcgaagatcccctatggaaatgccaagtccggtagcaatctgccttgcaagttcaggcatttgttcaagaatagagttgaactcttccgcgcgaacgataccgccagagattgactgtccaaattgccttaaagcattcgccatttcctctgtcgaagacgcacctatggttccgatcttctgcaaagttgaggttagccccaaaatctgggaatttgttgcgcctgtttcttttaatgctgtagttaacgactcccaaaggcgctccgtctctgacaggctattacccgtttgtgacgctatagcagaaagagccgctaatgtttcttttgctacatcaatgcttgggctcaatcgtgtaatgcgcgcttggagagtgaccatttcgtcgccaatggcaatcagtcttttcgcggcatcaatcgtaaaagcggcagctattgcaacaccgactttgttgagcgcgccttcgaatctcccaacagatctcgatgattgctcgaatttggcatccatctga

SEQ ID NO: 101759 - DNA, 429 bp, Enterobacter aerogenes
atgcacaaaatcaatcttcgggagctgtatcccgatatgtataagacggacacatttttggaagtgacagatgaggtacaggcggtgttcctgtccgataaacgagcggaagccgcacatgagcgtcagatgtatcgctacaaggcgcaatactctctggattgcgacaatggtattgaggacgctgttgtacatcgttctccgaccccggaagaagtcctggaggacaaacagttgcgcgatcagatcttcactgcggtgatggaactgccggacaagcaggccaaacggatctatgctcggttctacttggatatgagcgtgaaggagattgcccaagtcgaaggcgttgacccgcgccgtgtgcgtgacagtatccatcttggcttaaaaaaactggaaaaagttttttctcaagcgtccgaataa

SEQ ID NO: 101760 - DNA, 228 bp, Enterobacter aerogenes
atggtatctgactttgaaaagaaaggactgcacccaaatgatgccttgttgttgttaacagcaaatggacgcagcctttcagattatatccgttgctttcgtcacatttgccacgcgcccctgacgatagggacattcctggtctccgctggcgcggctgtcataactccgcagcgtcgttttactcgtgcgccgcagggttccccccaagtctttaggaggccgtga

SEQ ID NO: 101761 - DNA, 225 bp, Enterobacter aerogenes
atgaaccagttgacacaaacctgtccacaatcagcaaccgatgaattggttgacatccgtgaagttgcggtagataaagaccttcccaaagaggaacggatcgcggcctttcttcaccaaatcaaaaatccctatcgctttcgctgcggtgattttgtggtaaacgccgcatttgccagcaatggggtcacattggaggaatgcctgcaagggattttaaggtaa

SEQ ID NO: 101762 - DNA, 1602 bp, Enterobacter aerogenes
atgccaaaatatcaggcaacagcttacattcgtctgtcttacacagatgatcgctccagcgagagcgacagcgttaccaaccagcggaagctgattgagaacttcattgaacgaaacccggacatccaaatcgtatccgaaaaaatcgacgatggttacagtggtatcatttttgaccgtccggcgttcaaggaaatgatgcaggacatcaccgatggcaagatcaactgcgtcattgtaaaggacctctcccgcctgggacgagagtacattgaaaccggacgctatctgcgccgagtgttccccacttatggggtccgctttattgccatcacggataacatcgacaccgcccatgaaggcagcggtgatgatctgaccgtatccgtcaagaacattatgaacgaagcctattgccgggatatttccatcaagacccgtacctctttggatataaagcggcgtaacggagattttgttggagcctttcccgtttacggctatatgaaatctgaggaaaacaaaaacctgcttgtacctgacccctttcgtatgcgcctagatgggacaagcgccctgcggatcgccaccgtgctgaacgaaatgggcatcctctcccctctggcctataagaaaaataatggttttccttatgccaaacacggctatgccgacaaagaggattgcaagtggtctgctacaacgattattcgtattttgcaggatgaaacctacatcggcacattggtacaggggaagcaaggcaccccacactacaaaatcaagcagatggagcagcggccatcctctgagtggattcgcgtccctgacgcccatgaaccgctgattgccaagcaggattttgaactggtccagcgtatccgcagactggatactcggacttctcccaagcaggatacagtgtatctgttttccggcgtcttgatctgcgggtgctgtgggagccgcatgacgcgaaaaacaaaccgggtcaagggcaaggaatatcactattattattgccccaccgggaaaaagcatggctgcaccaacccggtaatgctcaaggaaagcgatcttgtagagtgcgtcaaggacagtctgaaaggctacatcgacaatgtgagctgtctgcaagctatcctagacggtatcgaccagggcagcatcaatcaggcgcttgccaatgaatacgcctcccatatcgccgccaatgagcagcaggtggaacaggcgcttgaatttaaggcccgcctgtatgaaagcctgattaccggcaccatcagcaaagaggaatataccgactataaggccagatacacgagaattgcggaaaaggcaaaagaaagtatccgggtcttaaaggaaaaactggctgatgttctggagaaccgtagtgagcggaaccgctggatttcccacttcacacagttctctacaatggagaccctggaccgcaaagctgtggttcacatgatacagagcatcaaggtaattggaaaaaaggaattggagatcacctttacataccaggatgaataccagaaagcgatccagctgattcagcgggcagagaaaacaagccaaagaaaggtgggatga

SEQ ID NO: 101763 - DNA, 1659 bp, Enterobacter aerogenes
gtggcaagaaaaagtagaaaagaaactgtggtgcttcctgcaccggagatagataccacttgccgcgccggaatttatgtgcggctttccgttgaggataaacatactcacaccgcctctatcgaaacccagcagctgattatcgcccggtatctggagcagaacccggagatcattgtggtacagacctacattgacaatggcgcaacaggcacgaactttcagcgtcccggtttccagcaaatgctctccgatattgaagcgggtcttatcaactgtgtcattgtaaaagacctctcccgccttgggcgaaatgtcatagacaccggctactacattgagcgttactttcctacgcagaaagtccggtttattgccgtgaatgaccgctacgattcttcttccccggacaatgcccacgatgggatcatcatcccgctgcggaacatgattaacgaagcctatgcgatggatattgccagaaaaatcaaagcccagcagcggcaggccatgaaagacggcaagtatgttggtgcgcgtacaccctatggatatttgaaatctcctgatgactgccaccagctgattgttgacccagtggctgccgaggtagtcaaaaccatgtttcaatgggccgccgagggcgcaggattaaatactatcgcggtacgcttgaatgaggccgggtatctctctcccagccactacaagagaaccttgggagagatcacccacgagaatctggtgggaaatgggcattggcaaacccgcaccgtttccaagattctccgcgcagaggtttataccggcgatctggtgcaaggggtatctaaaatcattgaccacaagcaggtcagagccagcgcagatgaatggacaacggtacgcggcacccatgaagccatcatcagccgggagctgtttgccgctgttcagaaagcattggaccaggctgcacagcaggccaaagacagggagatacattcctggtctctcaatcttttgaggggaaaaatcttctgcgcccactgtggtcatagccttcatcggcaaaaatgcgtccgcagaaagacaccggaggtatatgtctaccactgtatcagcaacaaccgcattaaaaagggcgtttgtcctggtgcatttatctttgaaaaagagctgctggatgccctggccgatatgatacaggaacagcttgataccacgctggggcaatactctctcggtctggaaaacctctccaaagaagccgaggagcagaaaaacatacaggctaaaatctccagccggaagcaggaaatccagcagctgcgtacctaccagcgcggattgtatgagggcctgatccagaaccatctgtcaaaagacgagtattttaccttcaaagagaagtacgaagccaaaatcgaggcgatcagcgaggaaatcgagcagctgaaagcagggcttgcgattatcgccaagcagctggaacagtataaaatgctgtcccaggatgcacagcatatcaaggaagattgccagctgacggcagccctgattgaccgcctgattgaccgtgtagaggtctcaagagaaaagcgaattacggttcatttccgtttccagagtgaatttgagcattgtgaggaggtgctgagccagtgcagaaatatgtga

SEQ ID NO: 101764 - DNA, 1146 bp, Enterobacter aerogenes
  misc_feature (1019)..(1028): n is a, c, g, or t
gtgcagaaatatgtgattgctctttatatccgcctttccctggaggattacaaatacgacagtatgagcattgaaaaccagcaccttgttctgcatgagtttgtttcttccatgccggagtccgccaatgcggaagttcttgaatttatcgacaacgggtatagcgggacaaacttcgagcgtcccaaagttcaggagctgattgagatggtgcgggccaataagatcgactgtatcatcgtaaaagacttttcccggtttggacgaaacagcattgagactggctatttcattgagcgtgtgttcccgctgtttcacacccggttcatttccatcaacgatgatttcgacagcgatcagcacaagggcgataccggcggtatggatgtggctttcaagtatctaatcaacgagtattacagccgtgatatgtccatcaagaccaaaagcgccaagtatgccaaaatgcagcgcggcgaataccagagcaaagtttgcccttacgggtatcgcaaaagcgccgatggcagaatggaaccgaacccggaaaccgctgctgtggtacagctcattttccaacttgccgcaaccggcattggagcggcagccgttaccagggaactgtttaagcgaggcataccgacccccggagaatacaaagcagctcacgggcagcagtaccacgatgtctcacgctcccgtggccgctggagcagttctacggttctccgcatcctggaggacgaacgctatataggttcttatgtcattgggcgtcgtgcaattatcgaagtggggggcacacgaagccgcatgaaggatcgggacaaatggttcattattcccgaccaccatccggcaatcattgagaaagagctgtttgaaaaggtgcaagctgtgcagcgtcggttttctttgccgaccagaaaaaccagagattacccattaaaaggcaaagtctattgcggctgctgcgaccatatactctcccgcatcgctcaaaagaaaccgttttatannnnnnnnnnattctactgccgatgtgaacagccgctgccgcgatgtccgggcagatgctgccggtttggaagaagcagtcctcctcactttgaaaaagcagctggaaatcctgttgcccgtccatga

SEQ ID NO: 101765 - DNA, 420 bp, Enterobacter aerogenes
ttgaaaaagcagctggaaatcctgttgcccgtccatgaggacggcaccattcacctggaggccaccgctgccaaatgctctgagtatgagaagcagctggaagctctgaaggaccagaagcaagctctctttgaacggtatctcctggggcagattgaactggacgcttataaatcgaggaaagctgtttatgacgcagaaatactgaaagtcaaaaacgcttatgctgctgtcaccgcccagacaaagctgaagcgagaagaacaggcccgccaaagcagccgacaggggattgctcactcgattgccgaagcagatgtgctaacctcggagctgaccgatctgctgattgaaaaggtgtatgtattccccgacaatcgcattgagattgtttacaaggtccatgacctctttgaataa

SEQ ID NO: 101766 - DNA, 219 bp, Enterobacter aerogenes
atgctcaatgggcattgtttacgcaacagagtgttggctatcaggctcttggcgccgccgttgattcatttggttccagtgctggctctgctctatcaagtgtcattaccagtacccagtcggcatctgatgctgcaagagccttggctaatacagtcgcaggcagtgttatccagacattcgtcgatatgggtatccagcaagctaaatccgcaataa

SEQ ID NO: 101767 - DNA, 141 bp, Enterobacter aerogenes
atgagccgtgacgttatagagcgcatccgcgaccgctggtacaagctgcgcctttgccggcacctcggcaccgtactgattgactaccgcatactgagaaatttcgtccgcatctatcaggcttcaggagagaaagcatga

SEQ ID NO: 101768 - DNA, 684 bp, Enterobacter aerogenes
atgaatacccagtaccttgagtatgttcgccagcagctgataatggccaccgccgatctgagcggtgcgacgaaaggacagttggttgcctttgcggaaaacgcaatgtttgaggctactccgcgaagccgcgggcgcaagaaagtttacgacccacagaagaagcgaatggtaaaccctgacagcccaccgatggccggcagccagtcacgtgcaaaaggctcagccatagccctggtgcagccagttgagtattcgacggcaagctggcgccgggcgctcctgtcgctggaagagcatcagaaagcctggatactctggaattacagcgacaatatccgctgggagcaccaggagacgatcacccgctgggcgtgggggcaattcagggagaagttgtccggcgtgcgcattgcaaagaaaacggtcgagcgccttcgtcagcttatctggctggcagctcaaaataaaaaggctgaagtaaccggcaggggagacctctattccccggcctctatggtgggaatcaagccagataactggtgccacaattactcagattactggcaggctatgatggacatctaccaggaacttgataaccagtcgttactatctgtttctcgatcacgttcacaacaaaaagcgactttttcgcagcaatgccttgcaaaagtcaactaa

SEQ ID NO: 101769 - DNA, 1476 bp, Enterobacter aerogenes; identical to SEQ ID NO: 90186

SEQ ID NO: 101770 - DNA, 1473 bp, Enterobacter aerogenes
atgacgactgctgagcaaaagacatttgcccgtaaggttgaatgcgaggaagacggactctattacgctcggtacttcttcaaacaacgtaccggcggcaagatgattgttgcgcctcaccacaaagtgattcagaagacactggatcgcgttatcgacggtgagatccagcgtctgattatcaacgtcccccctggctatacgaagaccgaactggcaaccatcaacatgatggggagaggactggcgctcaactgtcgggcgcgctttatgcacctgtcctactcgcataatctggcgctgctgaactcctcgacggcccgcggcatgattaagtcgcaggcttaccagtctatgtggcctatggcgttgcgtgacgatgccgacagtaaggctatgtggtggactgaacacggcggcggcgtatacgcgtcatcagctgcggggcaggttaccggctttcgtgccgggcatatggagccaggctggcaaggcgcgctgattattgatgacccggttaagcctgatgatgcttactcggaaatcgtccgtgacggcgtcaataaccgttttaacgagacaatcaaatcacgattggcgatcgagacgacgccgatgattgtcatcatgcagaggatccactaccacgacctgagcggctatctactgcgcggaggtagtggtgagaaatggcatcacctgaacctgccggtgattatcgataacagccagtcatacgctgcgcaatacccagagaacacccatgcaatacccattgaccatggactgtctgatggatggctctggccgttcaagcataacgaatcgcaccgcgtatcgctgttctctcaccggcgcactgccgaagctcagtacatgcagaacccgaaacgcttcaatgcggagggagcgttgtggaacgaggagatgatcagcgccgcacatgcgatgcggatcactcaggagttggcacgtacggtagtggcaatcgacccgcaggccaccaacagcgaagagagtgacgaatcagggattgccgtcgccagtgtttacggtactggtgatgaacggcagtacagtctcgatgcggattacagtgggaagtattcacccaacggctgggctactaaggccattgaggcttatgagcagcacgaagctgatgcgatcgtcattgaaaccaaccaaggtggcgatatggcagaggacacgctccgcaacgccggtttcggcggacgcatcatccgggtgcatgccagcaagggcaaatacgctcgcgcagaacccatctccgcgctatatgcgcagggtcgggtcgctcaccgtggcagtctctacgaggttgaaaaccagttcatggagtacgtgccatcgactgcgaagaaatcacctgaccggcttgatgccgcggtatacgcactcaccgaattatcagaaccacaatcaaccggcatgttggtgcgctcgcgctga

SEQ ID NO: 101771 - DNA, 873 bp, Enterobacter aerogenes
atgattagggtgattttgtcacggagagcaaaccataacactgttctggtaactgaaaggtgcaataacagttgccttttttgttctcagcctcctaagacaggaaacgatgactggcttcttaaccagtcagcacttgccatcgcctctttctccctgaatggtgtagtaggagtgagtgggggagaacctctactgtatggcgaagatttcctgcaatttctggacttcataatcgaaaactcacctgagacagctttgcatgttttgacaaatggacgaaagtttgcagatgtcagttttactgaacagatgaaagagcgaagcgaaaagctcaaaataactttcggtattccgctttattcttcaaggtcgtcagttcatgactatctggttggaagcgagggggcatttgatgagacagttagggggcttatcaatgccggtaactcaggaatcaacattgagttaagaatcattcctacactggctaactatatggaactggacaaaatcatagagttcgctggtcgcgtgttctccaatatcaaccagatttctcttatggggttagaatccattggctgggcacgtaaaaactggtcatcaatcttcattgagcatgatagctatagtgagaaaattctctctgccataggaacagcacaaaggtcaggtatccccctgacaatcttcaattacccattgtgccatcttcctgaaagagcttggagatttgctactcagtcaatttctgactggaaaaattactatcccaaagaatgtgatgaatgtactcagaagtcttactgtgctggttatttcagttcatcaaaaggccgttttcatcaaccaccgagaccaattttatga

SEQ ID NO: 101772 - DNA, 126 bp, Enterobacter aerogenes
atgatgaaaagaggtattgttttactcgtactcttgatgctctgcctgttgacagcttgcggatcgaagaacactttgaaggccgattcattgatccgcgataatacagggatcgatcccgattaa

SEQ ID NO: 101773 - DNA, 462 bp, Enterobacter aerogenes
atgagagaagtttatattaagcaggttaaaaaagaactactgctacctaagaaacaaaagcagattgttttacgagatttggaagagatgtttgcatctgcaaaagagcatggagaatcagaacagcaagtaattgagagattgggtgcgcctaaagagtttgtaataaatacggaagaacaatttggtgtggatcatgcatcggtaaagaagcgccgaggcatcattcatatagtttcctctgtaattgtagctgttgtggctttcattgtgttcggagtgatgcagctgggcaaaactcctgataatgtaataggtcaagctgatgcaatgacaaacattaaaatagatgaagtgagagccatagatccttcatttatcttcttactaattgggacagtcgcaatcattttaatattcttccagatgataacgttcatgcgaaataataggaggaaatga

SEQ ID NO: 101774 - DNA, 510 bp, Enterobacter aerogenes
atgaaaaagtacatgaaaaaagtgatgtccatttttctggcagtatgcctgttttgttctttcggaactctcagcgcctttgcagctgagaacgatccggctccggtggtcatcggagaatttgatggcctgctgaaggattgttggacatctgatgctcctattcctcgcgccgttgctaatgtacgaatcaattcctacgcgacctacgataaagaggatggcgttcaggtcaaggtaaagctgtatgttccgtggtatgaattccccaaacctgaatttaccgcaatgagtggtagtgtcgctgtggcgctgaacggcagcacccattccacagggttctttgaaacagccaacggtgaagaaaccatcgaatctgatgtgaacactggagtgaccggcaattctggtaacactggtacagtgactgtttctggtgtcgctacggcaaacaatgcactggcaggtggcggtacatttggaattacctataacattaccattccctaa

SEQ ID NO: 101775 - DNA, 237 bp, Enterobacter aerogenes
atggccgtattaccgctcgaattccgcaccaagctggcgccgcagaacgacaccatgtcgctgatagcttctgcaatgaaagagtgtgctgaggccaagcaggcagtgcttcttaacgcacctgagcatcagaaactgaaggaggtaagcgagggtatcgcttcgctgtttcgcctcatgccggagcaagtaggcccactgatgacgatggtgacatcgatgctgggggttatgtga

SEQ ID NO: 101776 - DNA, 1302 bp, Enterobacter aerogenes
atggaaagtctgaacgccctgattcagggcatggggctgatgcatctgcaggccggccaggcggtgatgctgctggtcagcctgctgctgctgtggctggcgattgctaaaaagttcgagccgttactgctgctgccgattggcttcggtggcctgctctccaatatcccggaggccgggctggcgctgagcgcgctggaaaacctgctggcccatcacgacccggtccagctggcggtgattgccgcgaagctcaactgcgcgccggacgtccacgccatcaaggaggcgctggcgctggccctgccgtcgctacaggggcagatggagacactggcggtggacatgggctactcctccggagtgctggccatcttctataaggtggcgattggctcgggtatcgcgccgctggtgatctttatgggcgtcggggcgatgaccgatttcggcccgctgctggccaacccgcgcaccctgctgctgggggcggcggcgcagttcgggatcttcgccaccgtgctcggggcgctgacgctgaactacttcggcttcatccacttcaccctgccgcaggcggcggccatcggcatcatcggcggcgccgacggcccgacggctatctacctgtcgagcaagctggcgccggagctgctgggggccatcgcggtggccgcctactcctatatggcgctggtgccgctgatccagccgccgatcatgaaggcgctgaccagcgacaaagagcggaagatccgcatggtgcagctgcgtacggtgagcaaacgcgagaagatcctcttcccggcggtgctgttgctgctggtggcgctgctgctgccggacgccgcgccgctgctggggatgttctgcttcggcaacctgatgcgcgaaagcggggtggtggatcggctgagcgatacggtgcagaacgcgctgatcaatatcgtcaccatcttcctcgggctgtcggtgggggccaagctggtggcggacaagttcctgcagccgcagacgctggggatcctgctgctgggggtgatcgccttctgcgtgggtaccgcggccggggtgatcatggcgaagctgatgaacgtgttcagtaaacacaagatcaacccgctgatcggttccgccggggtgtcggcggtgccgatggcggcgagggtatccaacaaggtgggtctggaagcggacgggcagaacttcctgctgatgcacgcgatgggcccgaacgtggccggggtgatcggctcggcgatcgccgccggggtgatgctcaagtacgtgctggcgatgtaa

SEQ ID NO: 101777 - DNA, 327 bp, Enterobacter aerogenes
atgaaaataacaaaagacataattacaacgctaaaaataggtaactaccctattgatttacaaaaagttatagagaactataaaaaaacaaataaaaaccatggcggagtaattagaaagctatttaaagattttgcccatactccagacttcctcgcgcaagtaaaagggcgtgttaaagataacccctatcgatattgggtcgagaaacatcccgtggaatccgacagtttcaagcatgagttaatcaaaaatcttaaaataattatgactaatggacatggtgttgactctgctactatcacttcgtatctgtccggcaactga

SEQ ID NO: 101778 - DNA, 288 bp, Enterobacter aerogenes; identical to SEQ ID NO: 91989

SEQ ID NO: 101779 - DNA, 903 bp, Enterobacter aerogenes
atgagagccacgtcagaagagatcgctatcttcgtcgccgtagtggaaagcggcagttttagccgggcggccgagcagctcgggcaggcaaactctgccgtcagccgggcagtcaaaaagctggaatcaaagctaggcgttagtttgttaaaccggaccacgcgccagctgagcctgacagaagaaggcgagcgttatttccgccgcatgcaggtggtgttgcaggagatggcggctgctgagaacgagcttctggagacgcgcaccacccctcgcggattgcttcgcgttgatgccgccaccccggtgatgctgcattttttaatgccgctggtaaaaccgtttcgcgaacgttatccagaaatgacgctctcgctggtctcctcggaaaccttcattaatcttatagaacgtaaagtcgatgtcgcgatccgcgtgggtaccctaaccgattccagcctgcgcgcccgcccgctgttcaccagctatcgcaagatcatcgcctcgcctgattatatcgcccgctacggcacgccggtgaatgcggaagatcttgcggatcatctctgcctggggttcaccgagcctgtctcattaaatacctggcctattgccgccagcgatggccaattactggaagtcggttgcgaaattacctctaacagtggcgaaacgctaaaacagctctgtcttggcggcaatggtattgcctgtctatcggattatatggtggataaagagattgccagcggggagtttgtggagctacttgccgacaagcgcttgccggtggagatgcctttcagtgcggtgtattacagcgacagagccgtcagcacgcgtatcagggcatttattgactttctgagtgagcacgtcaaacagctcccgaaggagctgtaa

SEQ ID NO: 101780 - DNA, 807 bp, Enterobacter aerogenes
atgcccaaattgcgaaagaatacctatgccatgcgctatgtcgccggacaacccgcggagagaatcttgcctccgggggcgtttgcgggcgtcagtccggtttatcccgccggcgcgccattaagcagcgatgagaaaattcgcgtgctggtgtggaatatctttaagcagcagcgtgcagaatggcagtcagtgctcaaaaatttcggcaaagacgcgcatctggtcctgttgcaggaggcgcaaaccaccccagaactggtcaggttcgcgacttcaaactatctggccgccgatcaggtgccggcgttggtattgccgcagcatccttccggcgtgatgacgctggcctccgctcaccccatctattgctgtcccttgcgcgagcgcgaacctattttacgtttgcctaaatcggcgttagtgaccgtttatccgctgcccgatgcgcggctgttaatggtggtgaatatccatgcggttaattttagtcttggcgtcgatgtctatagtaaacagttgctgccaattggcgatcagattgcccatcacagcgggccggtaatcatggctggtgatttcaacgcctggagccgcccgcggatgaacgcgctgtaccgctttgcgcgtgagatgtcgttacgcgaagttcgtttctctgacgatcagcgccgccgcgcgtttggtcgcccgctcgattttgtgttctaccgcggattaagcgtgcacgatgcctccgtgctggtgacccgcgcctccgatcacaacccgctactagtcgaattcagtcccggcaagcctgattaa

SEQ ID NO: 101781 - DNA, 771 bp, Enterobacter aerogenes
atgacaacacgctctcatcatgacaacgtcgaaaagcagtttggctcacaggcaagcgcctatctgaccagcgccgtgcacgcctccgggcgcgatctgcagcgtctggcggaacggctggcggatttcccgcaggcaacgttgctggatatgggatgcggggcagggcacgccagttttaccgccgcaggccaggtagcgcaggttaccgcgtatgatttatcgagccagatgctggaggttgtcgctcaggcggcaaaagacaaaggctttaccaacatcgtcactcagcagggatatgctgaaatgctgccgtttgccgacgccagttttgatgtggtgattagccgctactctgctcaccattggcatgatgtcggccaggcgctgcgcgaggtgaaacgcgtgttgaagccgggcggggtgatgatcatcatggacgtaatgtctccggggcatccggtacgtgatgtctggctgcaaacggtggaagcgctgcgcgacacctcgcacgtgcgtaattactccagcggcgagtggctggcgctggccaacgacgcaggcctggcgatcaatcatttattgaccgatcgtctgccgctggagtttagctcctgggtcgcgcggatgcgcacgccagaagcgctggcggaggcgattcgcttatatcagcagagcgcatcggcggaggttaaagcctacttcgaattacagcaggatggatcgtttaccagcgataccatcatgtttgaagcgcataaagcagtgtag

SEQ ID NO: 101782 - DNA, 1155 bp, Enterobacter aerogenes
atgggaattccggaaaacccccggattcgcgaacagaaacagaagtacttacgtaataagagctatctccacgatgtaactttacgggctgaaccgtatatgtactggatagccgggcaagttaagaaacgtaacatgccaatggaactggtattactacccatagtggagagcgcttttgacccacacgcgacgtctggcgccaatgccgcaggcatttggcagatcattccgagcacagggcgcaattatggtttaaaacagacccgcagttacgatgcgcgtcgtgatgtcgttgcgtctactaccgcggcgctggacatgatgcaacgtctgaacaaaatgttcgacggcgactggttactgaccgtcgcggcatataacagcggcgaaggccgggtaatgaaggccgtgaaggcgaaccgttcgcgtggtaaacccaccgatttttggtcgctctcgctgccgcgtgaaaccaaggtctacgtgccaaaaatgctggctttgagcgatattctcaaaaacagcaagcgttacggcgtgaagctgccaacggctgatgaaagccgtgcgctggcgcgcgttcgcctcgatagtccggttgagatttctcagctcgcggacatggcaggaatgccggtcagcaagctgaaaacctttaacgccggcgtaaaggggtcaacgcttggcgctagcgggccaaagtacgttatggtgcctcagaagcacgcggctcaactgcgtgagtctctggcctctggcgacattgccgccgtacagccgacgcagcttgctgacaatacgccgctgaccagccatagctacaaggtacgttctggcgatacgatttccgggattgcttcgcgtctcggcgtcaccacccgggatctgcagcagtggaacaacctgcgcggttcagggttgaaagttgggcagaatctggttgtcggcgcaggcagcagcgcgcaacgtctggcgaacaacaatgatagcatcacctatcgtgttcgtaagggcgactcgctatcgagcatcgcaaaacgccacggcgtcaatatccgcgacgttatgcgctggaacagcgataccgataacctgaagccaggggatcagctaacgctgtttgtgaagaacaacgacagacctgaatcctga

SEQ ID NO: 101783 - DNA, 756 bp, Enterobacter aerogenes
atgaatcttatcagtattcctgcatttcaggacaactacatctgggttgttagcgacgatagccgtcgttgtgtgatagtcgatcccggtgaagccgcgccggtactcgcggccattgaagaaaacaactggcagccagaagcgattttgttaacccaccaccaccatgatcatgttggcggcgtgaaagaactgcggcaaaaatttccgcaacttgtggtttacgggccggcagaaacccaggataagggaagcacggatattgtatctgatggcgatagcattactcttttgggtcacgaattttctattttcgccacgccaggtcacacattaggacatatctgtttctacagcaaaccttatctattttgtggcgacacaatgttttctggcggctgcggcaggctgttcgaaggtacagcagatcaaatgtatcaatcatttatgaaaataaatgcgcttcccgctgaccccctaatttgttgcgcacatgagtacactttagcaaacatgaagtttgcattgagtatcctgccagatgatatggatataaaggattactaccataaagttaaggagttacgcgcaaaaaaccaaaagacactacccgttactctgaaaaatgaacgccgtataaatatatttttacgtacggatgacaatgatttaattaaagaaatatccaaagaaacaaatttgcaacactcagcgcagagatttgcatggttaaggtcaaagaaagatgacttctga

SEQ ID NO: 101784 - DNA, 669 bp, Enterobacter aerogenes
atgccgtggggtgaatactatcgcgagtcgctggaacggcatatgaaaccgtggctggctaaattatatggctttcatctacttaagattggcaatctgagcgcggaaatcaataccgaagcctgcgcgatctcccatcaggtgaacgtttcgctggggggaagtcctatccaggtcaaagccgacccgctgtatcttcctttcgccgccaaatcggtggatgcctgtttactggcgcatactttgccatggtgcagcgatccgcaccggctgttgcgggaagctgaccgcgtgctgattgacgatggctggatgattttgactgcttttaacccgctgagcctgattggattgcgcaaagtgacgccggttctgcgaaaaactatcccctataacagccggatgtttaccatgacgcgacagcttgactggctggcgctgctcaattttgaggtgctgcactacggtcgctatcaggtgctgccctggtcgaagcaggggggaaaaatgctaagtactcatctgcctgctttgggatgtttgcaaatgatcgtcgcgcgcaaaagaaccattccgttgacgctaaatccgatgaagtccgggaaggcgaagacgcagctgcgtccggccgttggcgccaccaggcagtggcgcgacgggggaaattag

SEQ ID NO: 101785 - DNA, 468 bp, Enterobacter aerogenes
atgctcaaacaggtagaaattttcaccgatggttcttgcctggggaatccagggcctggcggctacggcgctattatgcgctatcgccagcatgaaaaaacctacagcgcgggctaccgcctgacgactaacaaccgcatggaactgatggctgccatcgtcgctctcgaagcgcttaaagagcactgcgaagtggtgctaagtaccgatagccagtacgtccgccaggggataacccagtggatccataactggaagaaacgcggctggaaaacggcggacaaaaagccggttaaaaatgtcgatctgtggaaacgccttgatgccgctctcggccagcatcagattaaatgggaatgggtcaaaggtcatgccggacacccggaaaacgaacgctgcgacgaacttgcgcgcgccgcggcgtctaaccccacgctggacgacgtcggctaccagccggaaagctaa

SEQ ID NO: 101786 - DNA, 741 bp, Enterobacter aerogenes
atgaccgctatgagcactgcaattacacgacagattgttctcgataccgaaaccaccggtatgaaccagatcggcgcccactatgaagggcataagatcatcgagatcggcgccgtagaggtgatcaaccgtcgcctcaccggtaataacttccatgtttacctgaagcccgaccggctggtggaccctgaagccttcggcgttcacggtattgccgatgaattcctcatggataagccgacatttgccgacgttgccgatgagttcatggagtatatccgcggcgcggagctggtcatccataacgcatcgttcgatatcggctttatggattatgaattcaaaaagctgaaccgcggcattgagaaaacggaaaccttttgtaaggtcaccgatagcctggcgctggcacgtaagatgttccccggcaagcgtaacagccttgatgcgctctgttcacgttatgaaatagacaacagcaagcgtacgctgcacggcgcgttgctcgatgcccagattctggctgacgtctatctgatgatgaccggtgggcagaccagcatggcgttttcgatggaaggagaaggccaacagcaggccggcgatattggaatacagcgcgttgtccgcgccgccagtaaattacgcgtggtttatgcctctgatagcgagctggcggaccatgaatcgcgtctcgacctggtgcaaaagaagggcggaagctgcctgtggcgcgcctga

SEQ ID NO: 101787 - DNA, 882 bp, Enterobacter aerogenes
atggatctgcggcgttttattactctcaagacggtagtggaagaaggctcgtttttacgcgcggcgcaaaaactatgctgtacgcaatccaccgtgacctttcatattcaacagcttgagcaagaacttgccgttcagctgtttgaaaaaataggccgccgcatgtgcctgaccgaatccggtaaaaaggtgctgccgcacgtccatgaactggcgagggtgatggaaaccattcgtgaggcggctcgcgaggatagcgacccggctggtgagctgcgcgttgcctgtggggaaaccctgctggcctataaaatgccgcaggtgctacagcgctttaaacaacgggcgccgcaggtacgcttatcattgcaatcacttaactgttatgtcatccgtgatgcgctactcaacgatagcgccgatttgggcgtgttttatcgggttggcaacgatgacgcgttaaccatgacaagctttggccagcagccgctgacgctggtcgcctcgccgcagcatccggcggtcgattttacccgctgcgggcaacatattccgctgagctttgttatcaatgagccacagtgcgtatttcggcaaatttttgaaagcacgctgcgccagcgcaccattaccctggaaaatactattgagctctggagtatcgaaagtattaagcagtgcgtggcgagcaatcttggcgtcagctatctgccgcgtttcgccgttgaggaagagcttaagcgcggtacgctggttgaactcccgttcagcgatattccactcactattaacgcgatatgcgcccatcacgccggtaaagtgattagcccggcaatgcgggtatttatgcagtgtgttgaggaggcgttaggggcggattaa

SEQ ID NO: 101788 - DNA, 591 bp, Enterobacter aerogenes
gtgaccccagctttgattagtgcttttttgacttataccctgataaccgcgctgactcccggccccaataatattcttgccctcagcagcgtcacctcccatggcttacgccgcagtctgcgggtgctggcagggatgagcattggttttattatcactatgctgatttgcgcggctttaaccttttcgctggtggaactcgactcacgctttacccggctattgggatggattggcgcggcgtatatcctgtggctggcctggcagatagccaaaagtaaaccgggagcaggcgcgctgagtacagagccggtggggttctgggcgagcctgggcctgcagttcgtcaacgtaaaaattattctgtacggcatcaccgcgctctctacctttgtcctgcccgttacccgcgagccggtttggctcattagcgtgagtctgctgctggcggcgattggcgcgctgggaaacctgtgctgggcgctggcggggcatctgtttcagcgcctgtttttgctgtacggacggcaactgaactgggtgttggcagcgttattggtctactgcgctttgcggatcgtggtggaataa

SEQ ID NO: 101789 - DNA, 771 bp, Enterobacter aerogenes
gtgcctggcttgaaaattacgctgttgcagcaaccgctggtgtggatggatggtcccgccaacctgcgccatttcgatcgtcagctggaagaagtgagcgggcgcgacatcattgtactgcctgagatgtttactaccggttttgccatggaagcggcgaagcagtcgatgccgcaggaagaggtcgttgagtggatgcaggcgaaagcggagcagaccaacgcgatgattgccggtagcgcggccttgcagaccgaacgtggcccggtgaaccgctttctgctggtagagcccggcggtaaaacgcacttttacgataagcgtcacctgttccgcatggcggatgagcatcaccattatgaggcaggtactgagcgagtggtctttgaatggcgcggctggcggattctgccgctggtgtgttatgacctgcgtttcccggtatggtcgcgtaaccacaacgattacgatctggcgctgtatgttgctaactggcctgccccgcgttcgctgcactggcaatcgctgctggtcgccagagctattgaaaaccaggcctacgtcgccggctgcaaccgcgtcggcaccgatggcaacggccaccactatcggggcgatagccgtatcatcagcccgcagggagagattatcgccaccgccgaaccgcatcaggcgacgcggctcgatgccgatctgtcgttggccgcgctgcaggagtatcgcgagaaatttccggcctggcaggatgccgatcctttcacgatcggctaa

SEQ ID NO: 101790 - DNA, 2445 bp, Enterobacter aerogenes
atgatgattttgagtattgttgcaaccgtagtgttactcggcgtgctcttctatcaccgagtcagcctgcttctcagcagcgtgattttgctcgcctggaccgcggcgctcagcgtggcggggctgtggaatatctggctgctgttgccgctggcgattatcctgctgccgttcaactttgcgccgatgcgtaaatcccttttctccgccccggcattccgcgccttccgcaaagtaatgccgccgatgtcgcgtacggaaaaagaggccatcgatgccggcaccacctggtgggaaggcgatctgttccgcggcaacccggactggcacaagctgcataactatccgcagccgcgcctcaccgccgaagagcaggctttcatcgacggcccagtagaagaagcctgccgcatggcgaacgacttcgaaattacccatgaaatggctgatctgccgccggagctgtgggcgtacctgaaagagcatcgcttctttgcgatgatcattaagaaagagtacggcggcctggagttttccgcctatgcccagtctcgcgtactgcaaaagctgtccggcgtttccgggatcctggcgatcaccgtcggcgtgcctaactccttagggccgggcgaactgctgcaacattacggtaccgaagagcagaaaaatcactacctgccgcgcctggcgcgtggtcaggagatcccatgcttcgcgttgaccagcccggaagcgggctccgacgccggcgcgatcccggataccggcgtagtctgtatgggcgactggcagggtcagcaggtgctggggatgcgcctgacctggaacaagcgctatatcaccctcgcgccaatcgccaccgtactgggcctggctttcaaactctcagacccggaccgtctgctgggcggcgaggaagaactcggtatcacctgcgcgctgatccctacctcaacgccgggcgtggaaattggccgtcgtcacttcccgctgaacgtaccgttccagaacggccccactcgtggtaaagatattttcgtaccgatcgattacatcatcggcggcccgagcatggccggccaggggtggcgtatgctggttgagtgcctgtccgtgggtcgcggtattactctgccgtccaacgccaccggcggcctgaaatccgtcgctatggcgaccggcgcctacgcccacattcgccgtcagttcaaaatctcgattggtaaaatggaagggatcgaagagccgctggcgcgtatcgcaggcaacgcctacgtaatggacgccgccgcttcgctgattacctacgggattatgcttggcgagaaaccggcggtgctgtcggcgatcgttaaatatcattgtacccaccgcggccagcgttcaatcatagacgctatggatattaccggcggtaaaggcatcatgctgggcgaaggcaacttccttgcccgcgcttatcagggcgcgccgatcgccattaccgttgaaggggcgaatatcctcacccgcagcatgatgatctttggtcagggggcgattcgctgccatccgtatgtactggatgagatggccgccgcgcagaacaatgacgttaacgccttcgataagctgctgtttaaacatatcggccatgtcggtagcaacaaagtacgcagcttctggctgggcctgactcgcggccgcaccagcagcgcgccgacccgtgatactacacgccgctactatcagcacatgaatcgcctgagcgccaacctggccctgctgtcggatgtatcaatggcggtactgggcggcagcctgaagcgtcgcgaacgtatctccgcgcgtctcggcgacgtgctgagccagctgtacctggcatcggcggtgctgaaacgttatgacgatgaaggccgtaatgaagcggatctgccgctggtccattggggcgtgcaggatgcgctgtatcaggcagagcaggctatcgatgacctgctgaagaacttcccgaaccgctttgtcgccggcgcgctgcgtctcgccatcttcccgaccggccgtcactacgatgcgccgtccgacaagctggatcataaagtggcgaaaattctgcaggttccgagcgcgacccgctctcgtatcggtcgcggccagtacctgacgccaagcgaacataacccggttggcctgctggaagaggcgctgctggatgtgatggcggcggacccaatccaccagcgcatctgcaaagagctgggtaaaaatctgccgttcacccgcctggatgagctggccactaatgccctggccaaagggttaattaatcaggaggaagcctcgattctgacccgtgcggaaaccagccgtctgcgcagtattaacgttgatgatttcgcggcggatgaactggcgaccaaaccggtaaagctgccggaaaaaatccgcaagattgaagcggcataa

SEQ ID NO: 101791 - DNA, 582 bp, Enterobacter aerogenes
atgtaccaggatcttattcgtaacgaactgaacgaagccgcggaaacgctggccaactttctgcaggacgaggccaacattcacgctattcagcgcgcggcggtactgctggcggatagcttcaaagctggcggtaaagtgctttcctgcggcaacggcggttctcattgcgatgcgatgcattttgcggaagagctgaccgggcgttatcgcgagaaccgccctggttatccggcgatcgctatttctgacgtcagccatctgtcctgcgtgagtaatgattttggctatgaatatgtcttctcccgctatgttgagtcggttggccgcgcaggcgatgttctgctgggcatttccacctccggcaactccggcaacgtgatcaaagcgattgaagccgcgcgcgcgcagggaatgaaagtgatcaccctgaccggtaaagacggcggcaaaatggcgggttccgccgatgtggaaattcgcgtaccgcatttcggttacgccgatcgcattcaggagattcacattaaggtgattcatattctgattatgttgatcgaaaaagagatggttaaagcttaa

SEQ ID NO: 101792 - DNA, 768 bp, Enterobacter aerogenes
atgtgcgaattgctcgggatgagcgccaatgtgccgaccgatatctgttttagcttctccgggctggttcagcgcgggggcggcaccgggccgcataaagacggctggggtattaccttttacgaagggaaagggtgtcgcacatttaaagatccgcagccgagctttcagtcgccaatagccaaactggtacaggattatcccattaaatcctgttccgtcattgcccatatccgtcaggccaaccgtggcgaagtggcgctggagaacacccatccgttcacccgcgaactgtggggccgccactggacctacgcccataacgggcagctcaagggttataaatcgctgaagacgggaaatttccgcccggtgggcgagaccgacagcgaaacggctttctgctggctgttgcaccgtttaaccgagcgctatccgcgcacgcctggcaatatggtcggcgtgtttaaatacatcgcgacgctggcgggcgaaatgcgcgagaagggcgtgtttaatatgctgttatcggacgggcgctatgtgatggcgtactgttcaaccaacctgtactggatcacccgtcgggcgccgtttggcgtggcgaagctactggatcaggatgtggaaattgattttcaacgtgagaccacaccaaacgatgtggtctccgttatcgccactcagccgctgaccggcaatgaggcctggaataaaatcatgccaggcgagtgggcgttattttgcctcggggagcgtatagtttga

SEQ ID NO: 101793 - DNA, 741 bp, Enterobacter aerogenes
atgcgcaaaatcgcattctttattgcgatgcttctgttgccgtgcgtgtcatttgctgggttactcagcagtagcagcccgacaacgccggttagcaaagaatataaacagcagttaatgggctctcccgtttatatcgagatcttcaaagaagagcggatgctcgatctctacgtcaaaatgggcgaaacctaccagcttctcgatagctaccggatctgtaactactccggcggcctcgggccgaagcaacgccagggcgatttcaaaagtccggaaggattttataacgtctcgcgcagtcagctaaaaccagacagccgcttttataaagcgatcaatatcggcttcccgaatgcctacgatcgcgcgcacggctatgaaggtaaatacctgatgatccacggcgcctgcgtttccgtcggctgctacgcgatgaccgataccggcattgacgagatcttccagtttgtcaccggcgcgctggtatttggccagccaagcgtgcaggtcagcatctacccgttccgcatgaccgacgccaacatggcgcgacataagttctcgtactatgcggatttctggaagcagctgaagccaggctatgactacttccagcagacccacaaaccgccggtggtttcggtgatggatggccgctatatcgtcagcaagccgctcagccacgaggttatccagccgcagctggcctcaaactatacgctccccgaggcaaaataa

SEQ ID NO: 101794 - DNA, 1347 bp, Enterobacter aerogenes
atgattaaaatcacgaaagggctggatttgcccatagctggcatgccattacagcagatctcgccccggcctgcggtgaaacgcgtcgcgctgctcggcgaggagtacgtcggcatgcgcccctcgatggccgtgagcgaaggcgatcgggtgcaaaaaggccaggtgctgttcgaagataaaaagaacgccggggtacgttttaccgcgccagccagtggggtggtcagcgccattcatcgcggcgagcgccgggtgctgcaatcggtggtgattgatatcgacggcagcaatgaggcggtgtcgtttacccgctacgcattagaagatcttaacgatttgccacgggaagcggtgcagcaacagctgctggaatccgggcagtggacggcgtttcgtacccgtcctttcagcaaaattcccgcgccgggtagcgttccggcggctattttcgtcactgctatcgataccaacccgctggcggctgaaccgcagccgattatcctcgcccagcgtgaagcctttgatgctggtctgacggtgctaacgcacctgacggacggtaaagtccacgtctgtcaggccagcggcggcaagctgggcggccatcccgccgggcaggtgacattcaaccagtttagtggcccgcatccggcagggcttgccggtacgcacattcacttccttgagccggtcagcctgaccaaacaggtctggcatctcaactatcaggaggtcatcgccatcggcagactgttcctcgacggcgagctgtacagcgaacgcgtcattgcccttggcggcccgcaggtaaaacagccgcgattgctggaaacctgtctcggcgccagcctcgatgagctgctggcgggcgagctggtggatgatgaaaaccgggttatttccggttctgtcttgagcggcacccacgcctgcggccctcacgccttcctcgggcgctaccatttgcaggtcagtgtggtacgagaaggccgtgaaaaagagctgtttggctgggtgatgccgggcaaagagaagttctcgattacccgcaccacccttggtcatttctttaagcgcaagcgctttaatttttccactgatactaacggcggcgagcgggcgatggtaccgatcggcaactatgagcgggtaatgccgctggatattctgccgaccatattgctgcgcgatctgcttgccggcgatagcgatagcgcccaggcgctgggctgtctggagctggatgaagaagatctggcgctttgcacctacgtttgtccgggcaaatatgaatacggcccggcgctgcgcagcgtgttaacccagattgagcaggaaggataa

SEQ ID NO: 101795 - DNA, 1239 bp, Enterobacter aerogenes
atgggcttaaagcacctgattgagaaacttgagccgcatttcacgcacggcggcaagttagcaaaatattacccgctgtatgaagcggcggcgacgatcttctacaccccgggtttagtcacccgcggcgcggcgcacgtacgtgacgccatcgacctcaagcggatgatgatcctcgtctggtttgcggtgttcccggcgatgttctggggcatgtataacgtcggcttgcagacgattccggcgctgcacaagctatacggcgccgaacatttacagcaggtaatagccaacaactggcactatagcgttgcccagtggttaggggtgagcttcagcgccgatgccgggtggctcagcatgatgacgctgggggcggtatttttcctgcctatctacctgaccgtattcatcgtcggcggtttttgggaagtgctgttcgcgattgtgcgcaaacatgagatcaacgaaggctttttcgttacctcgattctcttcgcgctgattgtgccgccaacgatgccgctatggcaggcggcgctgggaatctccttcggcgtggtgattgccaaagaaattttcggcggcaccgggcgcaatttcctcaacccggcgctggcggggcgcgcgtttctgttctttgcctacccggcgcagatttctggcgacctggtatggacggcggcggacggtttttccggcgcgacgccgctctcccagtgggccagcggcggcggtgaagcgctggttaacgtcgccaccggcatcccggtgagctggatggacgccttcctcggcaacattcccggctcgattggcgaagtgtcgacgctgatgatcctcatcggcggcgcgttcattatctttgcccgtatcgcttcctggcgcatcgtcgccggggtgatggtcggtatgatcgctaccgctacgctgtttaatttcatcggttctgataccaaccccatgttctcgatgccgtggtactggcatctggtgctcggcggtttcgccttcggcatgatgtttatggcgactgacccggtatcggcttcctttaccgataaaggtaaatggagctacggcctgctgattggcgtgatgtgcgtgctgattcgcgtcgtcaacccggcctatccggaagggatgatgctggcgattctgttcgccaacctctttgcgccgctgttcgattacctggtggtgcaggccaatatcaagcggaggaagtcgcgtggctga

SEQ ID NO: 101796 - DNA, 795 bp, Enterobacter aerogenes
gtggctgataagaaaagtaacgatagcatcggcaaaacgctgctggtggtgctggtgctttgtctggtgtgctccattgtggttgctggttccgccgtgggcctcaagtcacgtcagcaggaacaacgcgcgctggataaacagcgcaatatcctggcggtcgccggcctgatgcagcaggggatggatgctgacgcggtggcggaaaccttcgccgcgcgcattacccctcggctggtcaatctggcgaccggcgaactgctggataaagacccgggcaaatttaatcaggctcaggcgctgaaagatccgcagcagagcatcgcgctcgacgccaaccaggatccggccgggattaaacgccgcagcaacctggcggaaatttacctggtgcgtgacgcgcagcagcagattcaggaagtcgtgctgcctatctatggcaatggcctgtggtcaatgatgtacgccttcgtggcgctggacgtcgatgggcgtacggtgaaaggcattacttactacgatcagggcgaaacgccggggttgggcggcgaggtggagaacccgaactggcgtcagcagtttgtcggtaagcaggtgctggatgacaacggcatgccgtcgttgaaggtggtaaaaggcggcgcgcgcgcaggcgatctccacgcggttgacggtttatccggcgccacgctgacgtcaaacggcgtgcagcatagctttgatttctggatgggcgaactgggctttggtccgttcctgaaaaaggttcgtgagggagagctgaataatggctga

SEQ ID NO: 101797 - DNA, 639 bp, Enterobacter aerogenes
atggctgaacagagcgatatgaaagaggtgaagcgcgtgctggtggggccgcttatcgccaataaccccatcgccctgcaggtgctcggcgtctgctccgcgctggcggtgaccaccaaactggaaaccgccttcgtgatgaccattgcggtgacgctggtgacggcgttttccagcatgtttatctctatgattcgccaccatattcccaatagcgtgcgcatcatcgtgcagatggcgatcatcgcctcgttggttatcgtggtggatcagctgctgcgggctttcgcctatgagacctctaagcagctgtcggtgttcgtcgggcttatcatcacgaactgtatcgtgatggggcgtgccgaagcttatgccatgaaatcgccgccgctggccagctttatggatggtatcggtaacggtctcggttacggcgcgatcctgattatcgtcggtttcctgcgcgagcttatcggcagcggtaagctgttcggtatcaccgtactggaaacggtgcagaacggcggctggtatcagccgaacggcctgttcctgctggcgccgagcgcgttcttcattatcggtttgctgatttgggccctgcgtagctggaagcctgaacagcaggaaaaggagtaa

SEQ ID NO: 101798 - DNA, 597 bp, Enterobacter aerogenes
atggctcattacattagcctgtttgtccgcgcggtgtttgttgagaacatggcgctggccttcttcctcgggatgtgtaccttcctcgcggtgtcgaaaaaggtttccaccgcgtttggcctcggcgttgcggtcacggtggtgctgggtcttgccgtaccgatcaacaacctggtctataacctggtgctgcgcgacggcgcattgatggaaggcgtagacctcagcttccttaacttcatcacctttatcggggtgattgcggcgctggtgcaaatacttgagatgatcctcgataagtacttcccggcactctataacgcgttagggatcttcctgccgcttatcgccgttaactgcgctattttcggcggcgtgtcgtttatggtgcagcgcgattacaacttcccggaatcgattgtttacggctttggttccggcatcggctggatgctggcgattgtcgcgatggcgggaatccgcgaaaaaatgaagtacgccaacgtgcccgccggtctgcgcgggttagggatcacctttatcaccaccggactgatggcgctgggctttatgtcattctccggtgtgcagctataa

SEQ ID NO: 101799 - DNA, 1224 bp, Enterobacter aerogenes
atggaaattattcttggcgtggtgatgttcacgctgatcgtgctggtcctgtcggggcttatcctggtggcgcgctcgaagctggtgaacgcgggcgacgtggttattgaaatcaataacgaagcggataaacagatccgcacgccggcgggcgacaaactgctgaacacgctctccagcaacggtatcttcgtctcttccgcctgcggcggcggcggctcctgcggccagtgccgggtgaccatcaaagaaggcggcggcgatattctgccgacagagctttcgcatatcaccaaacgcgaagccaaagaagggtgccgcctggcctgccaggtggcggtgaagcagaatatgaaaattgagctgccggaagagattttcggcgtgaaaaaatgggagtgcgaggttatctctaatgataacaaagcgaccttcattaaagagctcaaattacgggtgccggatggtgaagcggtgccgttccgcgccggcggttatattcagatcgaatgcccgtcgcataaagtggcctatgccgactttgatattcccgatgaatatcgctcagactgggacaagttcaacctgttccgctatgtttctgaggtgaaagagccgaccctgcgcgcctactcgatggctaactacccagaagaggagggcatcattatgctcaacgtgcgtatcgccacgccgccgccgaaggttccggatgcgccgccggggattatgtcgtcctatatctggtcgctgaagcctggcgataaggtgacgatttccgggccgtttggcgagttctttgccaaagagaccgacgccgagatggtgtttatcggcggcggagcgggcatggcgccgatgcgttcacacatctttgaccagcttaagcgcctgcacagcacgcgtaaaatcagcttctggtacggcgcgcgttcgctgcgcgaaatgttctatgacgatgagtttgaacagctggcgcgcgaaaaccccaattttaccttccacgtcgcgctctccgatccgctgccggaagataactggaccgggcatacgggctttatccataatgttctgtatgaaaactatctgcgcgaccatccggcgccggaagattgcgagttctatatgtgcgggccgccggtgatgaacgccgcggtgattaaaatgctcaaagatctgggcgtcgaagatgagaacatcatgctcgacgactttggaggctga

SEQ ID NO: 101800 - DNA, 216 bp, Enterobacter aerogenes
atgtggacggtatttgtcgcgacctttgtgatttttgcgctggtgatcctcggcatgtccctgggctacctggtgaagcgtaagagtattcaaggcagttgcggcgggatctcctcgctggggctggagaaagtctgcgactgtccggaaccgtgcgatgcgcgtaagaaacgtctcgcccgcgaggcgcagcgccagcagcagcgcattctctaa

SEQ ID NO: 101801 - DNA, 861 bp, Enterobacter aerogenes
atgaagaaaatactcacggtactctgtctgctggcgaccggcagcgttttcgccaatccgcagctgattgcccaccgcggcggtaccggcgatgcgccggaaaacaccctaccggccatcaaactggcgctggaaaatcacgcacaggccatctggattacggtacagctaagccgcgatggcgtaccggtgctctatcgctcaagcgatctctccgccctgaccaacgccgagggcaaggtctcaagcttaaccgccgccgagctggcaaaagtcgatgccggctggaaatggggcgatgacagccatccgtggcgcggcaagcaggccacgatcccgaccttacaaagcgtgctgcagcagtggccgcagaccttcttctacatcgatataaaatcaccggatgccgaaccggcggtgatgggcgaacgcctgctggaggtgttaaaaaatacccatagcctcgaccgggtacgggtttattccaccgaagaccgctatatcgccgctctgccgcaaccgatcccccgctttgttagccgcagcgaaacccgaaccaggcttgcaaacgtttcgctcagccaccagtgccagcaagacagccagcgcgatggcgataagtggtacgggctggaactaaagcgcaaggtggaggtagtcgagaagtttacccttggtgaaggcgtttctccggcgacgctcacctgggataaagaggcgatggattgcttccgctcgcagggccaggcccacatcattttcttcggcatcaatagcgcggaagattatcgaacggcgaaagaattaggcgccgacggcgtgatggtggattctccggcgcaggcgaaaaactggcagtaa

SEQ ID NO: 101802 - DNA, 1089 bp, Enterobacter aerogenes
atgctgtatgggtatacagtgttgggcaaggcgatgcgtaaaattatccatgtcgatatggactgcttcttcgcagcggtggaaatgcgtgacaacccggcgttgcgcgatatccccattgcaatcggcggcagtcgggtacaacgtggcgtgattagtaccgcgaactatcctgcgcgtaagtttggcgtgcgcagcgcgatgccgacggcgacggcgcttaaactgtgtccgcacctcacgctgctgccggggcgctttgatgcctacaaagaagcctcgaaccacatccgcgaaattttctcccgctatacctcgttaatcgagccgctgtcgctggatgaagcctaccttgacgtgagcgacagcgtacactgccacggctctgccacgctgatggcccaggagatccgccagaccatcgagcgtgaactgaatctcaccgcttctgcgggcgtggcgccggtaaaattcctcgcgaaaattgcctcagatatgaacaagccgaatggccagttcgtcattgccccgcatcaggtggcggagtttgtgcggtctctgccgctggcgaaaattcccggcgtcgggaaggtgtcggcggcgaagctggaaaatatggggctgcgtacctgtggcgacgtgcaaaacagcgatctggcgatgctgcttaaacgttttggtaagtttggccgtatcctgtgggagcgcagccacggcattgacgagcgcgaaatccataacgatcgtcagcgtaaatcggtcggcgtcgagcgcactctggcggaagatattcatgagtggtcagactgcgaagcgattatcgaaaatctctatcccgagctggaacgccgtctggcgaaggtaaaaccggatctactgatcgcgcgtcagggcatcaaactgaagtttaacgatttccagctcactactcaggagcacgtctggccgcggttaaacaaagaggatttaatcgcgaccgcgcgtaacgcctggcttgagcgtcggggcagccgcggcgtgcggctggtggggttacacgtaactctgctcgacccacagctcgaacgacaactggtacttggactataa

SEQ ID NO: 101803 - DNA, 462 bp, Enterobacter aerogenes
atgttaacgatcagggcgtatgtagaagaggattttccggcgctgtgcgccatttttttgcgtgcggttaaagagaccgccagccgggattattctcccgcgcaaattgccgcctgggcgcaggttgatgaatcccgctggcggcagaaatttgcgcattcgcaagtgctggtggcggttattgataatcagccggttggatttatcactgtcgataatgattatatcgacctctttttcgtctcgccggattatacccgtcgtggaatcggtcatgcgctcatcgggggggtctgcgccagccttccgggaaagatattgtcggttgatgcgagcataacggcacgatccagttttcttcgtcagggatttcgtgtcgtcgctgagcagcgagtagaatcgcgtggagagaggttcaccaactatcgaatggaaaaacgcggttcgggtaaggctgaatag

SEQ ID NO: 101804 - DNA, 138 bp, Enterobacter aerogenes; identical to SEQ ID NO: 92105

SEQ ID NO: 101805 - DNA, 1458 bp, Enterobacter aerogenes
gtgtctgaattgtctcaattatccccgcaaccgctttgggatatttttgccaaaatttgctccatcccacacccgtcctatcacgaagaacagctcgccgagcacatcatgggttgggcaaaagagaaaggcttacacgcggaacgcgaccaggttggcaacattctgattcgtaaaggcgcgaccgccggtatggaaaaccgcaagccggtagttctgcaggcgcacctcgatatggtgccgcagaaaaataacgataccgtccacgacttcactaaagacccgatccagccgtacatcgacggcgaatgggtcaaagcgcgcggcaccaccctgggcgcggataacggcattggtatggcctccgcgctggcggtgctggccgacgatagcgttgcccacggcccgctggaagtgctgctgaccatgaccgaagaagccggtatggatggcgcgttcggtctacaggccaactggctgcaggcggatatcctgatcaataccgattcggaagaagaaggcgaaatctacatgggttgcgccggcggtatcgatttcacctctaacctggcgctgactcgcgaagcgattccagccggtttccagagctttaaactgaccctgaaaggcttaaaaggcggccactccggcggtgaaatccacgtcggcctgggcaacgctaacaagctgctggcgcgcttcctggcgggccatgccgatgaactggatctgcgtctggtcgatttcaacggcggtacgctgcgtaacgctatcccgcgtgaagccttcgcgaccgtcgccgtcgccgcggacaaagcggatgcgctgaaagcgctggtgaatacttaccaggatatcctgaaaaacgaactggcggccaaagagaagaatctggtcgtcctgctggaagcggtcgcgaacgataaagcggcgctgactcaggcttcccgcgacggtttcgtgcgcctgctgaacgcgacgccgaacggcgtgatccgcaactccgacgtcgccaaaggcgtggttgaaacttcgctgaacgtcggcgtcgtcaccatgaccgacgacaacgtacagatccactgcctgattcgctcgctgatcgacagcggtaaagactatgtcgtcagcatgctggattcgctgggcaaactggccggggcgaaaaccgaagccaaaggcgcttacccaggctggcagccggatgccaactctccggttatgcacctggtgcgcgagacctatcagcgtctgttcaacaagacgccgaacattcaaattatccacgctggcctggaatgcggtctgttcaaaaaaccgtatccggacatggacatggtttccatcggcccgaccattaccggcccgcactccccggatgagcaggttcatatcgagagcgtcggccagtactggacgctgctgaccgaactgctgaaagctattccggctaagtaa

SEQ ID NO: 101806 - DNA, 459 bp, Enterobacter aerogenes
atgagcgaaaaatacgtcgtcacctgggacatgttgcagattcacgcccgcaaactggcaagccgtctgctgccggttgaacaatggaaaggcatcattgccgttagccgtggcggtctggtaccgggagctttactggcgcgtgaactgggtattcgtcatgttgataccgtatgtatctctagctacgatcacgacaaccagcgcgaactgaaagtactgaagcgcgctgaaggcgatggcgaaggtttcatcgttattgatgacctggtcgataccggcggcaccgccgtcgctatccgcgaaatgtatcctaaagcgcactttgtcaccattttcgctaagccggcgggccgtccgctggttgatgattatgtggttgatatcccgcaggatacctggattgaacagccgtgggatatgggcgtcgtcttcgtcccgccaatcgctggccgttaa

SEQ ID NO: 101807 - DNA, 1245 bp, Enterobacter aerogenes
atgtcacaggctaaccttagcgaaacgttgtttaaaccccgattcaaatatccggaaacctcaacgctggtccgtcggttttcctccggacagcatcagggcatgcagaccgcgctgagcggtaatcacgtcgaccactggtatcgcttaatcaatcgcctgatgtggatctggcgcggcgtctcgccgcaggagatatgggatgtccaggcgcgcatcgtgatgagcgatgccgagcgctccgacccggagctctacgatacggtgattggctatcgcggcggcaactgggtgtatgagtggactaaacaagcgatgatgtggcagcaaaaagcgactcaggaagccgatcctttgcagagcggtcgccactggctgcacgcctccaacctctatagcatcgccgcctacccgcatatcaagggcgatgggctggccgatcaggcgcagacgctggccaatcgcgcctatgaagaggcggcgcaacgtctgccgggcgagctgcgggaactggaattcgctatccccggcggcgccccggtgacgggcttcctgcatatgccgaaaggcgaaggcccgtttccgacggtgctgatgtgcggcggtctggattcgctgcaaaccgattattacagcctgtatgagaagtattttgccccgctgggtatcgccatgctgacgctcgacatgccgtccatcggtttctcaaccaagtggacgttgagccaggacaccagcatgctacatcagtacgtgctacagcatctgcagaatgtcccctgggttgaccatacccgtgtggcggcatttggtttccgcttcggcgccaatattgcggttcgtctggggtatctggagtcgcagcggctgaaggcggtagcctgtctggggccggtggtgcataacctgctggtggatccgcagctgatggcgcgggtgccggagatgttcctcgatgtgctggcatcgcgtcttggcatgcacgatgcttccgacgaagcgctgcgcgtcgaacttaaccgttattcattaaaaactcagggcttgctgggccgccgttgccctacgccgatgctctccggctactggaaagatgatccctttagccccgaagaggagtcgcggttaatcacctcctcctcggcggatggcaagctgctggagataccgtttaagccggtttaccgtaatttcgatcacgcattgcgtcagattgcccgctggatcaaccatagatttggttaa

SEQ ID NO: 101808 - DNA, 399 bp, Enterobacter aerogenes
atgacgttaccgagtggacacctgaaaagtaagctgattaaaaaattcacggcgctaggcccctatatccgtgaagggcagtgtgaagagaaccgcttttttttcgactgcctggcagtttgcgtcaacgttaaaccagcgccggagaagcgggaattctggggctggtggatggaaatggaagcacaggaatctcgtttcacttatagctaccagttcggcctgtttgataaagagggtgactggcaagcggtcgacatcgacgatcccgaggttcgtgaaagactcgaaaaaacgctgcgtgagttccacgagcgcgctgcggcgctgctggcaacgttcaatctgaaactcgaaccggctgacgatttcagcgaaccggttcgcctgcgcgcgtaa

SEQ ID NO: 101809 - DNA, 522 bp, Enterobacter aerogenes
atgcctaatgccattagtcaggtccgccgcgagatcaaacataccggcagtatgaaggcgaaaatcgcgattctgctctatcgcctcgcgacgatgtatcgcagccgcaacccgttttacaagctgctaggcatgccattcgttattctcaataaactgattaacgagtgtctgttttgcgtcgaactaccgtggcaaacgcggatcggctacgggttgaggctgtaccatccacactgcatcgtcctcaaccgcggcaccgtcatcggtgaaaactgtatcctgcgtcagggagccaccatcggcagcctgacggatagcgaaggccgcgaaggggcaagcccggtgattggcaataacgtcgaattcggcgcccacgtggtggtcatcggtccggtgacgttgggtgataatgtcaaaattggcgcggggaccgtggtgacgaaagatctggccgccggtcaggtagtggtcggccagccattccgggtgttatcaacttatcgcgaagcgcaggaataa

SEQ ID NO: 101810 - DNA, 1416 bp, Enterobacter aerogenes
atggcgatattatctctgcatagcgctcctctgtttcgcgccctgctactggccagcgcgctggcgtcagcatccgttggcgcgcaaaccacggtcatcaccccgcctcctttcgacggcctgctcaccaatccgggcatcggcgtcgccagctttcatgatggctatggtgaaaaaccgacccgcgccgagtatcccgataccggttttgaatacgatcgcttctactggagcgagctggagccacaggaaggggtctacaatttcgcgccgatcgataatgcttttagcgtcgccgccagccatcagccagccatgaacgtcggcctgcgggtaatggcgctcgacgagccgcaaacgggatcgaaaattcccgactggctgatcgccaaagggatcaagggccagtgggtcgccgacggtaaaaccttcgtgccggatctcagcgatccaacttttatcgcctatgcgcagaaactgctgaatgccctcggtcagcgctatgacggcaacccggaactggcctttatcgatatcggcatggtcggatcctggggcgaatggcacaactccaactttagcgagattccgccgttaatggagaagtacacgccggagcagctcaatcgctatgttgatatgcatttcgatagcttcccgaaaacgccgaaagtcatgctgattagcggcggcgattcgctggcctgggccagccgccgcggcgcgggctggcgggcggactgctggggcgactggcataacttctccagcgaatggagccatatgcgcgatgattatccgcagcgtctggccgccgctcaggccgcggcgccggggtttgtcgatagctggaaacgggcgcccgtcagccttgagatctgcggctatatgagcgaatggcagagcgtacagcactacacgcgtgaagaggtgcaggccaccttcgactgggcgctacagcaacacgccagcagcctgaatctgaaatctcgcccgattccgccggaataccgcgatattgtcgataaagccttactgcgaatcggctaccgtttccgggtcaataagctcgccttcgagaccccggttaaggctggtaagccgttagcggtcagtgttacctggcgtaatgatggcgtcgccccagcctatctgttctacccggtacaatggcgcgtggtcaacgccgccggcgccacggttacccaggtaaaaacccaggatgacgtgcgccgctggctgccgggggatatgcaaagcactgtcactctgacgctacccgcctcgctgcccgccggcgattacgcgctgcagaccgccatcaccgatgcccagggtaagccgcggcttctgctggccaaccagggtaaaaccgccgacggctggtatcaactgaccaccttttccattaagtaa

SEQ ID NO: 101811 - DNA, 414 bp, Enterobacter aerogenes
gtgccgaaatctacagcagaactggtggtcgagcgcttctatgccgcgcttgaccaggaggttgaaacctcattaaccgcggagcagaaacggggaatcgagcaggcgttggtgcgcgccaacctggcgtcacgccatcgcatcgattttcgccacagctttccgttcctgcatcgccgctatttcgtggtatttctttttggtcgggatctgcgcaaagtttcgcgcgaaagcactctgttcggacgcgtcttcgcgacgctgctgattacgcttggcgtggtgttcgccctgctgtcgatcctactggcgctctatatgttgaaatcagcgttaggcattgatgtatttaaaaatttccacgtcggtatctggacgtggtttgttaatcttcatgaccacatgacaaagtga

SEQ ID NO: 101812 - DNA, 1101 bp, Enterobacter aerogenes
atgaccatcaacgtcacggtattaggcactcgtgggatccccgatgtgcagggcggcgtcgaaactcactgccagaatttatacccggaaatctatcgccagggcagcgcggaagtctgcgtgatcgcccgctcgccctatgtgaactaccgacgcagcgaatatcagggcgttaaactcaagagtctgtgggcgccgaaaagccgtaaattcgaggctattattcactcgacgctggcggcgttcagtaccttattcgacggctccaacgtggttcacgttcacgccgtcggccccggcctggtggtgccgttgctgcgtctgttgggaaaacgcgtcgtctttacccatcatggcccggattacgatcggcagaaatggggccggatggccaaagagatgctgcgccttggcgaaaaatgggcggtgaaatacgccaatgaagtgatcgtcatttccgaggtcatcaataatctgattaagcacaagcatggccgccataacgcccatgttatctacaacggcgtgcgccaggccgacctgcctcctgcggatcggcaggcggagatcctcgataaatacggtctaaaaccgggccagtatatcgttgccgtggcccgttttgtcgaagagaaagggctgcacgatctcgttgccgcctatgccgccgccgggtgttcggtaccgctggtgctcattggcgatgccgatcacgccgatgaatatagcgagcgcctgaagcaacaggcgaccgccacgccaaacgtcatcctcaccggctttatcagcggcgcgccgctgcatacgctgttctcgcaggccgggctattcgtgctgccctcttatcatgaaggattgccgatcgcgctgctggaggccatgtcgtggtcactgccggtggtggtcagcgacattccggccaaccttgaaattggcctgccgccagcggactactttcccgtcggcaacgttccggctctgacgcagaaactgcaacaatgggtcgcaggagaaaaagcggattacagccagtttatgccgaagtaccgctggccggaaatcgccgcgcaaaccgcgcaagtctatcagcgcttaacgtaa

SEQ ID NO: 101813 - DNA, 1215 bp, Enterobacter aerogenes
atgaaaattctcttcgttaacaaattcttctttatcaaaggcggcgcggaaaccgtttattttcaggagcgcgacgcgatgctgcaagccggctaccaggtggtcgacttcagcatgcagcacgcggaaaataaaccatcgccgtgggaggaatttttcgtccataacgtcgattaccacgacagtcacggcctgatgagcaaaatcaaagccggggtggactttatttataatgccgaggcctgcgcgaagctcaacacgcttttgttgcgcgagcggccggatattgttcattttcataatatctatcatcagcttacgcctgccgttatcggcgtggcgaaacgctttggctgcaaaacggtactcaccgcccacgattacaaaatcgtctgtccttcgtacaccatgctgcgcgatggtcatgtctgcgaagagtgtctgaccgggtcagtgatcaacgcttttcgtcaccgctgccagcagggcgatactttcaaaagtctgctgctatcgttggaggcctactggcagaagttcgccaaaaattacgccatgctcgactgtatcatcgccccaagcgaatttatgcgccagactctgctgcgtaagctgcccgacgcccgcattgaagtgatcgtcaacggtattgatgccaatagcaccgtgcccggcgaaactgcgggcgactattttctctatattggccgcctgagccgggaaaaaggcgtaccgtcgctggcgcaggcgcagcaaaaaatgcgggaggcgatgccgcttaagattgtcggcgatggcccattgggcgcagacctacgcgcgcgcttcaacggcccgcagttcctcggctatatgaaacacggcgaggagctgaataaccttattcgcggggcccgcgcggtagtcgtcccctctgaatattatgaaaactgctccatgtcggtgctcgaagccatggcttttggccgcccggtgatcggcggcaatattggcggtatcccggaacagatccgtgacggcgtcgacggctatctggttgaacccggcaatagcgacgcgctggcgcaactgatggacaaactggctgcagaccctgagctggcccgcaatatgggaattaacgcccgccagcggctggaagaaaaatacgatctcgcccgccacatgcaggtgctgcaggcgctttatgaacaacttgtcggggagaaaaaatga

SEQ ID NO: 101814 - DNA, 1026 bp, Enterobacter aerogenes
atgaataaaacgccatccattaccgtcagcatcaagaccctgaacgaagcgcagggcatcgagaaaacgatcgatagcgtgcgaaaacagctgcaaccgtacccgcatcaaatcatcgtcgccgacagcttatcaacggataacacccgcgaactggctatcgcgaaaggcgcgatggtggtgtgtctggataacgccgccgaccgctgctgcggtatcggccaccagctgggctggctgtatagcgaaggcgattatctgctgctgctggatggcgatatggagctggagccgggctttctggataccgcggtcgaattcctggaaacgcatccggagtacgcgggagtcgccggcagcgtcgagatggatgatgcctctaactatgagttcaaatcgcgcaagcagcgcctgcatctgatctatccgcagggcgacaccgatcatctgggcggcggcggcctatatcgccgtgaagcgatcgagaaaatcggctatctgaccaacctcaatctgcacggctacgaagaagcggaactgggcattcgtttacaagcggcaggttacaaactgcatcgcctggcggcgccctactttagccacgcctcttacaccatgccgacctttaaaatgctggcctaccgttggaagaacggctttctgtgggcgccgggcgagttgctccgaaactgctggggtaaagcccatttcccggcggcgctgcggattgtacgtaatgagctgctcttcaccctctatctgctggttttactgatttgtctactgaccttcaatggcaaggttatcgccattgccctgctgccgctgctggcgtttatcgctctgaaggccattaaaaataaatcgctgcgcgatggcgtgcagagcgcgattaacttatcgctattttcagctgggctgctgcgcggggtgattaattcagtgcgcgatccgatgaaacgcccggcggtgaccgtctcgaatccacagcatattgatactgaaaatgaaaattctcttcgttaa

SEQ ID NO: 101815 - DNA, 1383 bp, Enterobacter aerogenes
atgcagctaaacaccggccgctatctcgaagcctatgccctgatgacgctggtgttctgcggtacggtccagtatttcaccggtatcgcggccgtgctgtggctgccattttttctggtgctggtgatggcggtgctgctcctgatgcagagccgcccgcagccgctggcgctcaccgggcgggaaaagctaatactggcgctgtatctgacctttatcgtactcgggctggtctcaacggtactacagtcaggggtcgtcaccgccatcgtcggctttaaaaacgagctggcgctctcgctgctgatgttctgcatgctgttgggcatgtttagtgaatcacagctgtaccgtctgacgcgtcttttctactggatctactatgtgcagatcccggtcgctatctatcaggtgattttcgtggtgcctaaacgggtggcatttcgcggcgaagatgagaaatgggactcggtggtcggcactttcggcggcgacccgatgggcggcggcaacaccgcggctatggggatgttctgtctgctgatcatgcttatgaaagtgtcagagtttaagcacggcatctgctcatttaaatcgctggtgatccacatcgcgctgggtttcttcctctgcgtggtgggggaagtaaaattcgtcattcttctatcgccgttcctgctggccctgctgtggatcctgcccggctacgtaagcggcgtgagtaaagttagcctgcgatcgctgctgatcatcgccgccggcatggcgctattaatttttgtcgccattaccgtgttggcctccaactattcctcggccttcggcggcgacccgaccaaaagcgcgctatcggtattcatcgattcgctgggctatatttttgatactaactacattatgcccagcggcgaactggggcgttttaccaccctcttcttctggctgcagcataacgaactatttggtcctggcggcatgctgtttggttacggccttaacgccaccaacagcggcagtaccgtctcgccgggctatatcggcgtctggtatcacctgatcctcgattccaccgccttaagcatgctgctgtgggaagtggggattatcggcatcattctgttcattggcaccatcgcctccatcctggtcgccatgcggccgaaagagaccttttcgcgccacgatctcaagcttgaggatctgcaactccttagcacggcgccggcgttctatgtttttgtcatcggctgtctgctcagcctgccctacagccagatcctgatgatcattcccatgctacagtttttattatggttatcccttggggcgctgattgtcatccaccgcgctgtccgtcttaactccggtacccactatgaataa

SEQ ID NO: 101816 - DNA, 1218 bp, Enterobacter aerogenes
atgaatctgattaagagtatttcatccatcgccagttcatcggtgctttcgcagctgatcggcgccttttcggtctggcttatctctcatcgctatgggatggcggaggtcggccattacgcgatgatctacagcaatgtactgatcggcgcgcaggtctgtacctttgcctcgcagttgctaatcccccgtcaggaggatcacgagcttgggcaaaacgtagtgttctgcctactgcagagtctgctgatggccctcccttgggcggtcatcaccgggcttatcttcgaacttaacattgcgtttctctatttgctgacctttggctatgcgctggtgctggtggcggaaaacctttccctgcgcggcggtaactatcctttcctgaccttccagcgcattgcggtgtcgctggtggtcgctattgcgctgctggtgatgcccaacccaacgctgttttatctggcgtggatggtcggcatcctgctgctgctggtcgtctgcctgattcgcctgtttaacttcaaaagcttaacgttgcgccacttttcgattgcgacgaatgtacgttttttacgcgagcactggcagcatatcagccgcgtcggcagcgccgaggtactggcgatggccagtaataacctgccgacgatgctgattaacatctggttctcgccgctggtcgccggctacttttcggtggtcagccgtttctgcctgtcgccggtgatgattatcggtaacgccgtgcgcaactccatcttttctaaatggtcgatggattttcgtaaccgcacctttaactatccggaatataaaaaagttcgcctgctgctgctgggcgccgccgcggtgtgcatccttggtatctggattttctatccgctggtgatgcgcctgggctttagcgaggagtggctgaattcgatccccacctcgcgctacatgctgccttatctgttcgccgcgctggcggtcagcccgctgacggtgatcgaactgatcttcggctcccggcgctactttttgcgtattcagattgagcagttgctgattatcgtcatcgccttcatcgccttgccgtactttggcgtcagttatgaaatcgccctgctggccttctcgttcctgaccttcgcgcgttacttgttcattttgctcaaaatgaatcagcgggcgaaaacgctttcgctgcaggagcagaaaatatgcagctaa

SEQ ID NO: 101817 - DNA, 2088 bp, Enterobacter aerogenes
atggcaatttcactggtcgaaaacgcgaaaaagaaagaaggctttatcgacttcacgccttatttcaacaaaattaagcacaagcttatctggtgcctggcggtggtgattgtcgccgccgtggcgtcatttattctgacgcgctttatgtcttccagctacacggcgaccgctaccgtactgttcaaagcgcagtcgcaggacgtctctcctctgccgcgactggaaaactacgattccacgcgcagcgattactacgagaccaagtacgcgttaatggggtcacgagtagtgctcgatgccgcggtgcgtaaattaaagctggagcaggatagcgaatttaacggcggcgataatctcgacgaaaccgcgcgtattaataatgctattcaggcgctacaaaaaagcctgaccatttccggcgtgcgcaccacccaactggttgccgtatcgatggaagcgaaatcaccgcagaaagccgccgatatcgccaacggcgtcgcccaggccttcatcgattacagcctgcagcagaagcaaaacaccttgcttcaggcgcagggctggaacgaaaaaatgatggacgacctgaaaaccaaaatggatcagcagaaggcggacatcgataacttcctcaagcagaacggattactaaccttccgcagcatggatggttatgagaccgagcggctggggattgtgattaaccatctggccgacgccacccagcgccgcctgaaagcgcagacggtatgggacaaggtccgccgccagcagggtaaaccggtagagcagattatctcgctgccggaaatctccggccatccgcaggtgcaggatttacgcattgcgctcatccagacccggcgcaatctttccgaagcggccaaacactacggcccgcagcatccgaaatatctgcaggcccaggcgcagctgcaggcggtgaatgcccagctcggccaggtattgggcgagctgtttaacggcctgcgccagcaatatcaaatcgccctcgacgatgagcagcactaccaaaaaatgctcaacgatcagaaggccgatttccaggcgctcggcgccaagcgcgaccagtacaacaccatgaccaccgcgctgaataaaaccgaagagctttataaatcactgtaccagcgcgctaacgagcagaaattgtcagagaccttctcggtaccggatgaagtcatttacgacgccgccgtaccgccggatcgtccatctaaaccccagcgcggcctgttgatcgtgatgattaccctgatggcgctggcgctgtatatcatgtacctgatagtcagtaccgcgctggataaaacggtgaatagcctcagcgagctcaaagcgaaaacctccctcgaggccagcggcgaatttccgctactggcgcatctggaaaacgcgcagcagattttccataacgtgctctacgccgatatgatccacagcctgcggctggcgttgctcaataagcgcgataaacccgccaccatcctggtgacttcggtacaatcccgctccggcagttcgtatattgccgaactgctggcctgctcagccagcaaatcgcgtaaaacgctgctgattgacctcgactacctggcgactcaggggttatcggcgaaatttccgcaacataaacagggcttcagtcaattgctgaacggcgattgcatgccggagcagtccgtcgtcaaactggatgatcaactggactttataccccgcggcaagctcaacgactcttcgctgctgttgctcacctctgaacgcctgccggcgctgctggcaacgttgcatcaaacttacgatacgctaatcatcgacgccccggcgctgaaccaggctcaggatagcctgctgttggcggcacaaagcgatatgactctgctggtggtgaaggccggcgagcaggctccgcggatccgcaaagcggaacaacgtctgcagagcgcgggtagtagccgggtggcgagcgtgcttaaccaggtgcgcgaagaacacctggaaacgcaggaaggtaaacgcctgcttgagcgccagatgcacgaactcattgctccgaaatag

SEQ ID NO: 101818 - DNA, 528 bp, Enterobacter aerogenes
atgcttccgctgctggcgctactgctggcgggctgttcaacgccgccgcagaccattaaaacgccgccggacgccgtctaccttttggaccagggcgatgaagtcaatattgcggtctccggggagcaggatctgacgatgcgggtaaaaatcgataatagcggcagcattgattacccctatatcggatcgctgctgttaaaaggcaaaacgcctgaacaggtgagtaatgaaatcgccgataaactgcgcggtaactacctacaggcgccgatggtcacggtgagcatcgccgaataccgcaaagtttatctgctcggcgaagtgaaaaaaccggatggttatgcctgggagccgggtttaacggcggaaaaagccatcgccctggccggcggtttcaccgaccgcgccgatcgtcatgatattcaaattcgacaggcccgcggcggaaggctgctggaaaatgtcgccgccgactcctccgtgcaggcaggagataccatcattattggcatgagtttcttctga

SEQ ID NO: 101819 - DNA, 1287 bp, Enterobacter aerogenes
atgcgttctaggttcgccgttctggccggtttgctgtctgtgccttatgcacacgcagacctgcaggcaaaaccgcataccggggttgccggcatcgatttcgagagccagttgggttatgacatcggttacgatgacaacgtgacctggcagcgttacgaccaaaataaaatcggctccagctaccagaatattaagcctgtcgtcaaagctatcggcgaacgttatgaagaccgctacctgttgatgtattccggcgattaccgcaactatggcaacgatagcgcagataatcgcaacaaccatttttttatgtttaacggcaagtggcgatttggcagcatgcacgggctgtcgctggatctcgatgagacgctgggtcatgaagagcgcggccgcgacaccaccgaaggctttttgcctgagcagtttaaagagtttggcatcaacaagccgatcggcacccgcttctttaacagcgagctgcgttacagctacggcgcgccggaagggcgcggtaaagttgaagtcgcgctactgcataaacaattgcgctttcgcgacctcgacagcatcaaagacgccagcgatgactttaactattacatgcacgatcaggagtggcatgaaaacagcttggtggccgaagtatttgaccagaaagccaaaacgctgcgctaccgctatagctttatcaccaaccagcgccgctacgagctgaatccgttaaaagacagcaatgagtattatctactggtcggcatgaagaatcgcctgtcgggtaaaacggagattaacggtaacgtcgcctggctctacaaagactttatccataacccggactcacagggttttaacggcctgaactgggatatcaacgccgactggaaaccgctggaacaaatgaaagttaacctacacagctcccagcgcatcaaggaccccaccgactccggcggctatatcctggtgtcgaatttcggcgtcggctatgaacatcactggctggtggatcgtttctcaactctggtcgattattcatatatcactgaagactataagcatcagagtaataagcgcaaagataagtctaatctgctgtcgctgacctttaactatgatttccgaccatcggttaactttaagctgaagctgcaatggaacaccatgcactcaaataaagatacggacactttttatattggcccggactactcgcatgcggttgaccgcaccctgggctacgacgattcggccattatttttatgacgcaggtacaactatga

SEQ ID NO: 101820 - DNA, 1404 bp, Enterobacter aerogenes
atggcagataacaatataaaaatttatcattcccgttatagcaagttgataaaactactggactttctcaccgtcaacgttttgatttttatctatttaaaatatttttatactgaacccacaaccgcttccgcgctcgttggaattatctattcattagtatttataagaattaatgagtattttcatttgtattcagggcaatttaaagggcactatttcacaaaatcagcagcgcttattttaagcgtatgccttagcagtattgtttcattcttatttttcgtcatcgccgagtggttaattaatacgcaatcagtcgttaattttattccgctggccgccagtctggcgaaatgctcaatatttatatttctcattgtcttcgtggtgcgggcaatcactgcccattatctgtttaactcggtgttacgggtcgcgattctcggtattacgcccgcgggcctggccatcgagcaggctttacaaaaagagtactcacaacgcggtatcatcatcagctattttgaagaccgcaacaaccagcgagatagccggctgatgagtatcgaaagaaaaggcaactcgcgcgatctgctggctctggcgaagacaggcgacgttgatgaaatttatatcgcgcttcccatggttgcacagcagcgcattaagcaatttctcaatgaattctctgacacaaccgtcgatgtattcctggtaccggacctgttctcttacagctcacatatttcccagctgcgcatgttcggcaatctgcaaactatcagtatcttcacttcgccttttgatggcgaaggggcaatcatcaagcgtattgaagatatcattctcggttctttctttaccttaattagcctgccggcgatgctgtttgtggcgattggtatcaaactcacctctccgggaccgattttatttaaacagaatcgttatggcctcaacggtaaacaaatagaagtctggaaattcagaaccatgcgggtcatggaaaatagcgccgtggtcactcaggcgactcgcaacgatccacgcatcaccaaattcggcgcgtttctgcgtaaaacctcactggatgaactgccgcagtttttcaacgtgctacaggggcggatgtcgatcgtcggtccccgcccgcacgcggtggcgcataacgagcagtatcgcgtgctggtggagaactacatgattcgccataaggttaaaccaggtatcaccggactggcgcagattaacggcttccgcggtgagaccgacacactggacaaaatggagaagcgaattcagtacgacctggcctacatccagtcgtggtcgctgttcctcgatctcaaaatcgtctttttgactttcttccggggctttgttggcaaaaatgcgttctag

SEQ ID NO: 101821 - DNA, 213 bp, Enterobacter aerogenes
atgaaaaccgtatcgactattttttccgcagctgcactttcactttttgcctttaccgcttccgcgcatagcgtgactgcaaccggtaatacgcttgactccgctgaagcggtgattgccaaaaaagcgaaagagctgaatgcgactgattataaaatcaccagcgcccatatggggaataaggtgacgatgagcgcggaactgtacaagtaa

SEQ ID NO: 101822 - DNA, 417 bp, Enterobacter aerogenes
atggctactaccactgtatctatcgaaatcccggcttctgtcgaccaggtttggcaactgatgggcggctttgactcgctgcccgactggctgccgttcatcccgaaaagcgtggtgagcgaagggggacgcgtgcgtacgctgaccacatccgatggcggcacggtcattgaacgtctggaagcgtttgataaccgccagcgcagctatagctactcgatcatccaggcgccgttcccggtcgtggattacctctccactatcgcggtagtggcaactgccgatagcaatatcacccgcgttgagtggtccggcagcttcacgccggttaacgtcagcgacgcggatgccgaagcgctgtttagcggtatttatcgcgacggcctgcaggcgttgaaaaataactttagcgcctga

SEQ ID NO: 101823 - DNA, 798 bp, Enterobacter aerogenes
atgaaactggatctaacccataaagtcgccgtggtgagcggctccacttccggcatcggactgggcatcgctaaaggccttgctcaggcgggcgcgaccgtggtcatcgtcggccgtcaacggcgcggtgttgataccgccatggcggcgattaatgccgaacaccccgatgcgcaactgcgcggcgtcgtcgccgaccttagcactgaagaaggcgtcagcgcgctgctcgccgccgaggcgcatgctgatgtggtggttaacaacctcggcatctttaacgataaagatttctttagcgtgccggatagcgagtggctgcacttttataacgtcaacgtgctttccggcgtgcgcctgtcgcgccactacgcgcaggggatgatcgataacggctggggacgcattattttcgtctcctcggaatccggcgtcgcgattcctgccgacatgatcaactacggcgtgaccaaaagcgccaacctcgcggtctcccacggactggcgaaacggctcgccggtaccggcgtcaccgttaacgccattctacccggccccaccttcaccgaaggtttgcaggagatgctggcggaggccgccgcgcagtctggccgcagcccgcgtgaacaggctgatgaatttgtgaagaccgcacgcccaagctcgattatccagcgggcggcggacgtcgacgaagtggcgaacctggcggtatatctcgcctcgccgctctcgtcggccaccactggcgcggcgctgcgcgtcgatggcggcgtcgtcgacaccctggcaatgtaa

SEQ ID NO: 101824 - DNA, 1011 bp, Enterobacter aerogenes
atgagcatcaaacatattctgccaggcaaaattggtttaggcggcgcgccgctgggtaacatgttccgtaacatcccggaagacgaggcgcacgccaccgtcgccgccgcctgggatctgggcgttcgttacttcgataccgcaccgctgtacgggtccggtctttctgaaatccggatgggcgaagcgctctcgcaataccctcgcgaccagttcgttctgagcagcaaagtcggccgcatcatgcttgatgaaatggaagacccggcgacgcgtgattttggtgagaaaggcggtcttttcgaatacggcctgaagaacaaaatcctcaacgactactcggccgacgccaccctgcgatctattgaagacagtttaaaacggctgaaaaccgaccatctcgacatcgtatggatccacgatccggcgcaggatttctacggcgacagctggctggagcagttcaacatcgcccgtaccggcgccttccgcgcgctgacccgcctgcgtgaagaaggcgtaataaaggcatgggggctgggcgtgaaccgcgtcgaaccttgcgaattgaccttagcgctcgacgagccgaagcctgatgcgttcctgctggctggccgctactcgctgctggaccacaaacgcgccctgcagcgcctgatgccggaagcgctggaacagaatgtcgatattgtcgtcggcggcccttacagctcgggcgttctcgccggcggtgaacacttcgaataccagaaagcctctgcggcgatccaccagcaggtggcgcagatcaaggccattgccgcccgtcatcaggtggatgtgaaagccgctgcgctgcagtttgccctggctcatccggcggtggccgccgtaatcccaggctccagccgtccgggccgtatggcggaagatctggccgcgctgaaagcgaccatcccagccgctttctgggatgagatgcgcagtcagaatctggtggctgataacgcgccgctgccgattcgttaa

SEQ ID NO: 101825 - DNA, 894 bp, Enterobacter aerogenes
atgattgatttacgccagttgaagtactttgtggtggtagcggaagaggagcatgttggccgtgccgccgaacgcttacatatttcacagtcgccgctcagccgccagatagcccagctggaggagcgcctagggctgatgctgtttgaacgtaaccagcagcgtattcgcctgacggcggacgggcagacgtttctggccgaaacgcgctcgttgctgacccacgccaaccgtctcgaatcattaggtaaacggctggggcgcggcgaagatggcgggttgtgtatcggttatatcgaaaacgccatgcactcgggcgtgctttctaccgcgctgcgcaccctgcgaacgtcgcgcccggacgtgcatattgcgctgtatagccagccgcccgccacgcagattgagggcctgcgccagcgcagcctggacttctcgctggtggacatgccgccttcggcgggcgaacaggatctggagtatacccaggtacttgatgaccggatgctgctggctttgccgcagaatcatccgctggccgcggcggaaaacttgcagccagcgcagctggccgatcagcagtggatcgcggttatccataacgacgatgcccattcgcgcgatgatttcgtcgccgcctgcgtgcgtgcgggctttaatccggatattcgtctggaagccggagagccattaacggccctggggctggtggcggcgggactgggcgtggcgctgatccagcacagcctgcggcataacgcccctgagggggtcgtgctgcgggaaattccgtggatgagctattcgacccagctgtgggcggtatggcacaaagccaaccagcgcccgctggtgatgcactttcgcgaggtgctacgcggcgagaataattag

SEQ ID NO: 101826 - DNA, 369 bp, Enterobacter aerogenes
atgaaatttctattatctatcagtttattaagcttctttctttctccggctttcgccggcacagcggtaaaattgtcctgctctttacgcaaaaatgtgaccatctcgcgtttccattaccagctatcgaccatgaagtggggcgaccatttccaggtggcttccggcatgcgtcaggcgcagaccaaaaatcatattccctatcgggtaaccagctttcgcaacggcgacgatctggtctttttcccggacagtcaggagtactttttcttctactcgggaatggcgacgccggaccgttgcgtggtggaggaacactacgagtatccggtcacgcagctgccgtattataaaaagcccgctgcctga

SEQ ID NO: 101827 - DNA, 693 bp, Enterobacter aerogenes
atgaccgccattccccaagcgacggccattgatggataccgctggttgaagaacgacatcatccgcggcgtttatcagcctgatgaaaaactgcgtatgagcctgctgacgtcgcgctatgagcttggcgtcgggccgctgcgggaagcgctctcgcagctggtggccgagcggctggtgacggtggtcaatcaaaaaggctatcgcgtcgcctcgatgtccgaggcggaactcctcgatatcttcgatgcccgcgccaatatggaagccatgctggtgcgcctcgccattgagcgcggcggcgatgagtgggaagccgagctgctggcccgcgcgcatctgcttaataagctggaatccagcgaagcaagtgagcgcttactcgatgaatgggatcagcgccatcaggcgtttcataccgccattgtcgccggctgtggttcgcagtatttactgcagatgcgcgaacggctgttcgatctggcggcgcgctaccgcttcatctggctgcgcaccacggtgctgtcggtagaaatgctggaagataaacatgtccagcaccagacgctgctggaagccattctggcgcgagatgccgagcgagccagcgcgctcatgcgcgagcacttacttacccccatcccgattatccaacaggcgatggccggcaaactgctgtcgcagcaatcctga

SEQ ID NO: 101828 - DNA, 1404 bp, Enterobacter aerogenes
atgatggggcaactgtcgcaatcacatgatttagggggcgggctgaaatcacgccacgtcaccatgttatctattgccggcgttatcggcgcaagtttatttgtcggttccagcgtcgccattgccgaagcgggcccggcggtgctgctctcctacctgttcgccgggttattggtggtgatgattatgcgtatgctggccgaaatggccgtcgccaccccggatacgggctccttttcgacctacgccgacaaagcgatcggccgctgggcgggttataccatcggctggctatactggtggttctgggtcctggtgattcccctggaagccaatatcgccgccatcattctcaactcgtggatccccggcgtaccggtatggctattctcgctggtcatcaccctcgccctcaccggcagtaatctgctgagcgtcaagaactacggcgaattcgagttctggctggctatctgtaaggttatcgccattctggcctttatcgtgctgggcgcggtggccatcaccggcttctatccctatgccgaagtgagcgggatttcgcgcctgtgggatcacggcggctttatgcctaacggcttcggcgcggtgctcagcgcgatgcttattaccatgttctcatttatgggcgcggagatcgtcaccattgccgccgccgaatcggataccccggataaacatatcgttcgcgccacaaattccgtaatctggcgcatctctatcttctatctgtgctccattttcgtggtcgtctcgttgattccgtggaacatgccggggctgaagaacgtcggttcataccgttcggtactggagttactgcatatcccctacgccaaactgattatggacggcgtgatcctgctgtcggtgaccagttgcctgaactcggcgctgtataccgcttcgcgaatgctctattccctgagccgccgcggcgatgcgccagccataatgggcaaaaccaaccgcagtaaaacgccgtatgtggcggtgctgctctccaccggcgcggccttcttaaccgtggtggtgaattactatgccccggctaaggtctttaaattcctcatcgatagctccggcgccatcgccctgctggtctatctggtcattgccgtatctcagttgcggatgcgcaaaatcctgctggcgaaaggcggtgaaattcgccttaagatgtggctctatccgtggctcacctggctggttatcgcctttatcaccttcgtactggtggtgatgctgttccgtccggcacagcagttggaggtcatttccaccggcgcgctggcgatcgctatcatctgtacggtgccgattatgtcgcgctggaaaaagctgctattgtggcaaaaactgccgctacaaaatacgcgttaa

SEQ ID NO: 101829 - DNA, 1284 bp, Enterobacter aerogenes
atgaccagcaataaagcgttaatgcagcgccgtagcgacgcggtgccgcgcggcgtcggacaaattcaccctatctttgccgaccgtgcggagaactgccgggtatgggacgttgaaggccgtgaatatctcgatttcgccggcggtatcgcggtgttaaataccggccacctgcatcctgaggtgatcgccgcggtggaaggccagctgaagaagctgacccacacctgcttccaggtgctggcctacgagccctacctgcagctgtgcgaaatgatgaaccagaaagtgcccggcgatttcgccaagaaaaccctgctggtgaccaccggttcggaagcggtggaaaacgcggtcaaaatcgcccgcgcggcgaccgggcgtagcggcactatcgcctttaccggcgcctatcatggccgtacccattacaccctctcgttaaccggtaaagtgaacccttactccgcgggcatggggttaatgccgggccacgtttatcgcgcgctctacccgtgcgcgctgcacggtatcagcgatgatgacgcgatcgccagcatccatcgcatcttcaaaaatgacgccgcgccggaagatatcgccgctatcgtcatcgaacccgtccagggcgaaggcggtttctacgccgcctccccggcctttatgcagcgcctgcgcgcgctgtgcgacgagcacggcatcatgctgatcgccgatgaagtccagagcggcgcgggccgtaccggcacgctgttcgcgatggagcagatgggcgtggcgccggatatcaccacctttgccaaatccatcgccggcggtttcccgctggcgggcgtcaccggacgggcggaagtcatggacgccatcgcgccgggtggattgggcggcacctatgccggcaacccgattgcctgcgccgccgcgctggcggtactcaaggttttcgaacaggaaaacctgttggaaaaagctaatcagctcggcgacaagctgcgtaaaggcctgctcaatatcgccgaaacacatcgcgaaatcggcgacgtccgcggcctgggggcgatgatcgccattgaactctttgaagagggcgatcacagcaaacccaacgccaaactgacggcggatatcgtcgcccgcgcgcgggataaaggcctgatcctgctctcctgcgggccgtactacaacgtgctgcgtattctggtgccgctgactatcgaagatgcgcagatcgcgcagggactgaagattatcgccgactgttttaacgaagctaaacaaggctaa

SEQ ID NO: 101830 - DNA, 1449 bp, Enterobacter aerogenes
atgcaacttaaagatgcaactctgtttcgccagcaggcgctaattgatggccagtggcgcgatgcgcaaaacggcgacgtgattgcggtgaccaaccccgccaacggccagcagctgggtagcgtgccgaaaatgggcgccgacgaaacccgcgaagcgattgaagccgccaaccgcgccctgccagcctggcgtgccctgaccgccaaagagcgcgccacgcttctgcgccgctggttcgatctgatgatggagaaccaggacgatctcgcccgtctgatgaccctcgaacaggggaaaccgctggcggaagccaaaggcgaaatcagctacgccgcctcctttattgagtggttcgccgaagaaggtaagcgcatttacggcgataccattcccggccatcaggccgacaagcgcctgatcgtcatcaagcagcccatcggcgttaccgccgccatcaccccgtggaacttcccggcggcgatgatcacccgtaaagcgggcccggcgctggccgccggctgcactatggttctgaaaccggcgagccagacgccgttttccgcgctggcgctggccgaactggcgaatcgcgccggtattcccgccggggtatttaacgtggtcaccggctctgccggggctgtcggcaacgaactgaccagcaacccgctggtacgcaagctctccttcaccggctcgaccgaaattggccgccaactgatggaacagtgtgcgaaagacatcaaaaaagtgtcgttagaactcggcggcaacgcgccgtttatcgtctttgacgacgccgaccttgataaagccgtcgaaggggcgctggcgtcgaagttccgcaacgccggacagacctgcgtctgcgccaaccgtctgtatgtacaggacggcgtctatgaccgtttcgccgagaaactgcagcaggcggtggaaaagctgcgcatcggcgacggcctgcaggacggggtcaccaccggcccgctgatcgatgataaagcggtagctaaggtcgaagaacatattgccgacgcccttgcgaaaggcgcgcgcatcgtcaccggcggcaaaccgcacgcgctgggcggcaacttcttccagcccaccatcctggtcaacgtcccgagcagcgccaaagtggcgaaagaagagaccttcggcccgctggcgccgctgttccgctttaaagatgaagccgatgtcattgcccaggccaacgataccgaattcggcctcgccgcctatttctacgcccgcgacctgagccgcgtcttccgcgtcggcgaagcgctggagtacggcatcgttggcatcaataccggcattatctccaacgaagtcgcgccattcggcggcattaaagcctccggtctgggccgcgaaggttcgaagtacggcatcgaagattatttagaaatcaaatatatgtgtatcggcctttaa

SEQ ID NO: 101831 - DNA, 1269 bp, Enterobacter aerogenes
atgtatgatttcgtgattatcggcggcggcattatcggcatgtcgaccgccatgcagttaattgagatttacccggacgcccgcattgccctgctggaaaaagagtccggtccggcctgccatcagaccggtcacaacagcggagtgatccacgccggcgtttactatactcccggcagcctcaaggcgcagttttgcctcgccggcaaccgcgccactaaagccttttgcgagcagaatgcgattcgctacgacgtctgcggcaagatgctggttgccacctcgccgctggaaatggagcggatgcgcgcgctgtgggatcgcaccgccgctaacggcctgcagcgcgagtggcttagcgcgagcgagctgcgcgaacgcgagccgaacatcagcggactgggcgggatcttcgttccttcgagcggcattgtcagctatcgtgaagtagcggcggcaatggcgaagatcttcgaatccaaaggcggaaagatcgtttacgatgccgaagttagcgccctgaaagagcacgccagcggcgtggtcgtccacacccgccagggcggtgaatatgaagcatcgacgctgatcacctgctccgggctgatggccgaccggctggtgaaaatgatcggcgtcgatcccggctttatcatctgcccgttccgcggcgaatatttccaactggcgccgcagcacaaccagatcgttaatcatttgatctatccgatccccgatccggcgatgccgttcctcggcgtccacctgacccgcatgatcgacggtagcgtcaccgtcggccctaacgcggtgctggcgctgaagcgcgaaggctatcgcaagcgcgatatctcgctgaccgatacccttgagatcctgacctcgcccggcattcgccgggtactgcaaaacaacctgcgctccgggcttggcgaaatgaagaattcgctgtgcagaagcggctatctgcggctggtgcagaaatactgcccgagcctgacattaagcgatttgcgcccgtggcctgccggcgtgcgggcacaggcggtatcgccgcagggcaagctgatcgacgatttcctctttgtcactaccgcgcgttccatccacacctgtaacgcgccgtcgccggcggccacgtcggctatcccgatcggcgcgcacatcgtcagcaaggtgcaaaccctgctggcaagccagagcaatcccggacgcacgctgcgtgcggcacgtagcgtggagacactacacgccgcttttactcgttaa

SEQ ID NO: 101832 - DNA, 978 bp, Enterobacter aerogenes
atgaatgcactgaccgccgtaaaacctcatgctaatgatttggcccacagctacaccggtttttccttcgctccctccgcgcaatcgccgcgtctgctggagctgaccttcaccgccgaaacgaccgcgcaatttcttcaacaggtcgcgcagtggccggtgcaggcgctggaatacaaatccttcttgcgctttcaggtcggcaagatcctcgatgatatgtgcggcaaccagctgcagccgctgctgatcaagacgctgctcaatcgcgcggagggcgcgctgctgatcaacggtatcggcattgataacgtcgcccaggccgatgagatggtcaagctggctaccgccgtggcgcatttgatcggacgctccaactttgatgccatgagcggccagtattacgcccgcttcgtggtgaaaaacgtcgataactcagacagctatctgcgtcagccgcaccgcgtgatggagctgcacaatgacggtacctatgtcgaagaaattaccgactacgtgctgatgatgaagatcgatgaacagaacatgcagggcggcaattcactgctgctgcatctggatgactgggaacatctcgacgaattcttccgcgatccgctggcccgccgtccgatgcgctgggccgcaccgccgagcaaaaacgtcagcaaagatgtctatcatccggttttcgacgtcgaccagcagggccgcccggtaatgcgctatatcgaccagtttgtgcagccgaaagatttcgaagaaggcacctggctgagccgcctctccgatgcgctggaaaccagtaaaaacattctttccgtaccggtgccggtgggtaaattcctgttgataaacaatcttttctggctgcacggtcgcgaccgctttacgccgcatccggatctgcgtcgcgaactgatgcgccagcgcggctactttgcgtattccacgaatcattaccagactcatcaataa

SEQ ID NO: 101833 - DNA, 705 bp, Enterobacter aerogenes
atgccgctgaccaccaccgaaccgaccgggttacgctatgtatttcagccgatgttcaaccgcgaaggcaaaatgatcgcggttgaatgtttgacccggtttgctcatcacgagcctgctagtccgcaagatatagaacggtttttcagtgaggcatcggaatcactgcgcgcccgcatcctgctcgaacaaattgagctggtcaggcagcatcagcagtggttccgccagaacgacgtcatggtcacgctcaacgtcgacgagtcgacgttgcatatgctgcatgatgattttatcgccgagtgtgtgaaaaccatcggctgcctgcattttgaggttaatgaattttccaacacgctggtgaaacgcaccccgaccatcgatgccctgacggacaaatactccttctggctggatgattttggcgccggttacgccgggttcgccgccctgacggcgcaaccctttcgttttatcaagaccgacaagaacctgttatggagcctgctggaaaagaaaaacggccagcagttgatggactcgctgctgcactattttcaggcgaatcagtatcaggtgatcgtcgaaggtattgaaaccgaagcccatcttcagtggctggaaaacatgccgtggtttgccctgcaggggcttctctggcgggaacaaaccattgaagccctggtggccagcgtcgagaaataa

SEQ ID NO: 101834 - DNA, 1041 bp, Enterobacter aerogenes
atgtcgaagtttaacctcttatcccgcaccgggctgacgctgctggtactctcaagcgcgctgttctccaccagcagcttcgcgctgagctgtaagaagaacggtaccgaagtatcgcagaccatcgcgctcaccgatcagattaacgtttcgaccgctaacctgaagccgggtaccctgctgtggcgttcgccgacgtttacctccacctttacctgtaccgatacggatcacatgcccaatggtgaagatgcgtatctgtactgggatccggaaacccggatgcagaatatccacaactcgctggaagtcggcgtaacctatctcagcaccgatattaaaccggtaaaaggtcagaaaacggatatcgggccaggtacgctctgccgccgcaaccgtcccggcggtgcatgccagtctccggcgaccccgcagaccgtcacggtgacctactcggtttatattaaagccaccggcaatccgccgccgtcaaacggcgtgattaacgacaccaaccgctacgctatcttccaggttgacggtgttggcggcctcaacagccgcccgaatagtaacttccgcgcgtgggtcaccgggcttggtaatattcgctttatcgcctgcaacccgaaaatcaccgtctcggcgaacaatggttcaacggtcaacttcggcagcatcccggcgcgcaatgccgtcgtcggcgccattgagaaacaggttccgttcagcgtccgcgccgacctgaccggcgccggccaggattgccagggtcagaccttaatggccagcttcagtacccagcagccgactcaggacaccaacaccattctgccatccaacgatagcggttttggcatcctgctctcgcgcgccgatgcgccgacgacctggctttccatgaataccccgacgcagttgggcatgattaacggcagcgtggtagaaagcaacttcctggccagcctgaaatggctaagcgttaagcccaaaatcggcacctttaatgcgacggccaatatcgacgttacctttaaatag

SEQ ID NO: 101835 - DNA, 2604 bp, Enterobacter aerogenes
atggctagccataataaaataaggacgatccctggatgtctggcgcagcacgttcgctttgctgtttacgcctcgacaatgtcattactggcgacaccatttgtcaatgccgaagagcaattcaatacctctttcatccgcggggcgaataacgcctcgctggtgcaaaacctctctaccggcgacgatattttaccgggtaaatattccttcgatatttacctgaataaaaatcgcgtcgatcaccgggaaatcgaatttaaaaaagatacgcctaacaccccgggttatttctgtttagatgccgacagttaccgttcatacggcgttctggtaccggacaccgccggcagcagcgcctgctacgatctggtaaaaaatattccaggcagtagcgtgagctggaacgccgcgctgcaggagctgaacatttccgtaccgcaaaccgaactcgaagcgcgaccacagggcgagatttcgccgctggtctatgacgacggcatcaacgccggtttcgttaactacgctttcagcggcagccactcccgtttctccagcggcagcagcaaacaggacagcgactactacttcctgaccctcaataacggccttaacgtcggcgcgtggcgttttcgcaacaactcttccctgtcaaaacagaccgggcaaaaagagcagtggaacccgatttccacctgggcggaaaccgatatcgcctcctggcgcagccgtattcagattggccagagcaacaccaataataacgtgttcgatagcttccagttccgcggcgcgcagatttccagcgtcccggaaatgctgccggacagccgtcgcggctacgcgccggtcgtacgcggcgtcgccaataccaacgcccgcgtcgaagtgcgccagaacggctataccgtctacagcaccgtggtgccgccgggaccgttcgcgctgaccgatatttcgccaagcaccctcagcggcgacttagccgtaacggttatcgaggcggatggctctcgccatagcttcaccctgccttactcctccgtgccgaatatgctgcgcgacgggatctgggagtatcaggtgaccgcgggtaaataccacgacggcaccaataattatcagccgcaatttatccagggcaccgtggcccacggcgccggctccgactatacgccatacggcgggattatcatggccgagcactatcgctccggcgtggtcgggctgggtaaaaacatgggcgaatacggggcagcctccgttgacgcctcatggtctgataccgatctggcttccggcgagaacaaacgcggcgccagcgtgcgcttcctctattccaaatcgctcaacaccctcggtaccgacgtgcagatcgccggctaccgttattcgacgtcgggcttctatgacttctccgacgcggtagctgaacgtaacaactggcagaacggtttctaccacacccagtattacgatcagagcgacgataaaaccggcgcgccggattgggcgacgcaaaaccagcgccgtcgttactacgactcgcagcagtacaacaacaaacgccagcgcgtcgagatgacggtcaaccagcacatcgccggcgcttcgctgtacgcgacctttatccgtcagaactactggaacacctccgcatacgaccgcaccatccagaccggtttcaacaccacctggaatcgcgtcagcgtcggcgtgttttaccagaacagccgcagtaactacggctatagcgacaacagcgttaacctgaacgtctcggtgccaatcaacatctttggcccggaccacgaaagcacggttaactttaacgccaccaacagcaagcagagcggtagcggctacagcgccgggatgagcggcacgctgcttgatgacaaccgtatgaattacttcgtacagagcggccacacccagcacggcggcgataccagcctggtcaacctgggttatctgggcagcatgggtaacgtcgatctgggctacagctacaacaacaactatcagcagacttcgctgaacgtctccggcggcgtggtcgcgcactccggcggcgtcaccctgtcgcagccgctacaaaacacctttgtggtggtgaaagcgaaaggggcgcagggcgtgcgtctggaaaaccagccaggggtagcgattgaccgcttcggctacgcggtgctcacttctgcgatgccgtatcgccacaaccgcgtcgcgctgcgtacttcggatattggcaacggccttgaaattccgctggcggcgaaagatatcgtgccgaccgagcgcgccatcggccgtgtgacctttgaaacgcatctcggccagagcctgcttatccacgccaaactggcggacggcaacgtgccggtgattggcgccaatatcttcggccagaacggcgaacatgtcggcgtggtcggtacccgcggcgaagcctacgtgtccggcgttcagagcggcgaccgtctgcagatgaaatggggcgacgatgccgacgcctcctgcagcctgacggtgccagagttacctgctattcaagccgatcaacccggtggttatcaggtcgtctccctgacctgtaaataa

SEQ ID NO: 101836 - DNA, 684 bp, Enterobacter aerogenes; identical to SEQ ID NO: 87259

SEQ ID NO: 101837 - DNA, 528 bp, Enterobacter aerogenes
atgaataagaaattactgcctgttgtagcactgatcctgtccgcgtccgccaccagtgcttacgcagttaacggcaaggtcaacttcaccggtgaaatcatccagtcaacctgtactgtgacttctaccgaccagaacaaagacgttttcatcggtaaatacccgactaccgcgttcaacgctgttggcgatgttaccgcttctaaagcgttcaccatcaacctggaaaaatgtgaagccggtgattactccctgcgcttcgacggtgcgaccgttgctggtaacccgaacctgctgtccgttgataacgcgaaaggcgtaggtatcgaaatcctgaccaacgacgaaaaaatcgtcccaatcaaccagagcgcagacgacaactccccgtgggttaacgttgcagcgtctgacgacaacagcggcactgcggtattcaatctgaaagctcgctacaaatctttcctgaaaaccgtggaagctggctctgctaacgcaaacgccacctttaccatcgagtacaaataa

SEQ ID NO: 101838 - DNA, 891 bp, Enterobacter aerogenes
atgacacgcagctatcttcctctcaattcactacgggcctttgaagcagccgcccggcatctcagttttacccgcgcggcgattgagctcaacgtcacccactccgccatcagccagcatgtgaagacgctggaggaacatcttaactgtcagctgttcgttcgcgtgtcgcgcggcctcaagctcaccaccgaaggagaaggcctgttaccggtactcaatgagtcgtttgaaaggattgccgggatgctcgaccgtttcaccggtcaccaggcgcaggagaagctcaagatcggcgtagtcggcactttcgccacgggtgtgctgttcccgctgctgccagccttctggcgcgagtgtccgcatatcgatttgcagatatccacccataataatcgcgtcgaccccgccgccgaggggctggattatgtgattcgctttggcggcggcgcctggcatgataccgccgcgcagtatctgtgcgccgccccgctctccgcgctgtgcgccccgtcgttagccgcccggatacatcatccgaaggatattttgcagttcacgctactgcgttcttatcgccgcgacgaatggtcggcgtggatgcaggcagcgggagaattgccgccttcgccaacccatcgggttattgtcttcgactcatccgtgaccatgctggaagcggcgcaggcaggcttaggcgtggctattgccccggtaaaaatgttcagccatctgctggaagaaaaacgcattgtgcagccgtttaagattcatatcgatctcggcaactactggctgacacgtttgcaatcgcgtctggaaacgccggcaatgttgcatttttcccgctggctggcggaggccttaaaaggggttaattcggcggagtaa

SEQ ID NO: 101839 - DNA, 1161 bp, Enterobacter aerogenes
atggaaaaatacttcatgatgaaaaaatcccttacaggcgtactgctgctgggcgcctcattttcgacttttgccgcgccgcaaacggcggagcagcttcgcgaactggtcaatcagaccatcacgccgttaatgaaagaacaggcgataccgggcatggcggtggcggtgatctatcacggcaaaccctattatttcacctggggccaggccgatgttgccgggcagcgtccggtgacgcgacagacgttgtttgagctgggctctgttagtaagactttcaccggcgtgctgggcggcgatgcggtggcgcgcggtgaaattaagctcagcgatccggcgcagaagtactggccgcagctcaccggccagcagtggcaggggatctcgctgctgcatctcgccacctataccgcaggcggtctgccgctgcaggttccggacgaggtgacggatgaagcggcattactgcgttactatcagaactggcaaccgcagtgggcgccgggtagtaaacggctgtacgccaatgccagcattggcctgttcggcgcgctggcggtgaaaccttccggcatgagctttgaacaggcgatgagccagcgggttttgcagccgttaaaactgagccacacctggattaacgtaccgcccgcccagagcaaggactacgcctggggttatcgtgacggtaaagcggtacatgtttcgccggggcagctggacgctgaggcttacggcgtgaagtcgagcattgaggatatggcgcactgggtgctggcgaatatgaacagcgaagcggtgcaggataaaaatctgcggcaggggatccagctggcgcagtcgcgctattggcgggctggggagatgtatcaggggctcggctgggagatgctgaactggccggtgccggccgaggtagtaattaacggcagcgataataaggtagcgcttgccgcgacgccggtaacggcggtcaatccgcccgcgccgtcggtgaaagcctcctgggtacataaaaccggctccaccggcggattcggcagctacgtggcttttatcccgcaacaggatctcggtatcgtgatgctggcgaataaaagctaccccaacccggagcgggtgaaggctgcgtatcatattcttgaggcgctgcagtaa

SEQ ID NO: 101840 - DNA, 639 bp, Enterobacter aerogenes
atggctggacgtatcgactaccagattgaaaaatttcagttcatcgagcgcaacgaatctccgcgtattacccgccagtgggcggaagtcattgctgaatgtcagcaggaaaaggcaaacagtgaaacgcgtttgcgtactgcgttgctgaatgtcgactacgccaccagcttcgaactgccgtttcgtttattgcttatccgcgccccgcagctggtggatcgcttacgccatgcactggcgttgaatcaaaagaacgtggtgattaatggtaagaaacgcggctgcgtttacagcctgaaagccgatctcagcgctgtaccagaggagtttcgttatcgctttgtgagccggattactcgcagcggaccggatgcgctctccgccgcgccctatcagcagctggcaaaagagataaaggcgccgcgcgagcggttacgtctggcgctggaaagtggcttgcaggtcaatgcgctggatgggctgttctggtttggcatccagcgtatcgccgcggatatttcggcgctgcgttctgcgggaatggcgattacgactgcggaagtggaggtggcggatagtctgaccagaacgacgagaatgatagcggcgtatcaggtggcgacctgctcccgttga

SEQ ID NO: 101841 - DNA, 315 bp, Enterobacter aerogenes; identical to SEQ ID NO: 92106

SEQ ID NO: 101842 - DNA, 1254 bp, Enterobacter aerogenes
atgctggaacaaatgggcattgcggccaaagcggcctcttaccaactcgcgctgctttccagccgcgagaaaaatcaggttctcaacaagattgctgattatctggaagcgcagaccgaagagatcctgcgcgccaacgccgaagatctcagcgacgcccgcgccaatggcctgagcgacgcgatgctcgatcgcctggcgctgacgccggcgcgcctgcgcggcatcgccgatgacgtgcgtcaggtgtgtagcctggcggatccggtcggccaggtgattgacggtggtctgctggatagcggcctgcgtatcgaacgtcgccgcgtaccgctgggagtgatcggcgtgatttatgaagcgcggccgaacgtgaccgtcgatgtcgcctctctgtgcctgaagaccggcaacgcggctattctgcgcggcggtaaagagacctggcgcaccaacgccgcgacggtgaaagtgattcagcaggcgctgcaggagtgcggcctgccggctgccgcggtgcaggcaatcgagagcccggatcgcgcgctggtcggcgaaatgctgaagatggataaatacatcgatatgctgatcccgcgcggcggcgcaggcctgcataagctgtgccgcgaacaatccacgatcccggtgatcaccggcggtatcggcgtgtgtcatattttcgtcgacgattcggcagagatcgcaccggcgttgaagatcatcgttaacgccaagacccaacgcccgagcacctgcaataccgccgagacgctgctggtacaccgtaatatcgccgataccttcctgcctgcgctgagcaaacagatggcggagagcggcgtgacgctgcacgccgacccggccgccctgcccctcctgcagaatggtccggcgaaggtggagccggtgaaagcggagcagtacgacgacgagtatttgtcgctggatctgaacgtgaaagttgtcgccgacctcgatgaggcgattgcccatattcgcgcgcacggcacccagcattccgatgccattctgacgcgtaccctgcgccatgcgaatcgctttattaatgaagtggattcgtcggcggtatacgttaacgcttctacccgattcaccgacggtggccagttcggcctcggcgcggaggtggcggtcagcacccagaagctgcacgcccgcgggccgatgggcctggaagcgctgactacctataagtggattggtttcggcgacgataccattcgtgcttaa

SEQ ID NO: 101843 - DNA, 1104 bp, Enterobacter aerogenes
atgagtgatagccagacgctggtggtaaaactgggcaccagtgttttaacgggcggatcccgacgcctgaaccgcgcccatatcgttgagttagtgcgccagtgcgcgcagctgcatgccatggggcaccgcattgtgattgtgacttccggggccatcgccgccggacgtgaacacctcggctaccctgaactgcccgccaccattgcctcaaaacagctgttggcggcagtcggccaaagccgtcttatccaactgtgggaacagcttttctctatttacggcattcatgtcggccagatgctgctgacccgtgccgatatggaagatcgcgagcggttcctcaacgcccgcgataccctgcgcgcgctgctggataacaatattgtgccggtcattaatgagaatgacgccgtcgccaccgctgaaatcaaagtcggcgacaacgataatctttccgccctggcggccattctcgccggcgccgataaactgctgctgttaaccgatcagccgggactctttaccgccgacccacgcagcaatccgcaggccgagcttattaaagatgtctacggcatcgatgacgcgctgcgcgccatcgcaggcgatagcgtttccggcctcggcaccggcggcatgggcaccaaactgcaggctgcggacgtcgcctgtcgcgcgggcatcgataccattatcgccgccggcaaccgcccggacgttatcggccacgcgatggaaggcctgccggtgggcacctgtttccacgctcaggaatcaccgctggagaaccgcaaacgctggatcttcggcgcgccgccggccggtgaaatcaccgtcgatgccggggcgacccaggctattctggaaagaggaagctcattgctgccaaaaggcatcaaaaccgtcagcgggaatttctcccgcggcgaagttatccgaatccgcagtagcgaaggccgcgatatcgctcacggcgtaagccgctataacagcgacgccctgcgcctgatcgccgggcagcactcgcagcaaatcgatgccatcctcggctatgaatacggcccggtggccgtccatcgcgacgatatgattacccgttaa

SEQ ID NO: 101844 - DNA, 1053 bp, Enterobacter aerogenes
atgaaaaagcgttcactggcattaatgatgatgggttttgttgcttcttcggcttcacaggcagcggaagtatacaataaagacggcaataaactggacgtgtacggcaaagtgaaagccatgcactacttcagcgattatgacagcaaggatggcgaccagacctacgttcgcttcggtatcaaaggcgaaacgcagatcaacgatcaactgaccggttatggccgctgggaatccgaattctccggcaataaaaccgaaagcgattcctcgcagaaaacccgtctggcgtttgccggcgtgaagttaaaagagtttggatcatttgactatggtcgtaacctcggcgcgctgtacgacgttgaagcctggaccgatatgttcccggagttcggcggcgactcctccgcgcagaccgataacttcatgaccaaacgcgccagcggcctggcgacctaccgcaacactgatttcttcggcctggtggatggtctgaatatgaccctgcaatatcagggcaaaaacgaaggccgtgaagcgaaaaaacagaatggcgacggcttcggcacctctttaagctatgatttcggcggcagtgatttcgccgtcagcgcggcttataccagttctgaccgtaccaacgatcagaacctgctggcgcgcggccagggctccaaagcggaagcctgggctaccggcctgaagtacgacgccaacaatatctacctggcgacaatgtactctgagacccgcaaaatgaccccgatcagcggtggttttgctaataaagcgcagaactttgaagcggtcgcccagtatcagttcgatttcggtctgcgtccgtctctgggctatgtactgtcgaaaggcaaagatattgaaggtgtcggcagcgaagatctggtcaattatattgacgtcggcctgacctactacttcaacaaaaacatgaacgcctttgtggattacaaaattaaccagctgaagagcgataataagctcggtattaacgatgacgacatcgtcgcgctggggatgacctatcagttctga

SEQ ID NO: 101845 - DNA, 567 bp, Enterobacter aerogenes
atgaagcccaaactcacccacgctttattacttgttcctttattgattttgccaggatgttcatcttccccaaaaaaaccgcccaaggcggtggcgcagcatcattatgagccgatcgacagcggctccgacgatctgataccggtgctggcagccctgcacgatcagatgcacacctgggacggcaccccttatgaatggggcggcaccgaccagagcggcgtcgactgttccggctttgtctggcgtacgctgaaggaccgcttcaatctgccaatggaccgcgtgaccaccggcgatcttctgcatatgggggtgcgcgttagcaagcagcagttgcgacctggcgatttagtcttcttccgcattcacggcggcatgcacgtcggtttctacgatactgaccacaacttcctgcacgcctccgccagccagggcgtcatgcgttcgtcgctggataatccgtactggaaccgcgtattttatcaggcgcggcgcttgccgaaggaatataacgcgcaggtcaccatgaataacgacgatctgcatctggcgaaaaaccgctaa

SEQ ID NO: 101846 - DNA, 798 bp, Enterobacter aerogenes
atgcgcaatatcgcgattaatgatgtcgatcatctgccgcgccgggtattaggcctgggtagcgattatccgcctgacacccttttaccgcgccatcatcaccggcgagcgcagtttctctatgccgtgaatggcttgatgaaagtcgaaaccgatgacggccagtggctggtgccgccgttcagcggcgtatggatacccgctaataaaccgcatcgcgtctggatgccaggcgtgagcacccatagcctgtatatcgaaccgcaggacgcgccgcgcgccggggtacgctgcgaagtattgcaggtttcgccgctgctacatcaactgctattggccgcctgccagttgccgctgttgtatgaagagagcggacatgatgcggcgcttatcgccctattactgtttgaactgcaggccgccccgccgctgccgatgtttacgccgctaccgcaacatccgcggctggctgaactatgcagcgcgtttctccgccagccggagattcacagtacgccggagctgtgggcccaaaagatgagtcaaagcctgcgtaccttcaaccgccgctttttgcaggagaccgggatggcgtttcgcgactggcgtcataaagcctgcctgatgtacgctctcaccgccctgcgagaaggacgaagcattaccgacgtggcgttaagccttggctatgagcatccggcggcatttaccgccatgttccgcaaagcgatgggctatgcgccagcctcttttatccgccatcttaaaggaggcacgcctgtctctcgcgtcagataa

SEQ ID NO: 101847 - DNA, 798 bp, Enterobacter aerogenes
atgatatttgggctttttgtttgtggactgttgtccggggtaaccacctggctgtttggcttcggcggcggctttgttaccgtgccgctgctttacctgttgctgagccatcagggcacagtaggcggtcaggcgatgcaaatagcggtagcgacgtcggcgctggtgatgctgtgcacgtcgctgttggcaagcggccgccacctgcgcgccggaacggttcactggcgctccctgctgccgatacttggcggcatcgccatcggcggtattgccggcgcggcgctggcgctgaaggtcaacggcgagtggatccgctggctgttcattttgtacctggcggtgaccattgtggattgctacgctcgccccggctttatggcgccgtcgacggcttgcgcaccgtcgagtgcagggcgcgagactatccttggcggcgggattggcctgattgccgccttccttggcgttggcggcagcgtgatgaccgtgccgctgatgcgccggcgtggcgcgacgatggcgcaggccgcggcaatggccaacctgctgacgctgccgctggcggcgaccgccagcctgacgtggctgctgatggcgccgatggcggcgctgccctccggtttcatcggtaatatctggtggctggcggccgggctgctggtggccgggagctggttgggattgcggggcgcatcgcgctggttggcaaaactccccgatcgctggcacgtgcggatctacccgctactattgctactggtgttgctggcgatgggctttggcggggtgggctga

SEQ ID NO: 101848 - DNA, 666 bp, Enterobacter aerogenes
atgtctaatgctgtgacgattttcgatctggataacaccctgattaaaggggacagtagtacgctgtggagccagtttatggtgcgcgaaggctgggtgagcgatccggaatatctggcgcgcgaggcgcagctgatggcggattacgaccgcggggaaatgaatatcgccgattatgttgcgctgattcaggcgccgctgatcggcatcccgcaggcgcaggtggatacgctggtggcgcggtttgtgcgcgaaaaggtgttgccgcgggtctacccgcaggcatgggacgttattcgtaccttacaggcgcgaggggagaaaatgttggtgatctccgcctcggtaacgctgctggtgcaggcgatagccgccgagctggggattgaacaggcgttgggtattgatgttgaaatggcggatggcggctacagcggtgtgattgccggtactccgagctatcagcagggcaaagtgacgcgcctggcacagtggcgggaggcgcatcctgactatactggcgaagtcactttttataccgattcgataaacgacctgcccctgtgcctgcatgcggatcgcgtgcggttggtcaacccgtgtccgcagctgcaggcagccaacgcccggtacggctggccagtgctggcgtggcggatcgaataa

SEQ ID NO: 101849 - DNA, 885 bp, Enterobacter aerogenes
atgagccaatggcaacatcaaccggatatcgccgccagccgccgccagcatcaggcgctgtataagactcaagggcgatatctgcgctacgtcgccctgctggcgctggcgagcgtactttattacgtctggttctttatgcagttcggtatcagtagcgaacaactggctaccggactacagcagatggggcgctatctgctgcggatgtttgtctggcacgacttctggaactggccgtttgcctattacttcacgcaaatcgccattacgcttgccatcgtcttcgccgggacgattaccgcgacggtcattgcgctgttgctgtcattcctggcggcgcgcaatattatgcgcggcgtgattcccggcattatcgccgtgttgatgcgccgcttgtttgacatgctgcgcggtatcgatatggctatctggggtctgattttcgtgcgcgccgtagggctcgggccgctggcgggggtactggcgattattatgcaggatactggcctgctgggccgcctgtatgctgaaggccatgaggcggtagaccgttcgccgggccgcggcctcaccgccgtcggcgctaatggtctgcagaaacaccgcttcggcattttcacccagtcgttcccgactttcctggcgctgagtttatatcagattgaatccaacacccgttccgccgcggtattaggttttgtcggcgcgggggggattggcctcatttacgcggaaaatatgcgtttgtggaactgggatgtggtgatgtttattaccctgttgctggtcgcggtggtcatggtgatggacaccctctccgcctggctgcgccgccgttacatcggcggcagcgtagtgccgttgtatcaaagtccgcaataa

SEQ ID NO: 101850 - DNA, 873 bp, Enterobacter aerogenes
atgaataatacccataccgaatttgaacgttattaccagcaggtcaggacacggcaaaagcgcgataccttcggctggtcgttggtgctgctggcgctctactttgccgccgggcacgccgccgagtttaatctgcccactatctggcgctcgttgccaaactttctcgactatatgttcgagacgctgccgacgctgcatccgggcgttctgttagccgattcacataccaaaggctcgctggcgtactggggctatcgcctgccaattcagctaccgctgatttgggagacgctgcagctggcgctggcctccacgctggtggcggtcgcggtagcgacaatactggctttcctcgccgccaataatgcctggtcacccgcgccgctacgcttcgccgttcgcgtactggtggcctttttacgcaccatgcctgagctggcctgggcggtcattttcgtcatggcgttcggtatcggcgcgatccccggttttctggcgctgatgctgcatacggtcggcagcctgaccaaactgttctatgaagcggtggaaagcgcgcaggataaacctgtgcgcgggctggcggcctgcggggcatcggcgctgcagaaggtgcgctttgccctgtggccgcaggtgaaaccgatttttctctcctacggttttatgcgccttgagatcaacttccgctcatccaccattcttggcctggtaggggccggcgggatcggccaggagctgatgaccaacattaagctcgatcgttacgatcaggtcagcatgacgctgctgctgatcattattgtggtgtcgctgctggatatgctttccggccgcctgcgccagtgggttctggaggggaaaaaatga

SEQ ID NO: 101851 - DNA, 942 bp, Enterobacter aerogenes
atgaacaaacatataaatggcgcagttcgtttatccgcagcaatcgcagctctgttactgacgtggcaagcgagcgccgctgaacagccgaaggaattaaatctggggatcctcggcggtcaaaacgccacgcaacaaattggcgataaccagtgcgtgaaacagttccttgataaagagctgaaggtcgataccaaattacgtaactcatccgattattctggcgtcattcagggactgctgggcgggaaagtcgatgtcgtattaagtatgtcgccttcttcttatgcctcggtctatatcaataacccgaaagccgtcgatattgtcggtatcgccgttgacgataaagatcaatcccgcggctaccactcggtggtcatcgtcaaagctgacagcccgtataaaacgctggacgatttaaaaggcaaagcttttggcttcgccgacccggattccacttccggttatttaattccaaaccacgcctttaaacagaaattcggcggcgacgcggataacaaatacaataacttcttctccagcgtgaccttctccggcggccacgaacaggacattctcggcgtgctgaacggccagtttgccggcgcggtcacctggacctcgatggtcggcgactacaacagcggctacagcgtgggcgctttcaatcgcctgattcgcatggatcatccggatctgatgaagcaaatccggattatctggcaatcgcctctgatcccgaacggcccgatcctcgttagcaatgcgctgccggcggacttcaaagccaaagtcgtcaccgcgcttaaaaaactggataccgacgatcacgcctgtttcgtgaaagcgatgggcggtactcagcacatcggcccgggcagcgtggccgatttccagcagatcatcgatatgaaacgcgagctggttagcgcgcgttaa

SEQ ID NO: 101852 - DNA, 843 bp, Enterobacter aerogenes
atgaacagctctcttgccgcggtggcggaaaccgaattttcgctaattacgcccatcgccccaacccggcagcggaaagtcttaagcgtgcgcaacctgagtaaatcttataatgcgcagcaaaccgttctcgataacatcagctttgacctccatgccggcgagctggtgggcgtgattggccgctcgggagccgggaaatccacactgctgcatgtcctgaacggcactcatagcgccaccggcggtgaaatactcagctttccggaagtgggtatgccacatgatgtttcacgcctgaaaggacgcgcgctcaatgcctggcgcagcgaatgcggcatgattttccaggacttctgcctcgtgccgcgccttgatgtgctgactaacgtactgctcggccgcctgagtcaaacctcaaccctgaagtcgctgtttaaggttttccctgacgccgaccgggcgcgcgcgatttcccttctcgagtggatgaacatgttgccgcaagccctacagcgggcggaaaacctctccggcggccagatgcagcgcgtagcaatttgccgtgcgctgatgcaaaaccccgggatcctgctggcggatgaacccgtcgcctcgctcgatcccaaaaacacccagcgcatcatgaatgtactgcgggaaatcagcggccaggggattagcgtgatggtcaacctgcattcggtcgaactggtcaaagagtactgcacccgggtcattggcgtcgccaaaggccgcatcatattcgacgatcatccggcacagctgactcaggatgtcctgcatcggttgtacggcgatgaaattagccaattgcattaa

SEQ ID NO: 101853 - DNA, 543 bp, Enterobacter aerogenes; identical to SEQ ID NO: 87241

SEQ ID NO: 101854 - DNA, 588 bp, Enterobacter aerogenes
atgaaaaaaaaggttattgctattgctctggtaacggcgtttgctggaatgggtgttgctcaggctgctgatgtcactgctcaggccgttgctacctggtctgcaaccgcgaaaaaagacacttccagcaaactggttgttaccccgcttggcagcctggctttccagtatgccgaagggattaaaggctttaactcacaaaaaggtctgtttgatgttgcggttgaaggcgataccacggcgactgccttcaaactgacttcacgtcttattactaacactctgactcagctggatacctccggctcaacgctgagcgtgggcgtggattataacggcgccgcggtagaaaagagtgctgacaccatcatgatcgacaccgctaacggcgtactgggcggcaacctcagcgcgctgtctaacggctacaacaccgcaggccgcaccaccgcgcaggacggctttaacttctccatcatcagcggtaccaccgacggcaccaccgcggtaaccgattacagcacgctgccggaagggatctggagcggtgacgtgagcgtgcagttcgacgcaacctggaccagctga

SEQ ID NO: 101855 - DNA, 669 bp, Enterobacter aerogenes
atgaaaaaacatcttctggccattggcctgctgctgggattggcgaatcccgcgctggcgctggatgtcggcgatatctcttcctttatgaacagcggcagcagcacgctgagtaaagagattaaaaataccaccgacagcggccgcttaatcaacattcatctggaacgtctctcttcaccgctggatggcggcaaagtgatcccgatggataaacaggatgaagtcctgttgacccccgccagcttgttattgcccgcaaaggccagtgaagtggtgcgctttttctacaaaggcccggcggatgataaagagcgctactaccgcattgtctggttcgatcaggccttaagcgatgcccagcgcaatggctcccagcgcagcgcggtggccaccgcttcagcccgcatcggcaccattctggtggtggcgccgcgtcaggctaattttcgctaccagtttgccggcgacacgctgaccaataccggtaacgccaccctgcgcatcatcgcctacggcccgtgtctgaaaatcgccgatggcaaagagtgcaaagaaaactactacctgatgccggggaaatcgcgtcgcttcacgcgcgtcaatattgctgacaaaaaaggacgggtcgcgctctggcagggcgagcagtttgttcccgtgaaatag

SEQ ID NO: 101856 - DNA, 2526 bp, Enterobacter aerogenes
atgcctttacgacggatcacccctggactgaacgcgctgcttgcctccggcatggttcttttgctggcgccttatagcgacagcatggccgccgagcgcgtgcagcaaatcggcggcgtgattatcccgcaggctttcagccaggctttgcaggacggcatgagcattcctctgtttattcatcttgaaggcagccgcgataatcagaacgatcagcgtatcggcgccgcgtatatctggcttgatggcgacgtgctgcgggttcggcaaatcaccctcgaagagggcgatgacaacgctcgcgttagcgacgagacacgtcaacagctcagacgtttatccaatgaggctttcaacgacgcgctgaagatccccttaaccgatgccgcgcagctacaccttagtctgcgccagttgctgttgcaactggtggtgaaacgtgaggcgctgggaaccgtgctgcggtcgcgcagcgaggatattggccagtcgagcgttaaaactttcagtaataaccttacctacaacctcggggtctacaacaaccagatgcgtagcggtggcagtaatacctccagctatctgtcactcaatagcgttagcgcgctgcgcgagcatcacgtggtgctcgacggctcgctgtacggcatcggcaccagccaccaggacaacgaactgtataaagcgatgtacgagcgcgacttcgccgggcaccgttttgccggcggaatgctggatacctggaacttacaatcgctggggccgatgaccgcgatttcggccggtaaaatctacggcgcgtcgtggggcaaccaggccagctcgacggtatttgataacagccagtcggcgacgccggtggtggcattcttaccggcggcaggcgaggtccacctgatgcgtgacgggcgcctgttaagcgtgcagaacttcgtcatggggaatcatgaagttgatacccgaggcctgccgtacggtatttacgacgttgacgtcgaagttatcgtcaacggaagagtggtcagcaaacgcacccaacgcgtcaacaagctgtttactcgcggacgcggcgcgggcgcgccgctggcctggcaaatctggggcggcaatttccatatggaccgctggtcggaaagcggtaaaaagacgcagccggcgaaagagagctggctggcgggggcatcggcttccggctcgttgagcacgctcagttgggcggccaccggctacggttacgataacaatgccgtcggtgaaacgcgcatcacgctgccgctgaccgaggcggtgaatatcaacctgcaaaacatgctggccagcgacagctcctggagcagcattggcagcgtcagcgccaccttacccggcggctttagctcgctgtggattaaccaggaaaagaccgttataggcgataagctgcgccgtagcgatgccgacaaccgggcgatcggcggcacgctgaacctgaacgccctgtggtcaaaactaggcacttttagcatcagctacaacgatgaccgccgctacaacagccattactacacggcggattattaccagacgatttatagcggctcttttggctcgctaggcctgcgcgcgggcttacagcgctataacaacggcgatagcaacgccaacaccgggaaatatatcgccctcgatttatcactgccgctgggcaactggttcagcgccgggatgacccatcagaacggctataccatggccaatatttcggcgcgtaagcagtttaatgaaggggcgattcgaaccgtcggcgccaatatttcgcgggcgatttccggcgataccggcgacgacaaaaccttaagcggcggcgcttatacgcagttcgaaacgcgctacaccaacggcacgctgaacgtcaacagcggcgccgacggctacgtgaacaccaacctgaccgccagcggcagcgtcggctggcaggggaaaaatatcgccgccagcgggcgaaccgacggcaacgccggagtgatcttcaataccgggctggaagacgacggcaagctcagcgctaaggttaacgggcgcatcgtgcagctcagcggtaaacgcaactacctgccgttgtcgccgtacagccgctatgaagtcgaactgcagaacagtaaaaactcgatcgacagctacgacattgtcagcggtcgtaagagtcacctgacgctttatcccggtaacgtggcggtgatcgagccggaagtgaagcaaatggtcaccgtctccgggcgcatccgcgccgaagacggcacgctgctggcgaacgcgcgcattaataaccatatcgggcgcacccgtaccgatgagaacggtgaatttgtcatggatgtcgataaaaaatatcccaccatcgattttagctacggcggaaataaaacctgtgaagtggcgctggagctcagccaggcgcgcggcgcggtgtgggtaggggatgtagtatgcagcggtctctcttcatgggcggcggtgcagcagacaggagaaggtaatgaaagctaa

SEQ ID NO: 101857 - DNA, 1644 bp, Enterobacter aerogenes
atgaaagctaagtggctagctctgatggtagcgatgctcgcggaactgtcgatatcgcaaacttatgccgcgatctcgaaaaccacctggagcgatgcgccagcgcgcgaattcgtcttcgttgaaaacaactctgatgataacttcttcgtcacccctggcggcgcgttggatccgcgtatgaccggtgcaaaccgctggacgggtttaaaatacaacggatcaggcacgatttatcagcagagcctgggttatatcgataatggctataacaccgggctcaatgcaaactggaagttcgacatgtggctggaaaattccccggtatcccatccgctgctggggctacgctgtattaactggtatggcggctgcgatatggcgaccagcctgattcagccgcagactaccgacgctagcggtttttatggcgcgacggtaaccagcggcggcgctaagtggatgcacggcatgatgtctgatgctttctatcagtatctacaacagatgccggttggcggtagctttacgatgaccattaatgcctgtcagacatccgtggcttacgatgcaagcctcggccagcgctgtaaagatcaggcatcaggtaactggtatgtccgtaacgttactcacaccaaagcggcgaatctcaggctcatcaacacccactctctggcagaagtatttattaacagcgatggcgtaccgacgctgggcgaaggaaatgccgattgccagacgcagactattggtagccgtgcgggtttaagctgcaaaatggtcaactataatttgcaaaccaatggcttgagcaatacgtcgatacatatcttcccggcaatcgctaactcatcgctggcgtcggccgtcggggcgtacgatatgcagttcagtctcaacggcagctcgtggaaaccggtgagcaatacggcttattactacacgttcaacgaaatgaagagttcggatgcgatctacgtctttttctcgagcaacttctttaagcagatggtggcgttgggtataagcgacattaacactaaagatttgtttaacttccgttttcagaatacgacttcaccagagtcaggttggtatgagttttctacttcgaatacgttaattatcaaaccgcgtgatttcagcatcagcattatctccgatgagtacacttcggcgccgtcacgtgagggttacgtcggcagcggcgaaccggcgctggatttcggctacatcgtcaccaccagcggtaaaaccgccgccgatgaggtgttgattaaagtgaccggcccgtcacaggcgattagcgggcgctcgtattgcctgttcagctcggcggacggtaccgcgcaggtgccgtttccggcgtcgctctctttcattacccaaagcggggcgacgaaaagttacgatgccggctgcgacgatagctggcacgacatgaccgatgcgctatggctgaccacgccgtggactgatatttccggcgatgtggggcagatggataaaacaacggtgcgcttctcgattgctatggacgatcctatctcgctgcgcaccatcaccgacaacggctggtttggcgaggtcagcgcttcaggagagattcatgtccaggcgacgtggcgtaacattaattaa

SEQ ID NO: 101858 - DNA, 1182 bp, Enterobacter aerogenes
atgcaccacgccactgaacaattaatttccgccgcggccgaggaagcgctgcgctggcgtcgccatatccacgcccatccggatctgtcgtttaacgagaagccgaccgccgattacatcgcccgcgagctggcgcgattttccggcctcgagataagccgcccgctggaaaatagcgtgattgccgtactgcgaggcgcgcatcctgggcccatgtgggcgctgcgggccgatatcgatgccctaccgctccaggaagagagcggagaagcattctgctcaacgaagcccggcgtaatgcacgcctgcggtcacgacgcgcataccgcgatgctgatgggggcggcgaaagtcttgtgccagcttcgcgaacagctgcacggcagcattaaattcatcttccagcccgcggaagaggtgccgccgggcggggcgcgtgagctggttgagcttggcgtggttgacgatgtcgaacatattttcggcctgcatgttttccccaccagcccggttggcgtgattaccctgaaagagggagtgtacgtcgcttccagcgataactttgatatcaccattcgcggcaaaggcggccacggctcgatgccgcagcactgtatcgatccggtgaccatcggcgcggaagtggtcggcgcgctgcagcagatcgtcgcccgccatatcgatccgggcaacgcgccggtgctgactatcgccacttttcaggccggcgatagctataacgtgatccccgacagcgcgcgtctggccgggacgctgcgtacccataaccagcaggtacgcgaggcggtgccgccgctgatggcgcggattatcgacggcatcaccgccgcccacggcgccagctacgaaatcaaatggcagcagggctatgcggtgggaaacaaccacgacgccaccaatcatatcgcccgtgaagctatagcccgccatttcccggcaggcacgctacagctgcaggataaggcgctattcggcagcgaggatttctcctcctatcaggagaaaatcccaggaaccttcctgtttatcggctgcggcaatgcgcaaaaaggggcgacgtggaacgtgcacaacccgcattttcgcatcgacgaagatgcgctggcggtcggcattaagacccatatcgcgctggtgagtgagttgctgaacgaggaataa

SEQ ID NO: 101859 - DNA, 1194 bp, Enterobacter aerogenes
atgaaaagtcagtctcagatgatcttcttactgtttatcggctacgtggtcgtttatatcgacaaaaccgtcaccggcttcgcgctgctgcctatcgaaaaggagttcgggctcaacgccgaacaactgggctacattaccggcatcttttttctcgcctattcgctgtttcaggtgccggcgggctggcttaacgatcgcattggctacaaaacgatgctggtgctgtcgctggcggcgctggggatattcgcgctgtgctttggcctgctgggagcgagcttcggcctgctgctgctgttccgctttctgtcaggcgtcggccattcaggctatccctgctcctgcgccaaggcggtggtaagcaacttcactctggaacaacgtaccttcgcccaatcgatattgctgtcgtcagcgggactggcgatgaccattgggccgattatcgccgttaacgcgctggcgctgctcggctggcatctgtcgttcaccgtactggggatcgtggcctgcgccatcgccctgctgatcgccctgcgcgtgccgcgccggcaaccgacggcggtggtcgcgaaacagagcgccgcgggcgccgccctgtggcgtaaccccacggtaatcctgctctttctggctatcttttgcgtcaatattcccagctatggcctgatggcctggctaccgaagttttttgttcagagtatggggatgtcgctgtctgcatccggctacgtggtggccgcgggcggtctggggatctggatctcatcgctgggtaccggctggctggtgggtaaatattttctcaatcgcgaaccgctggtcatcgcgattagcgcgctaatcagcgccgtggcgatcttcgctatcttccatgcccggacgccgctgaccgccagcctgctgctgtttatcggcgaaattttcctgatgtcgaccttcgtcaccgcctttaccctgccgatgaagcgcctgccggaaaatatgatgggctcggccatcggtctgattaataccggcggtactctcggcggctttgtctcgccgatcgtcattggctatctggtggagaaaacccacggttacgccagcgctttcctgtttctttcactggcgatggtttgctccgcgctggcggtgctgccgctcatgaaacgtaaaaccgtcgtcagtcagcccgttattgattga

SEQ ID NO: 101860 - DNA, 909 bp, Enterobacter aerogenes
gtgaaatatcttcccaaattaaaccagctgcaggcgctacggcaggtggcgcgtagcggcagcatccgctcggcggcgcgtgaactggggcaatcgcagccggcgctgagccggacattacgtgagctggagcaaatcctcggtacgcaactttttctgcgcagtaaagaaggcgtcgccctgaccgaagcgggaatcgctttcttacagcgcgcggagtgggtgctggaggagctgcggcgcgcggcggatgaggtggaacagattaaccatgtcacccacggtcggctgacggtcggcttttcgtcgttgattgccctgacggtatttcctcaagtggccgaagggtttaagcaggcgctgccgcaggtgcagatgacggtgaaagaggggcagctttcgtcgctgctgccgggcgtccgcagcggagagatagacctggcgatcggatcggtcgacccgatgcatccgccggaaggggtgatgctggaaccgctgtttaccgcgccgttctgtgtcatcgcgcgcaaggggcatccgctggcgcacgagagcgatctgctggcgctgcgtaaagcccgctggctgctgccggagtcgccgatgggctactaccagcagttacaaaacgagctgattcacttttatcgccaggtgtcgattaccccgctgcgcaccgactcggtcattgtcggtttgcagatggtactggaatccgattatttgaccatcgtcgcgcgcgccatgaaccagccgctgcagcttggcgaaaagctggtcacgctgccggtatccacgctcccggcggcgcagtattgcgcggtgtggtcgcaaaaatcggcgctcaccgccaatgcccggctgtttctcaatcggctgcgaagcgcctgtcagcgctacgcctggtaa

SEQ ID NO: 101861 - DNA, 705 bp, Enterobacter aerogenes
atgaacgctaacctcgcggtgatcgccgacaaccttgattatctgctgtggggacggctggcggaaggccaacccggcggcgtggcgctcaccttactgatggccatcggcgcgaccacgctggcgctaccgggcggtattctgctggcctgcgccgcctggcgctacggcggagcggtccgtcgtctgctgttcctgtgggcggaaatcattcgcggtatcccgctgatcttcgttattttctggctgtggtatctgctgccgatgctgaccggcggcgatctaccgggcgcagtaacggtcaccctggcgctggcgtggttcaccgccgcctcggtgatgcactcggtgctggcggggctgcgcgccctgcccggcggccagcatgaagcggcgctgacgcagggcttcactcccggccagacgctacgcttaatcctgctgccgcaggcgctgcgcaacgtccagccgtcgctggtcggcatttttatcggcctgctgaaggacacctcgctggcgtttatcgtcaacgtgcctgaactcactaccgtcgccgggcaggtcaataaccgggtgcaaatctacccgcttgcgatattcgtctttaccggtgcggtttactatttactgtgctgcgccctcagccaactggcgagccgtcgttttaccaggcgtagcgctgacaggcgcttcgcagccgattga

SEQ ID NO: 101862 - DNA, 753 bp, Enterobacter aerogenes
gtgatggcgattctcgactggcatggcgtgctcagcgggcagccgctgcagtggattatctccggttttctcactaccgtctgggtcagcgtggccgggatactgctggccaccgcgctggcggtgctgctgctggccctgcgtctcggcggcggacgcccaggccgctggctggtggcggcgtgggtatcgctgtttcgcaatacgccgctattggtccaactgctgttctggtacttcgccgcctggaacctgctgccgctggcggcgcgcgattttatcaacgactcccatagctggtcgattctaccgggcgacgtctggtggctgacgccggaatttctctgctcaatgtgggggctcggcgtatttacctcggcatttctggtggaagagattgccgccgggttgcgcgccgtcagccacggccagcgcgaagcggcgctgtcgcagggatttagcccgtggggggaattacgttttattctgctgccgcaggggctggccaacgcctggcagccgattgtcggccagtacctgaacctgatgaaactctcttcgctggccagcggtattggttttgccgagctcacctaccaggtacggcaaatcgagagctataacgcccatgcgctggaggcctttgctgtcggcaccgcgctgtatctggcgctgggtatcgttatgggactggcgctgacgcgcttcggtccaggatatcgtcagccacggagcgcacaacatgaacgctaa

SEQ ID NO: 101863 - DNA, 819 bp, Enterobacter aerogenes
atgttttccgccttattttcacgctccgcggcttcggctgcggatttctcgcatctgcagcaggccagtattacttttcgcgacgtggttaaacgctacggcgatcatcaggtactaaacggcgttaatttaacggtcaatcccggcgaagtggtggcgatcctcgggccatcaggatcgggtaaatcaacgctgatccgcctgatcaaccagcttgaatccttaagcggcggcgagatcctcatcgatggcaaaccgacccgccgcctgaccggcagcgcgctgcgccaattgcgcagccgggtcggcttcgtttttcaacagttcaatctctacgctcacctgacggcgcaggagaatattaccctcgcgctggagcgcgtgcacggctggcaacacgatgccgcccaaaagcgggcgctggaattactcacccaggtcggtctcacggataaagcgcggcagatgcccgctcagctctccggcggccaacagcagcgcgtcgccatcgcccgcgcccttgcctcctcgccgcaaatcatcctgtttgatgaaccaacctcggcgctggatccggagatgatcggcgaagtgctgcaggtgatgaaagccctggcccacagcggtatcaccatggtggtggtcactcacgagatgcagtttgcccgcgaaattgccgatcgggtggtgtttatcgacggtggcgaaatcctcgaaaccgcgccgccggcggaatttttcgcccgcccgcagcatgcgcgtacccgccgttttctgcagaaggtgctcgacccgctgcatcaggagagcattgagtga

SEQ ID NO: 101864 - DNA, 861 bp, Enterobacter aerogenes
ttgtgggagcgtgataaacacaaaacaaaacagggattcaggggaatgatgatgcataaaacttataccaaaatcgcttttgcgctgggcgcgctgctgctgaccgcccaggttcaggccgaccagttagccgatatcaaagccgccggggtggtgaaggtcgccaccttcgacgctaacccgccgtttggttccgtggatgcgaaaacccatcaactggtgggttacgacgtcgatttcgcgcaggcgctggcgaaatctcttggcgtcaagcttgagctggtggccactaacccggctaaccgtattccgctgctgcagtccggtaaggccgacctgatcgtcgccgatatcaccattaccccggagcgcgcgcaggtaattgatttctcaacgccctactttgtaaccggccagcagttcctggttccgtctaagtcgccggataaactggatgactacagcaaagcgcgcatcggcgcggtaaaaggcaccaccggcgaacaggcgctgcaccagcgcttcccgcagtcgcgggtgctctcctatgacgatattccattggcgctgaccgccctgcgaaacggcaacgtgcaggcgataacccaggacagcaccattctcgccgggctgctggcgggcgcgccggataaagccaactttaaaattctgccggatttgctgagcaaagaagagattggcgtcggcgtgaaaaaaggcgaaccggcgctgctgaaagcggtaaacgacgagctggttaagctggaaaaatccggccaggcggcgaaaatctacgacacctggtttggccctggcaccgcctctccgcagccgcgcgcctttaccatagaagcgaaataa

SEQ ID NO: 101865 - DNA, 177 bp, Enterobacter aerogenes; identical to SEQ ID NO: 87228

SEQ ID NO: 101866 - DNA, 1410 bp, Enterobacter aerogenes
atgcaaacaacatcacaacaacaaggtgggcaacttaagcgcaccatgaaaacgcgccacctgattatgctctcgctgggcggcgtcattggcacagggttattcttcaataccggctatattatctcgaccaccggcgcggcgggcacgctactggcgtatctgatcggcgcgctggtggtctggctggtgatgcagtgtcttggcgaactgtcggtggcgatgccggaaaccggcgcctttcacgtgtatgccgcgcgttatctcggcccggcgaccggctataccgtggcgtggctctactggctgacctggaccgtggcgctcggctcgagctttaccgccgccggattctgtatgcagtactggttcccgcaggtgccggtgtgggtctggtgcgtgattttctgcgcggtgattttcgccctgaatgttatctctacccgcttctttgccgaaggcgaattttggttctcgctggtcaaagtgatcaccatcattgcttttattattctcggcggcgcggccatcttcggctttattccgctgaccgacggttcaccggcgccggggctgcataacatcaccgccgaaggctggttccctcatggcggcctgccgatcctgatgaccatggtggcggtgaacttcgctttctcgggcaccgaacttatcggcatcgccgccggcgagacgcaaaacccgcatcaggtgattccggtcgcaatccgcaccactattgcccggctgattattttctttattggcaccgttttcgtgctcgcggcgctgatcccgatgcagcaggcggggggggaaaaaagcccgttcgtactggtgtttgaaaaggtcggcattccttatgcggcggatatttttaactttgtgatcctgaccgcgattttgtcggcggccaactccggcctgtatgcctccggacggatgctgtggtcgctatcaaatgagaagacgttgccagcctgctttgccaaagtgaataaacgcggcgtgccgctaaccgcgctgtcggtaagcatgctgggcggcgtgctggcgctgttttccagcgtagtcgcgccggatacggtgtttgtcgcgctgtcggcgatttccggttttgcggtggtcgcggtatggctgagcatctgcgcgtcgcattttgtcttccgccgccgccatctgcaacagggcaaagcgttaagcgagctgcactatcgcgcgccgtggtatccgctggtgccggtgctggggtttgtcctctgcctggtggcctgcgtggggctggcctttgacccaagccagagtattgcgctgtggtgcgggatcccgttcgtcgcgctgtgttatggtgcttactatctgactcgtacacggaaattaactcaggagccgcaacatgccgcagaataa

SEQ ID NO: 101867 - DNA, 933 bp, Enterobacter aerogenes
atgccgcagaataatccgctaaccgcaatccttgaaacgcaaccgttcgtgctgctggatggcgcgatggcgacggagctggaagcgcgcggctgcaatctggccgatagtttatggtcggcgaaggtactgctggagaatccgcagctgatccgcgatgtgcatctcgactatttccgcgctggcgcacaggtggcgatcaccgccagctatcaggcaacgccggcaggctttgccgcccgcgggctggatgaggcgcagtcgaaggcgctgataggtaaaagcgtcgagctggcgcgtaaagcccgcgaggcgtatctggcggaaaacccgcaggcgggaacgttgctggtggccgggtcggtcgggccgtatggcgcgtatctggcggatggctctgagtatcgcggcgattatcagcgcagcgcggaggcgtttcaggcgttccaccgcccgcgcgtcgaagcgctgctggatgccggggcggacctgttggcctgtgaaacgctaccgtcgtttgccgaaatcacggccctggcggcgctgctgcgtgactacccgcgcgcccgcgcctggttctcgttgaccctgcgcgacgccgaacatctcagtgacggcacgccgctgcgcgaggttgttgcggtattggccgataatccccaggtgctggcgctggggattaactgtatcgcgctggaaaataccaccgccgcgctgcagcatctgcacagcctgacgtcgctgccgctggtggtctatcctaactccggcgagcactatgatgcgctgaccaagacctggcatcatcacggtgaagcctgcgcgacgcttgcggcctatttgccgcagtggctggcggctggcgccaggctgattggcggctgttgtcgcaccacgccgcaggatatcgccgcgctggcggcgggccgctaa

SEQ ID NO: 101868 - DNA, 963 bp, Enterobacter aerogenes
atggcattcacatcgcgaattactcttctggcggcgctggctttcgctgccttccaggcgcaggcggttaacgtcaccgtcgcctatcaaacctccgctgaaccggcgaaagtcgcccaggcggataacaccttcgccaaagccagcggcgccaccgttgactggcgtaaattcgacagcggctccagcatcgtacgcgcgctggcctcaggcgatgtgcaaatcggcaacctcggctccagcccgctggcggtggccgccactcagcaggtaccgattgaagtgttcctgctggcctcaaagcttggtaattccgaagcgctggtagtgaagaaagatatcactaagccggaagatctgattggcaagcgcattgcggtaccgtttatttcgaccacccactacagcctgctttccgcgctgaaacattggggaatcaaaccgggccaggtgcagattatcaacctgcagccgccggcgattattgccgcctggcagcgcggcgatatcgatggcgcttacgtgtgggcgccagccgttaacgaactggaaaaagagggcaaggtgctgaccgactccgcgcaggtggggcaatggggcgcgccgacgctggatgtctgggtcgtacgtaaagactttgccgagcagcatccggaaatcgtgaaagctttcgctaaaagcgccatcgacgcgcagcagccctatatcgccaacccggaggcgtggctgaagcagccggaaaatctcagcaagctgtcgcgactgagcggcgtgccggaggcggatgtgccggtgttagtcaaaggcaatacctatcttaccgccgcccagcaggcgcaggagcttaacggcccggtgaaccaggcgattatcgataccgcgaaattcctcaaagagcagggcaaagtgccggccgcaggaaccgattatagccagttcgttaccgaccgtttcgtgaaataa

SEQ ID NO: 101869 - DNA, 768 bp, Enterobacter aerogenes
atgctgcaaatctcgcatctttccgctgattatggcggtaaaccagcgctggcggatatcaacctgacgttggacagcggcgaactgctggtggtgctgggcccctccggctgcggcaaaaccacactgctgaacctgattgccggattcgtgccttaccagcacggcagcatcactctcgaaggccgtcgcatcgacgggccgggcgccgatcgcggcgtggtgtttcaaaatgaaggtctgctgccgtggcgcaacgtgctggataatgtcgcgctgggactacagctggcgggggtggaaaagacccgacgccgggaaatcgccgcgcagatgttaaaaaaagtcggcctgcagggggcggaaaaacgctttatctggcagctgtccggcggccagcgtcagcgtgtcggtattgcgcgcgcgctggcggcggatccgcagcttctgctgctggatgagcccttcggcgcgctggatgcctttactcgcgagcagatgcaaaccctgctgctgcgcctgtggcatgaaaccggcaagcaggtgctgttgattacccacgatatcgaagaagcggtatttatggccagcgagctggtgctgctgtcgccggggccggggcgggtgcaggaacgcctgccgctggagtttggccgccgttttgtcgccggtgaatcctgccgcagcattaaatcggatccgcaatttatcgcccagcgcgaatatgtgcttagcagggtgttcgaacaacgggaggctttctcatga

SEQ ID NO: 101870 - DNA, 828 bp, Enterobacter aerogenes
atgagcgtggtccttaatgataaaccgcgccagcgcgcgctgaaatggcgctggccgctttcacggcagctgacccttagcgtagcgacgctggcagtattgctggctatctggtgggcggtgaccgcgttgcagctgattagcccgttgtttttaccctcgccgtggcaggtattgcagaagctactgaccattgccgggccgcaaggctttatggacgcgaccctgtggcagcatctggcggcgagcctgacgcgtatcgccatcgcgctggtactggcggcgatcgttggcgtgccggtggggatcgccatgggattgagtccaacggtacgcgggatcctcgacccgctgatcgaactgtatcgtccggtaccgccgctggcgtggctgccgctggtgatcatctggttcggcattggcgaaacgccgaaaatcttactgatctatctggctattttcgctccggtagtgatgtcgacgctggcgggtgttaaaagcgtgcagcaggtccgcgttcgcgccgcacagtctttaggggccagtcgcgctcaggtgctgtggctggtgatcctgccgggcgcgctgccggaaattctcaccggcctgcgcattggccttggcgtcggttggtcgacgctggtggcggcggagttgattgccgccactcgcggcttaggttttatggtgcaatccgccggtgaattcctggcgaccgatgtggtgttagccgggatcgcggtgattgcgataatcgcatttgttctggaactgggactgcgcgcgttgcagcgccgcctgacgccctggcatggagaagtacaatga

SEQ ID NO: 101871 - DNA, 852 bp, Enterobacter aerogenes
atgagtgaacgtctgagcattaccccgttggggccgtatattggcgcgcaggtggccggagccgatttgacccgtccgttaagcgacaatcagtttgagcagctataccacgcggtgctgcgccatcaggtggtgttcctgcgcgagcaaaatatcaccccgcaacagcagcgcgatctggcgttacgttttggcgatttgcatatccatccggtctatccgcatgcgccgggcgtggatgaaattatcgtgctggatacccataacgataatccgccggacaacgataactggcataccgacgtgacctttatcgatacgccgccggcgggggcgattctggcggcgaaggagttaccttctaccggcggcgataccctgtggaccagcggtattgccgcctgggaagcgttatccgaaccgttccgccagctgttgagcgggttacgcgcggagcacgatttccgcaaatcgttccaggagtacaagtacaacaagacgcaagcggagcatcagcgctggcgcgaggcggtggcgaagaacccgccgctgttgcacccggtggtacgtacccatccggtaaccggtaagcaggcgctgttcgtcaatgaagggtttaccacccgtattgtggatgtcagcgagaaagagagcgaggcgctgctgaatttcctgtttgctcacgtcacaaaaccggaattccaggtgcgctggcgctggcagccgaacgatgtggcgatttgggataaccgggtgacgcagcattacgccaacgccgactatctgccgcagcggcgcatcatgcaccgcgcgacaattcttggcgataagccgttctaccgggcgggataa

SEQ ID NO: 101872 - DNA, 1701 bp, Enterobacter aerogenes
atgtttagtctcgacaacgttctcgatgacctgtggcctcaggcgaggcccgccccctggcagaaaaaggtgttgaaaaagcttctgcatgaagaagagttccagcaatttgccgcccgccatcgtcacctgaaaggactggatacggtcgaacaggtcctcgaacatctcaatatccgttgcgctattccggcgcatgacctcgaacaaatccccgaacatggcccgctggtgattatcgccaaccatccgaccggcacgctcgatggtctcgctctgctctatgcggtctcccgcgtgcggcgcgatgtcaaagtcgtcactaaccgcatgctgacccatcttgaaccgctgagctcgctgtttattccggtggataatatcaacggccgtaccgccaaagcggcgctgcagcagatggaccaacagcttcagcagggcggcgtgctgatcttcttcccggcgggggaagtttcgcgtctgacccgccgcggcatccgtgataaaaaatggcatcccggcttcatcaagctggcggcgaaataccgcgcgcctctgctgccggcgtggatccgcgcccacaacagcccgctgttctacgccagcgccctgctctccgagaatctgccgctgctgctgttaatgcagcagatgtttcgccgccgcgatagcagcttgccgttacgcattggccagcaaatcgcgtggtcatcgtggcatcagccgccgctttccgcccgcgaactggcggaccgctgctaccgccacgtcgagcgcctcggtaaaggacaccccggcctgtttaaaagcgaaagcgcgatcgcccgcccggaagaccgcgcgctgctcaaacgcgagctggcaaaaaccgaatgtctgggcaaaaccgcagacggtaagctgatttatctgtggcagcgcaacggccaggaagaggcgccgctgctacgcgaactgggccgtctgcgggagatcgctttccgggcggtcggcgaaggcagcggcaaacgccgcgatatcgatagctacgatgatgactatctgcacctgattttatgggatgaagaggatctggagatcgtcggcgcctatcgttttatgcctaccgccatgcaactggagaaacgaggactggagggcatctacagctacagcctgttccactacgacgcacggatggacgatattctgcagcacgggattgaactggggcgcagcttcattcagccgcgctactgggggcgccgcgggctggattatctctggtcaggcatcggcgcctggctggcgcgaaacccgcactatcgctatctttttggcccggtctcaatttcaggcggactgccgcccgatgcccgcgatttgctggtcgccttctaccgcttatggtttccggcgacgcatccgctggccaaatcccgtcgcccctacccagcttcgctacccgaggtgctggcgcagtttggcggcgaggattacaccgaagacctgacgcggctgaagtccctgctcggcaacctcggctgcggcatcccgccgctgtataaacagtactcggaagtgtgcgagccgggaggcgtgcagtttatcgatttcggcagcgacccggactttaatcactgcgtcgatgggctggtgctggtggatttaacctacctgaaagccaaccgctaccagcgctacatcggcgcgcatctctag

SEQ ID NO: 101873 - DNA, 975 bp, Enterobacter aerogenes; identical to SEQ ID NO: 100130

SEQ ID NO: 101874 - DNA, 1170 bp, Enterobacter aerogenes
atgcctccgttgaaacgtagtttgctcatttttgctgcgctgtgcgcggcgtcgtggacctcagcccaggcggttcagccgagcgttgatccggtatttacttctgatgtggtcgaccgcttcgccgaacatatttattacggcagcggcgccaccggcatggcgatggtggttatcgacggcaaccagcgcgtattccgcagcttcggcgaaacccgtccgggtaataatcagcatccacaattggattccgttatccgcatcgcctctctgagtaagctgatgaccagtgaaatgctggtgaaactgctcgatcagggactggttaagcttgacgatccgctgagtaaatacgcgccgcctggcgcgcgggtgccaacctaccagggcgtaccgattacgctggtcaatctcgcaacccacaccagcgccctgccgcgcgagcagcccggcggcgcggcgcatcgcccggtattcgtctggccgacccgccagcagcgctggaactggctgtcgacggctacgcttaaaaccacgccgggttcgcaggcggcctattccaacctggccttcgacctgctggccgatgcgctatcgaccgccgccggtaagccctacccgcagctgtttgaagaacaaatcacccgcccgctcggcatgaaggacaccaccttcaccccatcgccggatcagtgtcaacgcttgatggtggcggagaaaggcgccagcccgtgtaataacaccctcgcggccatcggcagcggcggcgtgtattcgaccccgggcgatatgatgcgctggatgcagcagttcctctcttcggatttctatactcgcggccagcaggccgatcgcatgcagacgctgatttatcaacgtacccagctcacccgagtgatcggcatggatgttccgggtaaagccgatgcgctgggtcttggctgggtgtacatgaagccgaaaaacggccatccgggcattattcagaaaaccggcggcggcggcggatttattacctatatggcgatgaacccgcaggctaacgtcggggtcttcgtggtggtgacccgttccgcgttgacccgtttcagcgccatgagcgacggcgtcaacgacctcgtcagcgccttaagcggcgtgcagccgaatatggaaaccgccagccagtaa

SEQ ID NO: 101875 - DNA, 534 bp, Enterobacter aerogenes
atggcatctcaacgggttctgatggtagtggatatgcaaaacggcgtattcgagacgccgcgtgtcgatcgcgaacgctgcgtagcgcaaatcaatcgcctgattcacgccgccgatagcgttattttcattcagcacgctgaagcaggcggcctggaagaaggaagcgaaggattcgcgctgctgcctgaactggcgcaacccgccggggcgcgctacgtcaccaaaacggcctgtgatgcgttttataaaaccgatcttgaacaggtgctgcgcgagaacggaactcacgcttttgttatctgcggctgcgcgaccgattattgcgtcgataccaccatcaaaaacggcgccagccgcggctacgccatcaccattgccgaagatgcccataccaccgccaatcgcgccgccgccgaggctaaaacgctgatcgctcactataacgaggtgtggcggactttcaccctccccggtaatccattacgcgtgaaacccgtagaaacaattcttgccgaatggcagacgaactaa

SEQ ID NO: 101876 - DNA, 1221 bp, Enterobacter aerogenes; identical to SEQ ID NO: 92107

SEQ ID NO: 101877 - DNA, 1104 bp, Enterobacter aerogenes
atggcgcaggtttctcgcggtgtttcactctcttttacgctgctggccgggttggtgctgagcgcctgtaccagccagcaggcgcctaagttgaaagaagtcgagaagccggtggatgttgccgccgtggtgcggcaaaaaatgcccgccagcgtcaaagaccgcgaggcctgggcgcaggcgattgccaaaacctttgacagccagaagctggcgccgacggaagaaaacgtctgttcggtgctggcggtcgcgcagcaggaatcaaactatcaggccgatccggcggtgccgggcctgaataaaatcgcctggcaggaaattgaccgccgggcggaaaaaatgcatatcccggtatttctggtgcataccgcgctgaaaatcacctcaccaaacggtaaaagttacagcgatcgcctggataacgtcaaaacggaaaaacagctgagcgcgattttcgatgacttcattggcatggtgccgatgggccagaagctgttcggctctctcaacccggtgcataccggcgggccaatgcaggtaagcatcgcctttgcccagcagcacaccgatggttatccgtggaaaatggacggcaccgtgcgccaggaggttttcagtctacgtggcgggttgtggttcggcacctatcatctgctcaactacccggctaactacagcgtgccgctgtaccgctttgctgatttcaatgccggttggtatgccagccgtaatgccgccttccagaatgcggtggttaaagccaccggcgttaagctggcgctggatggcgatcttattcgctatgacagcgatgaacccggaacgactgagctggcggtgcgccgtttagccgggcagttggggatgagcgatggcgatatccatcgtcaactgaagaagggggatagcctggcgtttgaagagagcgatttgtataagaaaatattcaaaatcgccgagaaaaaggccgggaaaacacttccgcgcgagatgttgccagggatccaactggaaagcccgaaaatcacccgcaatctcaccaccgcgtggtttgctaagcgggtcgacgatcgccgcgccagctgtatggcgcgtcgttaa

SEQ ID NO: 101878 - DNA, 306 bp, Enterobacter aerogenes; identical to SEQ ID NO: 96458

SEQ ID NO: 101879 - DNA, 204 bp, Enterobacter aerogenes
atgaagctgaccgacaaaatccgccgtgactggcactactacgcgttcgcgctggggttaatttttattttgaatggcgtggtggggctgctggggtttgacgcgcaggggtggcaatcttatgccgtcggtctggcgacgtgggttgtgagcttctggctggcgggatttgttattcgccgccgtccggcagaagaggcgtaa

SEQ ID NO: 101880 - DNA, 1098 bp, Enterobacter aerogenes
atggctaaaatgagggttgggatcgtttttggcggtaagtcggcagaacatgaagtgtcgctgcagtcagccaaaaatatcgtcgaagcaattgataaaacgcgctttgatgttgtgctgctgggaatcgataaacaggggctttggcatatcaacgatgccagcaactatctgctgaacccgcaggatcccgcccatatcgcgctgcgcccatcagacgtgacgctggcgcaaattcccggtcgcgatgcccatcagttgatcaatgccgatagcggccagccgctggcggccatcgacgttatcttcccgattgttcacggcacccttggcgaagatggttcgctgcaggggatgctgcggatggcgaatttgccgttcgtcggatccgatgtgctgggctccgccgcctgcatggataaagacgtcactaaacgcctgcttcgcgatgccggtctgtcaattgcgccgttcatcactctgactcgcgccaaccgccagcagttcagctttgccgatgtcaaagcgaagctgggtttaccgctgttcgtgaagcccgcaaaccagggttcttccgtcggcgtcagcaaagtgaagagcgaagaagagtacctgcaggccgtcgcgttagcctttgaattcgaccataaagtggtagttgaacaagggattaagggccgtgaaatcgagtgcgcggtgctgggcaatgattatcctcaggccagcacctgcggggagatcgttctcaatagcgaattctatgcctacgataccaagtacattgatgacaaaggcgcgcaggtggtggttccggcagccatcgccccggagatcaacgacaaaatccgcgatatcgccgtccgcgcttaccaaacgctcggctgcagcggaatggcccgcgtggacgtcttcctgacggaagataacgaggtagtgatcaacgaaatcaacacgctgcctggctttaccaacatcagcatgtatccgaagctgtggcaggccagcggtctggattacaccagcctgataagccgcctgatcgagctggcgctggagcgccacgccgccgaccgcgcgctgaaaacctcaatgaactaa

SEQ ID NO: 101881 - DNA, 1200 bp, Enterobacter aerogenes; identical to SEQ ID NO: 87210

SEQ ID NO: 101882 - DNA, 261 bp, Enterobacter aerogenes; identical to SEQ ID NO: 87209

SEQ ID NO: 101883 - DNA, 1416 bp, Enterobacter aerogenes
gtgaaattatcagccctctttattgccctattaccgctgctggctcccccggttattcatgcacaaaccacttcttcgccggtgctggaaaatcgcgcggcgcagggcgatatcacgaccccaggcggggcgcgccgtttaacgggcgatcagaccgaagcgctgcgcgcttcgttaatcaataagccggcgaaaaatattattttgctcattggcgatggcatgggtgattcagaaattaccgccgcacgaaattatgccgaaggcgccggcggtttctttaaaggtattgatgccctgccgctgacaggccaatacacccattattctctggataaaaaaaccggcaagccggattacgtgacggattccgccgcttcggcaaccgcgtggaccaccggcgtgaaaagctataacggcgcgctgggcgttgatatccacgaaaaagatcatcagaccatccttgagctggcgaaagccgcgggtcttgccaccggcaatgtctcgacggctgaactgcaggatgcgacgccggcggcgcaggtggcgcatgtgacctcgcgtaaatgctatggccccagcgtgaccagcgaaaaatgcgccagcaacgcgctggaaaaaggcggcaagggctctatcaccgaacaactgctgaatgcccgtccggatgtctctttaggcggcggggcgaagacctttgctgaaacggcgaccgcaggggagtggcaggggaaaaccctgcatgagcaggcggtcgctcgcggctatcagattgtgaccgacgccgcttcactcgccgctattagcgaagcaaatcagggtaaaccgctgctcggtctgttctccgacggcaatatgccggtgcggtgggaaggcccgaaagcctcttatcacggcaatatcgacaaaccgccggtaacctgtaccccaaacccgaaacgcgatgcttccgtaccgacgctggcgcagatgaccgaaaaagcgattgatctcctgagccgcaacgaaaagggattctttctgcaggttgagggggcatctatcgataaacaggaccacgcggcaaacccttgcggccagattggcgaaaccgtcgacctcgatgaagcggtacagaaagcgctggaatttgccaaaaaagagggtaataccctggtgatcgtcaccgccgatcacgcccactccagccagattatcccggcagacacgaaagcgccgggcctgacccaggcgctgacgaccaaagatggcgcggtaatggtgatgagctatggcaactctgaagaagagtcgatggaacacaccggcacccaactgcgtattgccgcctatggcccgcatgcgggcaacgtggtgggtcttaccgaccagaccgatctgttttacaccatgaaagacgcgctgggtctgaaataa

SEQ ID NO: 101884 - DNA, 312 bp, Enterobacter aerogenes
atgaaaataacatttctggtaaccctactttttggtttggtctttgttgccgcggtaagtgccgcagataaaacgttaacgcctcagcagcagaaaatgagcgcatgtaataccgaagcggcgtcaaagtcgctgaagggtgatgaacgtaaaacctttatgagcaattgcctgaagaaagatgcgccagcggccggcaagacgctgacgcctcaacagcagaagatgagcgcttgtagcaaagaagcggcgtcgaaatcgttgaagggtgacgatcgtaataagtttatgagtacctgcctgaagaaataa

SEQ ID NO: 101885 - DNA, 810 bp, Enterobacter aerogenes
atggataagaaaattggctttatcggctgcggcaacatgggtaaagccattctcggcggcctgatcgccagcggacaagtgcaaccggcgcaaatttgggtctataccccatcgccggacaaagttgccgccctgcatgaccagtacggtattaatgcggcggaaagcgcgcaggaagtcgctcaggtcgccgatatcgtcttcggcgcggtgaagccggggatcatgaccaaggtgttaagcgatatcgcttccagtctgaacaaagattcgctggtggtctcgatagccgcaggcgtcacgctggatcagctggcgcgcgcgttgggccacgatcgcaaaattattcgcgccatgccgaacaccccgtcgctggtgaacgctgggatgacctccgtgacgccaaacgcgctggtcagcgcggaagagatcgccgaggtgttaaccattttccgttgcttcggccaggcggaaaccatcgccgagccgatgattcatccggtggttggcgtcagcggttccgcgccggcttacgtctttatgtttatcgaagccatggccgatgccgccgttctcggcggtatgccgcgcgcgcaggcctacaaattcgccgcgcaggcggtcatggggtcagcgaagatggtgctggaaagcggcgaacatccgggcgcgctgaaagatatggtctgctcgccaggcggcaccaccattgaagcggttcgcgtactggaagaaaaaggtttccgttccgccgttatcgaagcgatggcgaagtgtatggaaaaatcagagcaactgagccgttcctga

SEQ ID NO: 101886 - DNA, 459 bp, Enterobacter aerogenes
atggcgatttgggtagatgcggacgcgtgtccgaatgtcattaaagaaattttgttccgcgccgccgaacgcacgcagacgccgctgacgctggtcgccaaccagtcgctgcgggttccgccgtcgcgttacgtccgcgcgctacgggtggcgcagggttttgatgttgccgataacgagattgtccgtctctgtgaaccgggcgatttggtgatcaccgctgacatcccgctggcggcggaagtgctggcgaaaggaggcgcggcgctgaatccgcgcggcgagcgctacagtgaggcgaccattcgcgagcgcctgacgatgcgtgattttatggagacgatgcgggccagcggcgtacagaccggcggcccggatagtttatcgcagcgcgatcggcagttattcgccgccgagctggagaagtggctgcttgcggttaaacgccagcaggattaa

SEQ ID NO: 101887 - DNA, 708 bp, Enterobacter aerogenes
atgcaatctgaagaacaacgccttattgatggcctgttttcccgtttaaaagaggccgagacgcacagcgcatcgcgcgacgccagcgccgaggagcggattgcccagcacgtaacccaacagccggcggccccatactatatggcgcaaactatcctgattcaggaagcggctatcaaacagcttaacgaccgcattcaggcgctggaggcgcaggttagccagctgcaggcggcaaaaccgagcagcggcgggttcctgtcgggcctgttcggcggcggccagtcccgcggcgccgatccgattccaggagccgagcaatatggccgcccgcagacgaataacgcacaaccgcagtatgcgccacagcaaaactatgccccgcaggcggcaggccgcagcggcggcggctttatggcgggcgcgctacaaaccgcggccggggtggcaggcggcgtggtgctggggaatatgctgaccaatatgttcagtggttcacatccgcaggagattgtgaacatcatcgatgaacagcagccgcagccgcaacaagatgtcagcccggcgctggataataacgccgctgaggatccgttccgccagcaggacgaccctttcctggcggacaataataccttcgactccgatttcgacgccggcttcggcaatgacgatgatttcggtagcgatgatgacagctgggtttaa

SEQ ID NO: 101888 - DNA, 525 bp, Enterobacter aerogenes
atgacacaaccaatttttctcatcgggccgcgaggctgcggtaaaacgacgatcggccatgccctggcgcgcgcgctgcatttccagttttccgataccgatcatcgtttacaggcccatgagaaacgcacggtagcggaaatcgtgcaacaagagggctgggagcgctttcgtgaactggagacgctgtcgctgaaagccgttacgttgccggatacggtgattgcgaccggcggagggattattcttgctgaacgcaatcgtctgtatatgcgtgaaaacggcattgtgatttatctgcaggcttctgttaacgccttgattgagcggctggaagcttatccgcagtcggaacaacgcccaacgctgaccggtaagcctgtccgtgaggaagtcggcgaagtgctggcgcaacgggaagccctgtaccgagaaaccgcccatcataccgtagacgccaccgcgacgccggatgcggtggttgaacagattatgaccatgctgtgcgatgtgacggtaagttag

SEQ ID NO: 101889 - DNA, 192 bp, Enterobacter aerogenes; identical to SEQ ID NO: 87202

SEQ ID NO: 101890 - DNA, 666 bp, Enterobacter aerogenes
atggcaattttgaccattggcgtggcgccggtggcggaagttttgccgctgttaaccgaacatatcagggaagagcagatcacccatattagcctgttaggtaaaatgacgcgtgaagacgttatggaagattatgccgtggaatccggcgaccaggggctgctgaccttactcaatgataaccaactggtggaagtctcccgccaaaaggtggagcgcgatctgcgctgcgttatcgagatgctggatcggcaggaatatgatgtcattcttcttctcagttccgaacagttgagcggtctggcgacgcacaacgctatccttcttgagcctgaacggattattccgccgctggtggcctcgatcgtcgatggccatcaggtgggcgtgattgtacccgttgaagaagtcctgcccatgcagcggcaaaagtggctcactttagaaaatacgccttactatgcgctggcgaacccgatgggcggcagcgacagcgatctgctggatgcaggaagaggtttagtcgaacagggggcggatgtactggtgctcgactgtcttggctatcatcagcatcaccgcgacgtattacaaaaggcgctagatgtcccggtattattgtcaaatgtgctggtttcgcgactggcggcagaactattaatttaa

SEQ ID NO: 101891 - DNA, 285 bp, Enterobacter aerogenes; identical to SEQ ID NO: 87200

SEQ ID NO: 101892 - DNA, 912 bp, Enterobacter aerogenes
atgctgtggttcaaaaatttaatggtttaccgtctgagccgcgatatcgaattgcgcgccgaagagatggaaaaacagctggccgagctgacatttaccccttgtggcagccaggatatggcgaaaaccggttgggtatcgccgatgggatcgcacagcgacgcgctgacgcatacggcaaacggccagatcgttatctgcgcccgtaaagaagaaaagatcctgccgtcgccggtgatcaaacaggcgctggaagcaaagatcctcaagctcgaagccgatcagggccgcaagctgaagaaaacggaaaaagattcgctgaaagatgaagtgctgcactcgctgctgccgcgcgcctttagccgcttcagccagacgatgatgtggatcgataccgtcaacggcctgattatggtggactgcgctagcgcgaagaaagcggaagatacgctggcgctgctgcgtaaaacgctgggctcgctgcctgtagtaccgctgacgctggaaaatccgatcgagctgacgctgaccgaatgggtgcgctccggtagcgtggctcagggcttccagctgcttgacgaagccgaattgaaagcgatgctggaagatggtggcgtgatccgcgcgaagaaacaggatctggtgagcgatgagatcgccgtacatatcgaagcgggtaaagtggtcaccaaactggcgctcgactggcagcagcgtatccagtttgtgatctgcgacgacgcatcgattaaacgtctgaagttctgcgacgaattacgtgaccagaatgaagatattgaccgcgaagattttgcgcagcgttttgacgccgactttatcttgatgaccggcgaactggcggcattgattcaaagcctggttgaaggactgggcggcgaagcccagcgctaa

SEQ ID NO: 101893 - DNA, 906 bp, Enterobacter aerogenes
gtgcgtattggtattgatttaggtggaacaaaaacagaagttatcgccctgagtgagcagggccagcagttatttcgccaccgcttgccaaccccgcgagaggattatcgccagaccatcgagacgattgcctcgctggtggagatggccgagcaggcgaccgggcagcgcggcaccgtcggtatgggcatccccggctcgatttcgccgtatagcggggtggtgaaaaacgccaactcgacctggctgaacggccagcccttcgataaagaccttagcctgcgcctcaatcgtgagatccggcttgccaacgacgccaactgcctggcggtttcggaggcggtcgatggcgcggccgcgggtgcgcaaaccgtgtttgcggtaattatcggtaccggctgcggcgcgggggtggcgttgaacgggcgcgcgcatatcggcggcaatggcaccgccggtgaatgggggcacaacccgctgccgtggatggatgaagatgagctgcgctatcgtcagcaagtgccttgttactgcggcaagcaggggtgtattgaaacctttatttccggcaccggtttcgccaccgactatcagcggctgagcggaaacccgttaaccggcagcgagattatgcgcctggtgggtgaaggtgacgaaaaggccgaactggcgctgagccgctacgaacagaggctggcgaaatcgctggcgcatgtggtgaatatcctcgacccggatgtcattgtgttaggcggcgggatgagcaatgtcgaacgcctgtatcaaacggtaccggggctggtgaaacagtgggtgttcggtggagaatgcgaaacgccgatccgccgggcgatgcacggcgattccagcggcgtacgcggcgcggcatggctgtggccgctgtga

SEQ ID NO: 101894 - DNA, 3135 bp, Enterobacter aerogenes
gtgagaatcctgagcctacgcctgaaaaaccttaactcgctgaaaggcgaatggaaaatcgactttaccgctgaaccgttcgccagcaatgggttattcgcgattaccgggccgaccggcgccgggaaaaccaccctgttagatgccatctgtctcgcgctgtaccacgaaacgccgcgcctgagcagcgtatcgcaatcgcaaaacgatctgatgacccgcgacaccgccgagtgcctggcggaagttgaatttgaggtccggggcaccgcctatcgcgccttctggagccagaaccgcgcccgcaaccagccggatggcaatctacaggcgccgcgcgttgagctggcgcgctgcgacgacgggaaaattcttgccgacaaggtcaaagacaaactggagctgacggcatcaattaccggcctcgactatgggcgctttacccgctcaatgctgctttcgcaggggcaatttgccgctttcctcaatgccaaaccgaaagagcgcgccgagctgctggaagagctgaccgggactgaaatttacgggcaaatttccgcgcaggtctttgaaaaacataaactcgcccgcattgagctggaaaagctgcaggcgcaggcctccggcgtcgtactgttaaatgatgagcagcagcaggcgttacagcaaagtttgcaagtacttactgctgaagaacagcagcaacttgccgaacagacccgccagcaaaatggcctacagtggctgcgccgccgtcaggagctaaacgcggaagccacccaggcgcaggccgctttacagcaggcgctgctggcgcaggaagccgccgcgccgcagctggcggctctacaaaccgcgcagccggcagagcaactgcgtccattatggtcgcggctgcaggaacacagtagcgcgctggcgcaaactcgccgtcaggttgaggaagtaaatactcgcttacagcacagcctgcgccgtcgcgccgggatccgcctggctgcccaacaacgtctggctcaactagaatccagccagcaatcgttaaatgagtggcttaaagcgcacgagcgattccagcagtggagcacggcgctggcaggctggaaagccaccttccagcagcttaaccgcgacgctcagcaagagctgacgctacaacagcgcctgcaggatgccagccgtaagctcggcgaattgccggccaccgcgctaaccctcgatgcgcagcaggtcagccgcgagctgacacagcatgccgccgcccgcccgctgcgccagcagctctcaaccctccatcgccagctgcagccgctgttcctgcgtctgcggcagctacagagcgcggaaaacgcctcacagcaggaaaaagagaagcttgaagccgcgctacaacagcgtcgtcaggcgtggaaggaaaaaaatcaacagctcagcgatgtaaaagccatctgcgaactggaagcgcgtatcgccgggctggaagccgagcgcgcccgcctgcagccgggcgcgccttgtccactgtgcggttctgaacatcatccggcggtcgcggaataccaggcgctggtacccggcatcaaccaaactcgccgcgacgcgctggagcgtgacgtgcgacagctggcggaagaaggcgcgcagctgcgcggccagcttgaagcgctgcttaaacaacagcaaaaagacgctgacgagaaaacatcgcttctgcagcaggagcaagcgctcacctctcaatggcaagccaccctcgcggaattagcgattacgctgacgccgcaggatgatattgctggctggctggatagccaacagcagcatgaacagcagctgtatcagcatcaacaacggctggcctggcaggcgcaacagcaggagagccagctgcagctgcagcagttacagcaggatctcgaacagcgccgtcgcgcgctgcaggcggagctggacgtttataccctggcgctgccgcctgccgcggaggctaacgactggctggcccagcgtgaagccgaaacccgcggctggcaggcgaaacaaaatgaagccgccgcgctgcaggaacagcgccagcagctaacgccgctgctggaaaccctgcctgagtcaacggaagccgcggatcccgcgccgctggagggctggcggcaggtgcatgatgattgcctggcgctacagagccagtggcaaacgctgggccagcaagaaagccagcagcaggcacaggtgaaggaaagcgaaaagcagtttactgccgcgctggccgccagcccgtttgccgaccaagcggcctttcttgccgctttgcttgacgagccaacccgccagcggctggaacaactcaagcagacgctggaaaaagaagttcagcacaaccaaacgctggccctgcgggcgcagacgtcgcttgaacgccatcagcaacagccgcccgccgatattgatattaaccagccgctggagcagctagagaataggctggagcaactggcacgccagttgcgggaaaacagcgcccgtcagggtgagatccgccagcagttgaagcaaaacagcgataaccaacagcgccagcaatcattacgtcagcagatggaacaagccacgcagcaggtcgaagactgggcctggctgaatgcgctcatcggttcaaaagaaggcgataagttccgtaaattcgcccaggggctgacgctggataatctggtgtggctggctaaccagcagctcaaccgcctgcatggccgctatttgttgcaacgtaaagccagcgaggcgctggagctggaagtggtggacacctggcaggccgacgcggtgcgcgatacccgcacgctttccggcggcgaaagcttccttgtgagcctcgcgctggcgctggcgctatctgacctggtgagccataaaacgcggattgattcgctattccttgatgaaggattcggcaccctcgatagcgaaacgctggataccgcgctggatgcgctcgacgcgcttaacgccagcggcaaagtgattggcgtgattagccacgtcgaggcgatgaaagagcgcatcccggtgcagattaaagtgaaaaagataaacggtctgggatacagccggttggaaaaagcgtttgcggtggagtga

SEQ ID NO: 101895 - DNA, 1203 bp, Enterobacter aerogenes
atgcgcatccttcatacctccgactggcacctcggccagaacttctatagcaaaagccgcgcggacgaacacgccgcctttctcgactggctgctggcgcgcgcgcaggaacacgaggtggatgccattatcgtcgctggcgatatttttgataccggctctccgccgagctacgcccgcgaactgtataaccgttttgtcgttcaactgcagcaaaccggctgccagttggtggtgctggcgggcaaccacgattcggtagcgacgttaaacgagtcgcgcgaaatactcgccttcctgaaaaccaccgtggtcgccaacgccggccacgcgccctttatcttgccgcggcgcgacggcgcgcccggcgcggtcttctgcccggtgccgtttttgcgcccgcgcgaactggtggtcagccaggctggccactccagcggtgaaaaacagcagcagttgctcaccgccatcagcgactattatcagcagcaatatcagcaggcctgcgatctgcgcggcgaacgcgcattaccgatcattgccagcggccacctcaccaccgtcggcgccagcaaaagcgacgcggtgcgtgaaatctatatcggtaccctcgacgccttcccggccaatcgcttcccgcccgccgattacatcgcgctcggtcatattcatcgcgcccagatggtcggcggctgcgagcatattcgctacagcggttcgccgctgccgctgagttttgatgaaaccggaaaaaacaaaagcgttaatctggtctcattcaacgagggcaagctcagcgaggtgacgctgctgccggtgccgatcacccagccgctggcggtactgaaaggcgatttcgccagcatcagcgaacagcttcagcagtggcaggatagcgcgcagcagccgccggtctggctggatatcgaaatcaccagcgatgaatacctgcacgatatccaaagaaaaattcagcagcagaccgaatcgctgccggtggaagtgctgctggtgcgccgcagtcgcgcccagcgtgaacgcattctggccggcgttcagcgggaaacgctgagcgaactgcaggtggaagaggtgtttgcccgccgcctggcgctggaaacccttgatgctccgcaacagcagaggctggagcaactgtttacggaaacgctgcatagcctgaacggtgaggaacacctgtga

SEQ ID NO: 101896 - DNA, 690 bp, Enterobacter aerogenes
atggcgagaagaattctggtcgttgaagatgaagctccaatccgcgaaatggtctgctttgttctggagcaaaacggctttcagcccgtcgaggcggaagattttgacagtgcggtgaatcaactcaatgaaccctggcccgatttgattctcctcgactggatgttgccgggcggatcggggctgcagtttattaaacagcttaagcgcgaagcgatgacccgtgatattccggtggtgatgctgacggcgcgcggtgaagaagaagatcgcgtacgcggtctggaaaccggcgcggatgattacatcaccaagccgttttcgccgaaggagctggtggcgcgaattaaggcggtgatgcggcgtatttcgccaatggcggttgaagaggtgattgagatgcaggggctgagcctcgatccttcctcgcatcgcgtcatgaccggcgaaaacccgctggatatggggccgaccgagtttaaattattacacttctttatgacccacccggaacgcgtatacagccgtgagcaactgctgaatcacgtttggggaaccaacgtttacgttgaagaccggacggtggatgtgcatattcgccgcctgcgcaaagcgctggaacatagcggccatgaccggatggtacagacggttcgcggcacgggatatcgtttctccgcccgtttctga

SEQ ID NO: 101897 - DNA, 1296 bp, Enterobacter aerogenes
gtgctggaacggctgtcatggaaaaggctggcgcttgagcttttcttatgttgtataccggccctgatcctcggggcatttttcggtcatctgccgtggtttttactggcggcggtgaccgggttgcttatttggcatttctggaatttgttacgtctgtcatggtggctgtgggtcgatcgcagtatgacgccgccgccgggaagcggcagttgggaaccgctgctgtatggtctgcatcaaatgcagatgcgtaataaaaaacgtcgccgcgagctgggaagccttatcaagcgctttcgcagcggggcggaatccttacccgatgcggtggtgctgaccaccgaagagggcgccatcttctggtgtaatggcctggcgcaacaaatccttaatctacgctggccggacgatagcgggcagaatatcctcaacctgctgcgctacccagagtttgctaactatctgaaaaaccgcgatttcaccaagccccttaatttggtgctcaataatgcccgtcatctggaaattcgcgtgatgccttatagcgataaacagtggttgatggtggcgcgcgatgtcacgcaaatgcaccagctggaaggcgcgcggcgcaactttttcgccaacgtcagccacgagctgcgcacgccgctcaccgtactgcagggttatctcgagatgatgcaggagcaggtgttggaagggccgacgcgggaaaaagcgctgcacaccatgcgtgagcaaacgcagcggatggaagggttggtgaagcagttgctgacgctctcgcgtattgaagccgcgccggtgctggcgatgaatgataaaatcgatgtcccgatgatgctgcgggtggttgagcgcgaggcgcaaaccctcagccagggtaagcatcagttgcactttagcgtcgacgaaacgctccaggtgatgggcaacgaagagcagttgcgcagcgcgatttccaatctggtgtacaacgccgttaaccatacgccagcgggaactgagattcacgtcagctggcagcgggcgccacacggcgtgctgtttagcgttgaggacaacggccctggcatcgcgcctgaacatctcccccggttgaccgagcggttctaccgcgtcgacaaggcgcgctcccggcaaaccggcggcagcggtttagggctggctattgtgaaacatgcggttagccatcacgaaagccggctggaaatcgaaagtacggttgggaagggaacgcgctttagcttcctgttgccggaacgtttaattgccaaaaatgtcgcctga

SEQ ID NO: 101898 - DNA, 1320 bp, Enterobacter aerogenes
atgacccatcagttaaaatctcgcgacatcatcgcgctgggctttatgaccttcgcgctgttcgttggcgcaggcaacattatcttccctccgatggttggcttacaggccggcgaacacgtctggaccgcagccattggcttcctgattaccgccgtgggtttgccggtgctaacggtagtcgcgctggcgaaagtcggcggcggcgttgagcgtctgagctcgccaatcggcaaagttgcgggcattctgctggccgtggtgtgctacctggcggttgggccgctgttcgcgaccccgcgtaccgccaccgtttcatttgaagtggggattgctccgctgaccggcgacggcgcgctgccgctgcttatctatagcgttatctatttcgcgctggtgattctggtttctctctatccgggcaaactgctggataccgtcggcaatttcctggcgccgctgaaaattatcgccctggtcgtgctcgcggtggccgcggttatctggccggccggcccgattagcgacgcgatggaagcctatcgtaccgcgccgttttctaatggtttcgtcaatggttatctgaccatggacacgctgggggcgatggtcttcggtatcgttatcgtcaatgccgcgcgttcccgcggcgttagcgaagcccgattgttgacccgatacaccgtctgggctggtctgatggccggcgtgggcctgacgctgctgtacctggcgctgttccgcctgggttccgatagcgcgacgctggtcgatcagtcggcaaacggcgcggctattctgcactcctacgtgcagcataccttcggcggcgcgggcagcttcctgctggcggcattgatatttatcgcctgtctggtcaccgcggttggcctgacctgcgcctgcgctgagttcttcgcgcagtatctgccgctgtcgtatcgttcgctggtgtttattctcggcctgttctccatggcggtttctaacctggggctcagccatctgattcagatctcgattccggtgttaaccgctatttatccgccgtgtatcgcactggtggtattaagctttacccgcggttggtggcataattcctcccgcgttatcgcgccggcaatgtttatcagcctgatgtttggtatcattgacggtgttaaagcatcggcgttcgcagatatcctgccgcaatggaccgcgagcctgccgctggcagcgcaaggtctggcatggttgctgccaaccgcggtgatggctgtgctggctgcgatcatcgatcgcgcagcgggtagcccggtggtctcaaaagcccactaa

SEQ ID NO: 101899 - DNA, 1374 bp, Enterobacter aerogenes
atggaaagtagtaacaagcttaagcgcgggctaagtacccggcacattcgctttatggcccttggttccgctattggtaccggcctgttctatggttcggcagacgccattaaaatggcggggccgagcgtattgttggcatacattatcggcggcgtggcggcgtatatcatcatgcgcgcgctgggcgaaatgtcggtgcataacccttccgccagctctttctcgcgttatgcgcaggagaacctcggcgggctggccggctatatcaccggctggacctattgttttgaaatcctgatcgtcgcgattgccgacgtgaccgccttcggtatctatatgggcgtctggttcccggcggtgccgcactggatatgggtactgagcgtggtgctgattatctgcgccgtcaatctgatgagcgtgaaggtgttcggcgaactggagttctggttctcattctttaaagtcgccacgattataatcatgatccttgccggtttcggcatcatcatctggggtattggcaacggcggtcagccaaccggtattcataacttatggagtaacggcggcttcttcagtaacggctggctgggaatggtgatgtcgctgcagatggtgatgttcgcttacggcgggattgagattatcggtatcaccgccggtgaagcgaaggatccggaaaaatccattccgcgggcgattaattcggtgccgatgcgtatcctggtgttctacgtggggacgctgttcgtcattatgtctatctatccctggaacctggtgggcacaaacggcagcccgttcgtgttgaccttccagcatatgggaattacctttgccgccggcatcctgaacttcgtggtgttaaccgcgtcgctatcggcgattaacagcgacgtatttggtgttggccgtatgctgcacggaatggccgaacaggggagcgcgccgaaggtgttcgccaaaacgtcgcgtcgcggtacgccctgggtgacggtgctggtgatgaccgtggcgctgctgtttgcggtctatctcaactacatcatgccggaaaacgtcttcctggtgattgcctcgctggcgaccttcgccaccgtgtgggtgtggattatgatcctgttgtcgcaaatcgctttccgtcgtcgcctgtcgccggaagaggtgaaagcgctgaagtttaaagtaccgggcggcgtggccaccaccgtggtcggcctgctgttcctggtctttatcatcgcgcttatcggctaccatccggatacccgcatttcgctgtacgtcggctttgcgtggatcgtgctgctgctggttggctggaaaattaagacccgccgcgatcgccagttagcccaggcgcagtaa

SEQ ID NO: 101900 - DNA, 1818 bp, Enterobacter aerogenes
atgttgaaggcctggcacctgccggttgctccttttattaaagagcagcaggaacgactcgttatcacattgtggctaagcggcgaaacaatgccgcagcgaattacgctgcgcgcggaagaagacaatgaagagctgtcgttgcccatgcagcgcctgcgccaatccccacacgccgatgtcgtcgcctggcgtggagagataaacctgatgaacggccagccgcgccgccgctatagctttaagctgctgtgggcggaccgtcagttgtggtttacgccgcagggattccagcgtttcccgcccgcgaggctggagcagtttgcggttgatgtgccggatagcggcccgcagtgggtcgccgatcaggtcttttatcaaattttccccgatcgtttcgcccgtagcgaggcgcgagaagccgggcaggacgaggtttattaccaccatgcggccggccaggatattgtgctaaaagcgtgggatgagccgttaaccggcgaggcgggcggttcgaccttttatggcggcgacctcgacggtattagcgagaagcttccttatctgaagcagcttggcgtgactgcgctgtatctcaatccggtattcgtcgcgcccagcgtacataaatacgataccgctgattaccgccgtgtcgatccgcagttcggtggcgatgccgcgctgatgcgcctgcgccacaatacgcagcgtgaagggatgcgcctgatcctcgacggcgtgtttaaccataccggtgactcgcacccgtggttcgatcgccaccagcaggcgagcaacggcgcctgccatcagccggattcaccgtggcgtgagtggtttaatttttccccggacggggtggcgcataactggctgggttacgccagtctgccaaaacttgactaccgttcatcgagcctggttaacgaaatctatgcgggcgaagacagcgtggtgcgccactggttaaaagcgccgtggagtatggacggctggcggctggacgtggtgcatatgctgggcgaggatggcggcgcgcgtaataacttgcgccatattgccggcattacccaggcggcgaagcgggagcagccggaggcttttgtattcggcgaacattttggcgatgcgcgtcagtggctgcaggctgatgccgaagacgcggcgatgaactatcgcggttttaccttcccgctgtggggcttcctcgccaataccgatatttcctacgatccgcagcacatcgatgcgcaaacctgtatggcgtggatggacaactatcgcgccgggctgtcgcatcagcagcaattgcggatgtttaaccaactggacagccacgataccgcgcgttttaaatccttgctgggtaaggatgtggcgcgactgccgctggcggtggtctggctgttctgctggccgggcgttccgtgtatttactatggtgacgaagtcggcgtcgatggcaacaacgatcccttctgccgtaaaccctttccatgggatccggcgctgcaggatgaaaacttgttggcgttatataagcgtatgaccaccttgcgtaaggggcatcaggcgctgcgctatggcggctgccaggtcatctatgcggaagataacgtggtggtctttgttcgcgtttacaaacagcagcgggtgctggtggcgataaaccgtggtcatgcctgcgaggtggtaatcgacgcatcgcctttgctggaggggaaaacgtggcagcgaaaagaaggcgcgggcgagatgcacgatgatgtgctgagtttgcccgcgatttccgcaagcgtctggtgtagccgttaa

SEQ ID NO: 101901 - DNA, 903 bp, Enterobacter aerogenes
atgcgtttaaaccttgatgtacttttgattcttgatgctctggataggcatggctcgttcgcgctggcggcggagtcgctatttaaaacccccgccgcgctgagctatatgatccaaaaactggaaaacgatctgaacatcagtctgctggatcgttccgggcaccgggcgaaatttaccgataccggtaaaatgatgctggaaaaggggcgcctgctgctcaatgccgccaacgatctggaaaaacaggcgcagctgctgagttccggctgggagcgggatctggcgattgcgctggacgactcttttcctttccgggccctattgccgctgattgaaaagttttacgcgcaatatccgcaaacccggctcaactttacccaccataccctggcgggctcgtgggaagagctgactcacaacggcgcggatattattcttggggcgattaacgaaccgccgacttcagcggaatggtcgtggaaaatgctcggcgcgatggacaacgtgttcgttgtcgcgcccggccacccgctggcggcaacaacccagccactgaccaacaaacaactcagcctgcatcgcgcggtggttattagcgatagcgcccgctactgtcatccactgaacagcaacctgctcgatgagcaggagcaaatccgggtagatgatttcgccaccaaagtcgcgctcctgcgcgccggtttgggatgcggattcctgccccgccacatcgccctcccgtggctggagagcggtgagttgctggagaaaccggtgatttcgagccgtgagaaagatataacctatatggcctggcgtagcggcaataacggtctggctcagcgctggtggcgagaggctattctcgaagacagctgtctgagccagctctaccgttaa

SEQ ID NO: 101902 - DNA, 642 bp, Enterobacter aerogenes
atgtctattcgtgaactgattgatccgtctaattccacccttatttttattgaccaccagccgcaaatggcttttggtgtggccaatatcgatcgccagacgctgaaaaataacaccgtcgcgttggccaaagcgggcaagatttttaacgttccggttatttatacctctgtcgaaaccaaaagcttcagcggctatatctggccagaactgctggcggttcatcctgaagtgaaaccgattgaacgtacttctatgaactcctgggaagacaccggttttgttaatgcggtgaaagccactggacgtaaaaaactgattatttccgcgctgtggactgaagtgtgcctgaccttcccggcgctgatggcgctggaagaaggttatgaagtgtacgtggtaaccgatacctccggcggtacctccgttgacgctcacgagcgcgccatagaccgtatggtgcaggccggcgcggtaccggtgacctggcagcaggtcctgctggagtaccagcgcgactggtcacgtaaagagacttatgacgcggtgatggatctggttcgcgaacatagcggcgcctacggtatgggcgtggattatgcttataccatggtgcacggcgcgccggaacgtaaagcctaa

SEQ ID NO: 101903 - DNA, 546 bp, Enterobacter aerogenes
atggcgcaacagaaatcagtgacgctggtcatcagtcatcatctcgatccacaaaacggccagcggtatgaagcatggttgggcaaaatcatgccggttgcggcggagtttcccggccatcttggcgccaacgtgatccgtccggcggccgggcaaaatctctggagcgtgataattcgcttcgacaccattgaacatctctacgcctggacgcagtcggaaacccgtcgtgaattagtcgcggaaatcgcgccgtttctcaatgatggcgatcgtaccgaaatccgcaccgaaccggcgttctggtttaccccgcctgcggccaatattcgccagccgctgcgctggaaacagttcctgataaccctgctggtcatcttcccaagtaccaacctggtaccatggctgaccggcatggcgctaccggagttacggggaagcttgttactgcatctgattaacgatgccctggtggtcgcgttggtggtctggttgtggatgcctatcgtgacccgtctgtttgccggttggttgaaaaaaaactag

SEQ ID NO: 101904 - DNA, 1869 bp, Enterobacter aerogenes
atgtcgcaaactgccacactgattctgacccacggtcagattcatacactcgaccgcgcgaacccactggcggaagccgtggccatcgccgatggaaaaattctcgcgaccggaagccacgatcgaatcatgacgttcgccgccgaggggacgcaaattgtcgatcttaaaggccatacggtgatcccaggtcttaacgactcccacctgcacctgattcgtggcggcctgaactataacctcgagctgcgctgggaaggcgtgccatcgctggcggatgcgctgcgtatgctaaaagatcaggccgatcgcacgccgtcgccgcagtgggtgagggtggtcggcggctggagcgaattccagtttgccgaacgccgcatgccgacgctggaagagctgaatgaagcggcacctgacacgccggtattcgtgctgcatctgtacgatcgcgcgctgcttaaccgcgcggcgctgaaagccgttggctataccaaagagacgccggacccggcgggcggcgagatcgttcgcgataacaacggcaacccgaccgggatgctgatcgccaaacctaatgccatgatcctgtatgcgacgctggccaaaggaccgaagctgccgcttgagctgcaagtcaactccacgcgccagtttatgcgcgaactgaaccgtttaggattaaccagcgccatcgatgccggcggtggtttccagaactacccggaagattacgaaattatcgagcaactgcacgccaaagagcagatgaccgtgcgtatcgcctataacctctttacccagcggccgaagcaggagctggaagatttcgagcgctggaccgacatgctgaagccggggcagggcaccgatttctaccgtgccaacggcgctggtgaaatgctggtcttctcggcggcggattttgaagatttcctgcagccgcggccggatctgccgcaaggcatggaagatgagctggagcgggtggtgcgtcatctggtggaacaccgctggcctttccgtctgcatgccacctacgatgagtcgattagccgaatgctggatgtgttcgagaaggtgaaccgcgatattccgtttaacggcctgcactggttcttcgatcacgccgagaccatcaccgaacgtaatattgaacgcgtgaaggcgctaggcggcggtatcgcggtgcagcaccggatggctttccagggcgagtatttcgtcgatcgctacggcaaagaggcggtgaaacatacgccgccggtggcgaaaatgctggaactggacgtaccggtaggcttgggtaccgatgcgacccgcgtcgccagttataacccgtggaccgcgctgtactggctggtttccgggcgtaccgtcggcggcatggcgatgtacgacgataacaaccgtctgccgcgcgacgttgcccttgagctatggaccgccggtagcgcatggttctccagcgagcagggtaaaaaaggacgcattgagaaagggcaactggctgacatggtggtgctgtcaaaagactacttcagcgttgcggaagaggaaattaaaggtattgagtcggtattgaccatcgttgatggcaaggtggtgtacgcggccggccatttctcgccgctggcaccgccgccaattccggtattgccggagtggtcgccggtggtaaaagtgccagggcattatcgctcggcgccgcctgcggccgcgaagattggcgcggtggtgcagatgcaccagtgctgcggcagctgcggcgtgcacggacatcagcatgatattgcgcgcaagtcgtcgattccggtggcggatgagcaggctttctggggcgtattaggctgttcttgcttcgcgttctga

SEQ ID NO: 101905 - DNA, 603 bp, Enterobacter aerogenes
atggttctggttactcgtcaggctccggactttaccgctgcagcagtattaggtaacggcgaaatcgttgagaaattcaacttcaaacagcacaccaacggtaaagctaccgtcctgttcttctggccaatggacttcactttcgtttgcccgtctgaactgatcgctttcgacaagcgctacgaagaattccagaaacgcggcgtagaagtggttggcgtttcctttgactccgagttcgttcacaacgcatggcgtaacaccccggtagaccagggcggtattggcccggttaaatacgcgatggttgccgacatcaaacgtgaaattcagaaagcttacggcatcgagcatccggacgaaggcgttgcgctgcgcggttccttcctgatcgacgctaacggcatcgttcgccaccaggttgttaacgacctgccgctgggccgtaacatcgacgaaatgctgcgtatggttgacgcgctgcagttccacgaagagcacggtgaagtttgcccggctcagtgggaaaaaggaaaagaaggtatggccgcttctccggaaggcgtagctaaatacctgaccgaaaacgtatccagcctgtaa

SEQ ID NO: 101906 - DNA, 582 bp, Enterobacter aerogenes
atgaattttctcgcgcatttacacctcgcccatcttgcggatagctcgctgccgggcaacctgctggccgattttgtccgcggtaacccgcagggcgagtatcctgaggatgtggttgacggcatttatatgcatcggcgtatagatgtaatgaccgacaatctggcggaagttaaaacggcgcgcgaatggtttcgccccgagacccgccgcgtcgcgccaatttccctcgacgtcatgtgggatcatttcctgtcgcatcactgggcgcagctgtcgccggatctgccgctaaacgagtttgtgcgttacgcccacgcgcaggtagcgcaaattctgccggattcgccgccgcgctttgttaatctcaacgaatatatgtggtccgaacgctggctggaacgttatcaggatatggaattcattcagcgcgtcctgaacggtatggccagtcgccgcccgcgcctcgatgcgctgcgtgattcatggtacgaccttgataaccactatgggcaactggagcagcaattctggcgtttttatccgcgaatgatggagcaggcgaaaaagagaacgctgtaa

SEQ ID NO: 101907 - DNA, 1065 bp, Enterobacter aerogenes
atgcgcgttaccgatttttcctttgaattacctgaatccctgattgctcactatccgcagccggagcgcagtagctgccgcttgctgtcgctggacgggccgacgggcgcgctgacgcacggtactttcaccgatctgctcgataagctcaaccctggcgatctgctggtctttaacaacacccgggtgatcccggcgcgtctgtttggccgtaaagccagcggcggcaagattgaagtgctggtcgagcgaatgctggatgataaacgtattctggcacatattcgcgcctctaaagcgccgaaaccgggggcggagctgctgttaggcgatgacgaaagcattaacgccacaatgctggcgcgccacggcgcactgtttgaagttgagttcaacgatgagcgcccggtgctcgatattctgaacagcatcggtcatatgccgctaccgccgtatatcgaccgcccggacgaagacgccgatcgcgagctgtaccagacagtttacggcaccaagccgggcgcggtcgccgcgccgaccgccggcctgcattttgacgacccgctgctggaaaaactgcgcgctaaaggcattgagatggcgtttgtgacgctacacgttggcgcggggaccttccagccggtgcgcgtcgacagcatcgaagagcacatcatgcactcagaatatgcggaggtgccgcaggatgtggttgatgcggttctggcggcgaaagcgcgcggtaaccgcgtcatcgccgtcggcaccacttccgtgcgttcgctggaaagcgcggcgcaggcggctaaaaatggcctgattgagccgttctttgccgatacgcagatctttatctatccgggatatcagtacaaagtcatcgatgcgctggtgactaacttccatctccctgaatccacactgattatgttggtctccgctttcgctggctatcagcacaccatgaacgcctataaggctgcggtagaacaaaaatatcgcttttttagctacggggacgcgatgtttatcacgtacaatccgcaggctatttctgagcgtccctaa

SEQ ID NO: 101908 - DNA, 1128 bp, Enterobacter aerogenes
atgaaatttgaacttgataccaccgatggccgcgcgcgtcgcggccgtttggtgtttgatcgcggcgtagttgaaacgccagcctttatgcccgttggtacctacggcaccgtcaaagggatgacgccggaagaagttgaagccaccggcgcgcaaatcatcctcggcaacaccttccatctgtggctgcgcccgggccaggaaatcatgaagctgcacggcgatctgcatgatttcatgcagtggaaagggccgatcctcaccgattccggcggtttccaggtcttcagtcttggcgatatccgtaagatcaccgaacagggcgtgcacttccgcaatccgatcaacggcgatccgattttcctcgatccggaaaaatcgatggagattcagtacgatctcggttccgatatcgtaatgatcttcgacgaatgtacgccgtacccggcagactgggattacgctaagcgttcgatggaaatgtctctgcgctgggccaagcgcagccgtgaccgttttgatggcctcggcaacaaaaacgcgctctttggcatcattcagggcagcgtttacgaagatttacgagatatctcggtgaaaggtctggtagagattggctttgatggctacgctgtcggcggtttggctgtcggcgagccgaaggaagacatgcaccgtatcctggagcacgtttgcccgcagatcccggcagataaaccgcgatacctgatgggcgtcgggaaaccggaagacctggtggaaggggtacgtcgcggcatcgatatgtttgactgcgttatgccgacgcgcaacgcgcgtaacggccatctgtttgtgaccgatggcgtagtgaaaatccgcaacgcgaagcataaaagcgatacatcgccgctggatgccgagtgcgattgctatacgtgtcgcaattattcacgtgcttacttgcatcatcttgatcgttgcaacgaaatattgggcgcgcgcctcaataccattcataacctgcgctactatcagcgtttaatggctggtttacgcaaggctatcgaagagggtaaattagagagcttcgtgaccgatttttaccaacgtcaggggcgttccgttcctcctttgaacgttgattaa

SEQ ID NO: 101909 - DNA, 333 bp, Enterobacter aerogenes
atgagcttttttatttctgatgcggtagcagcaaccggcgcgccggcgcagggcagcccaatgtctctgattctgatgctggtggtgttcggtctgattttttacttcatgatcctgcgcccacagcagaaacgtactaaagagcacaagaatctgatgaactccatcgccaaaggtgatgaagtcctgactaacggtggtctggttggtcgtgtgactaaagtcgcggaaaacggctacatcgctatcgcgctgaacgataccaccgaagtggttatcaaacgtgacttcgtagctgccgttctgccgaaaggcaccatgaaggcgctgtaa

SEQ ID NO: 101910 - DNA, 1815 bp, Enterobacter aerogenes
atgctggtcgtcgtgattatcgtcggcctgatttacgcgcttcccaacctgtatggtgaggatccggctgttcaaatcactggcgcgcgcggcgtcgccgccagtgagcaaacgctgatccaggtccagaaaactttacaagaagaaaaaatcaccgcgaagtctgtggcactggaagagggcgcaattcttgcgcgcttcgacaccaccgacactcagctgcgagcgcgtgaagcgctggttaacctgctgggtgacaaatacgtcgtggcgctaaaccttgctcctgctaccccgcgctggctggcggcgatgtatgccgagccgatgaagctgggtcttgacctacgcggcggcgtgcacttcctgatggaagtagacatggacaccgcattaggcaaactgcaggaacaaaacatcgatagcctgcgcagcgagctgcgtgacaaaggcattccttactccaccgtgcgtaaggaagacaactacggtctgagcatcgtcttccgcgacagcgcggcgcgcgaccaggctatctcttatctcagcccgcgccatcgcgatctggttatttcaagccagggtaacaatgcgctgaaagcggtgatgaccgacgaacgtctgaaagaagcccgtgaatacgccgttcagcagaacatcaacattctgcgtaaccgtgtaaaccagctcggcgttgccgaaccgctggtgcagcgtcagggttccgaccgtatcgtggttgaactgccgggtatccaggataccgcgcgtgcgaaggaaatccttggcgcgaccgcgacgctggaattccgtctggtgaacaccaacgtcgatcagtccgcagccgcttctggccgcgtacctggcgattcggaagtgaaagacacccgtgaaggccgtccggtggtgctgtataagcgcgtgatcctgaccggcgaccatatcactgactccacttccagcatggacgagtacaaccagccgcaggttaacatctcgctcgatagcgcgggtggcaacatcatgtctaacttcaccaaggacaatatcggtaaaccgatggcgaccctgttcgtggagtacaaagacagcggtaagaaagatgccaacggtcgcgctatccttgcgaaagaggaagaggtgattaacatcgccaatatccagtctcgccttggcaatagcttccgtatcaccggtatcagcaacccgaccgaagcgcgtcagctttctctgctgctgcgtgcgggcgccctgattgcgccgattcagatcgttgaagaacgtactatcggcccaactctgggtatgcagaacatcaagcagggcctggaagcgtgtctggccggtctggtggtctctatcctgttcatgatcttcttctataagaagttcggcctgattgcgacctccgcgctgattgctaacctggtgctgattgtcggcattatgtccctgattcctggggcaacgctgaccatgccgggtatcgcgggtatcgtcctaacccttgcggtggcggtcgatgctaacgtactgattaacgagcgtatcaaagaagagctgagcaacggacgtaccgttcagcaggcgattgacgaaggttataagggcgcatttagctctatcttcgacgccaacgtgacgacgctaattaaggttatcatcctgtacgcggtcggtaccggtgccattaaagggtttgcgattactaccggtatcggtatcgcgacctcaatgtttaccgctatcgtcggcacccgtgccatcgtgaacctgctgtacggcggcaagcgcgtgaaaaagctgtctatctga

SEQ ID NO: 101911 - DNA, 972 bp, Enterobacter aerogenes
gtggcacaggaatatactgttgaacaattgaaccacggccgtaaagtctgggactttatgcgctgggactactgggccttcggcatttcaggttttctgctgattgtgtcgatcgccatcatcggcgtccgcgggtttaactggggtctcgatttcaccggcggtacggtgattgaaattaccctcgaaaaaccggttgatatggaccagctgcgcgattcgctgcagaaagcaggttttgaggagccgcagctgcagaacttcggcagcagccgcgacatcatggtgcgtatgccgccggtacacgatgccaacggcagccaggagctgggcagcaaagtcgttaacgtgattaacgaatcgaccagccaaagcgcgacggtgaaacgtattgagttcgttggcccgagcgtgggcgcggaccttgcgcaaaccggcgctctggcgctgattgcggcgctggtgtgtatccttatctatgtcggcttccgctttgaatggcgactggcggcaggggtcgttattgcactggcgcacgacgtggtgattaccatgggcgtactgtcgttgttccacatcgagattgacctgaccatcgtcgcatcactgatgtcggtcatcggttactcgttgaacgatagtatcgtggtgtcggaccgtatccgtgaaaacttccgtaagatccgtcgcggtacgccgtacgaaatctttaacgtgtcgttgacccagacgctgcatcgtaccttgatcacctccggtaccaccctgatggtgatcctgatgctgttcctcttcggcggcccgattctggaaggcttctcgctgaccatgctgatcggtgtttccatcggtacggcttcttctatctacgtcgcgtccgcactggcgttgaaactgggcatgaagcgcgagcatctgatccagcagaaggtcgaaaaagaaggggcggatcagccgtctattctgccgtaa

SEQ ID NO: 101912 - DNA, 366 bp, Enterobacter aerogenes
atgaataacgtgattaactggtttgaaattccggtcgctgatatgaatcgcgccgtcgcgttttatgagccggtaatgcaggtgacgctgcgtcgtgaaaccatggattgtgcggacctggccgtcttcccgcatcaggatccggcccccggcggcgcgttggctaaatttgacggtatcgcgccatcgccgcagggcgctattatttatctgcataccgacaacctggccgccacgctggatcgtatcgcctcggcgggaggagcgtgcgtatttggcccgctggcgctgccgaatgatattggcaccatcgccctgtttaccgacagcgaaggtaaccgcgtaggtttgcatcaaccggcttaa

SEQ ID NO: 101913 - DNA, 690 bp, Enterobacter aerogenes; identical to SEQ ID NO: 94377

SEQ ID NO: 101914 - DNA, 885 bp, Enterobacter aerogenes; identical to SEQ ID NO: 87177

SEQ ID NO: 101915 - DNA, 540 bp, Enterobacter aerogenes
atgacaagacgttacctacaactggctatcatcggcagcctgttcacccttaccgcctgcgcccagcaaagcgaagttcgtcagatgaacgagagcgtcagtacgctgagcaaagagatgacccagctgaatcagcaaacgataaaaatcacccagcaaaacgcactgaatgctaaatcaacccgcggcgtttatctgctgccggaggccaaaacccccgcgcggctggagagccagatcggcaccctgcgcatgtcagtgggtagcattacgccagatggcgacggttcgcgcctgaccttacgcatccagggcgagtctaacgatccgctcccggccttcaccgcgaccgtcgcttccggacaaattaccggcaccacccacagctatcaggaagtcaacgtccaggatcagctgattagcgccccggccagcatcctggcgcccagcgatgtggatatcccgctgcgcctgaatgtgacgcctgataaagtcggctttattcgtatccacgatatccaacccgccagcgcgcagtaa

SEQ ID NO: 101916 - DNA, 450 bp, Enterobacter aerogenes
atgcattgccctttctgtttcgccgtggataccaaagtcatcgattctcgcctggtcggcgaaggctcctccgtgcgtcgtcgtcggcaatgtctggtctgcaatgaacgctttaccacttttgaagtggctgagctggtaatgccgcgggtggtaaaaagcaacgacgtgcgcgaacctttcaacgaagacaagctgcgtagcgggatgttgaaagcgcttgaaaagcgcccagtcagcgccgatgacgtcgaaatggcggtaaatcacattaaaacccatctgcgcggcaccggtgagcgtgaagtcgcgagtaaaatgatcggtaatctggtgatggagcagctgaagaagctcgataaggtcgcctatattcgcttcgcttccgtctatcgcagtttcgaagatattaaagagttcggcgaagaaatcgcccgtttacaggactaa

SEQ ID NO: 101917 - DNA, 1104 bp, Enterobacter aerogenes
atgcaggacgaaatgtacatggcgcgagcgctgaagcttgccgcgcgcggacgctttactacccatcctaatcccaacgtcggctgtgtgattgtaaaagacggcgagatcgtcggcgagggcttccactatcgggccggcgagccgcacgccgaagtgcacgcgctgcgtatggccggcgataaagccaaaggcgcgaccgcctacgtcaccctggagccctgtagccaccatggtcgcacgccgccgtgctgcgacgcgctgatcgccgcaggcgtggctcgcgtggtagcggcaatgcaggacccgaatccacaggtggccggtcgcggcctgtaccgcctgcagcaggccggcattgacgtcagccatgggctgatgatgaatgaagcggaagcgctgaataaaggttttctgaagcggatgcgcaccggttttccgtggatccagctgaagatgggcgcttcgcttgatggccgtacggcgatggccagcggtgaaagtcagtggatcacctcgccacaggcgcgacgcgacgtgcagcgcctgcgcgcgcagagccacgctattctcaccagcagcgcgaccgtgctggcggacgatccggcgctgaccgtgcgctggcaggagctgagcgccgatacgcaggcgctctatccgcaggagaacctgcgtcagccgctgcgtatcgtcatcgatagccaaaaccgcgtcacgccggagcatcgaattatccagcagcaaggtgaaaccttgttcgctcgcacccatgccgatgaacgtgcctggcctgacaacgtgcgtaccctactggggccggagcataacggccatctcgacctcgtgttgctaatgatgcagcttggtaaacagcaggtgaacagcatttgggtggaagcggggccgacgctggccggcgctttgctacaggccgggctggtggatgagcttatcgtctatattgcgcctaaactgttaggcagtgacgcgcgcggtttatgcgcgctgccggggcttgagaaactgagccaggccccccatttcaaattcaacgacatacgtcaggtcgggcccgatgtctgcctgcatttaacgactgcgtga

SEQ ID NO: 101918 - DNA, 471 bp, Enterobacter aerogenes
atgaacattattgaagctaacgttgctaccccggacgctcgcgtcgccatcaccattgcgcgtttcaacaactttatcaatgacagcctgctggaaggcgcgattgacgccctcaagcgcattggtcaggtaaaagatgaaaacatcaccgttgtttgggttccaggcgcgtatgagctgccgctggcggctggcgcactggcaaaaaccggtaaatatgacgcggtaatcgcgctgggtacggtgattcgcggcggtaccgcccactttgaatatgtggctggcggtgcaagcaatggcctggcgcatgtcgctcaggacagtgaaatcccggtagccttcggtgttctgacgactgaaagtattgaacaagccatcgaacgcgctggcaccaaagccggtaacaaaggcgcagaagccgcgctgaccgcgctggaaatgattaacgtattgaaagccatcaaggcctga

SEQ ID NO: 101919 - DNA, 420 bp, Enterobacter aerogenes; identical to SEQ ID NO: 87172

SEQ ID NO: 101920 - DNA, 978 bp, Enterobacter aerogenes
atggcatgcggcgaattttccctgattgcccgttattttgatcgcgttaaaagcgcccgccttgatgttgaaaccggcatcggcgatgactgcgcgctcctgaatatccccgagaaaaaaacgctggcaatcagcaccgacaccctggtggcgggcaaccactttttagccgacatcgaccctgccgacctggcgtataaagcgctggcggtgaacctgagcgatttggcggcgatgggggcggaaccggcatggttgacgctggccctcactttgccggaagcagacgaagcgtggcttgaagcctttagcgacagtctgtttgtccagcttaactattacgatatgcagctgatcggcggcgacaccacccgtgggccgctgtcgatgacgctgggtatccacggctttgtgccgccgggtcgcgcgatgaagcgttccggggccaggcctggcgactggatttatgtcaccggcacgcccggtgatagcgccgccgggctggcgcttttacaggaccggctaacggttgattcgccagcggatgccgattatctgctggcgcgccatttgcgtccaatgccccgcgtgctgcaggggcaggcgctgcgcgatctggctaattcagcgatcgatctctctgacggccttatctctgaccttggtcatattctcaaggccagcgcctgcggcgcgcgtatcgatctcgatgcgatgccgtattccgatgccatgctgcgccaggttgatcctggacaggcgctacgctgggcgctcgccggcggcgaagattatgaactgtgctttaccgttcccgagctgaaccgcggagcgttggatgtcgcgattggtcagcttggcgcacgctttacctgtatcggccagatcgtggcggaagcggatggactgcagtttacccgtgagggtaagccgattaaattggatttaaaggggtacgatcattttggcacgcagtag

SEQ ID NO: 101921 - DNA, 507 bp, Enterobacter aerogenes
ttggcacgcagtagagacgaggcgaaaagccgcctcaatatgcgcaatccctggcatctgctggcgaccgggttcggcagtgggctgagcccggtggtgccgggaacgatggggtctctggcggcgattccgttctggtatctgatgacctttctcccctggcagctctattcgctggtggtgatgatgagcatctgtatcggcgtctatctttgtcaccgtacggctaaagatatgggcactcatgaccacggcagcatcgtttgggatgagtttgtcgggatgtggatcactttgatggcgttaccgacgatggactggcagtgggtggccgccggtttcgttattttccgcatctttgatatgtggaagccgtggccaattcgttggttcgaccgcaacatccatggtggaatggggatcatggtcgacgatatcgtcgccggggtgatctccgccggcgtactgtatctgattggccaccactggccgataggtctgctctaa

SEQ ID NO: 101922 - DNA, 975 bp, Enterobacter aerogenes
atgcactacattcctcttggcgatacccatcttcgcgtttcccgactctgtctcggctgcatgaccttcggcgaacctgaccgcggcaatcatgcctggacgctgccagaagagagtagccgtccgctgattaaacgtgcgctggaaggcggaattaatttcttcgatacctcgaacaactactccgacggcagcagcgaagagatcctcggccgcgcgctgcgggagtatgctcgccgcgattcggtgatcgtcgccaccaaagtttatcatcaggtcggcgatctgccgcaggggctgtctcgcgcgcaaatcatgcgatccattgacgatagcctgcgtcgcctgggaatggagtacgtcgacctgttgcagatccaccgctgggattactccacgcccatcgaagagacgctggaggcgctcagcgacgtcgtacgcgccgggaaagcgcgctatatcggcgcatcatcaatgcatgcccgccagttcgcccaggcgctcgccctgcaggaacagaacaattgggcacgcttcgtcaccatgcaggatcactacaacctgatttatcgcgaagaagaaaacgagatgctgccgctctgccagcgcaaagggattgcggtcatgccgtggagcccgctggcacgcggccgactaacacgaccatggggagaaacgaccgcgcgtctcgtctccgatgaattcggcaaatcgctgtatagcgccaccgacgccaatgatgagcagatagcacagaagctggaggaggtggctgaagaattagatgccaaccgcgcgcaggtggcgctggcctggctattaagcaagcccggcgtggctgcgccgattattggcgcctcgcggcaggaacagctggatgagctcctgcatgccgtcgatttaaccctgacgccagaacaaatcgacaagctggaggcgccctatcggccccacccaatcgtcggcttcaagtaa

SEQ ID NO: 101923 - DNA, 1863 bp, Enterobacter aerogenes
atgagttttgatattgccaaatacccaaccctggcgctggtagattccacccaggagttgcgcctgctgccaaaagatagcctgcccaagctttgcgatgagctgcgccgctatcttctggacagcgtgagccgctcaagcggccattttgcctctggccttggcacggttgaactgaccgtggcgctgcactatgtctacaatacgccgttcgaccgcttaatttgggatgtcggccaccaggcttacccgcacaaaattctcactggccgccgcgacaaaatcggcactatccgccagaaaggcggcctgcatccgttcccgtggcgcggcgaaagcgaatatgacgtactgagcgttggccactcttctacctctatctccgcgggtattggggtcgctattgccgccgaaaaagaaggcaaacagcggcgcaccgtttgcgtcatcggcgatggggctatcaccgccgggatggcttttgaggcgatgaaccacgcgggcgatatcaaaccagacatgctggtggtgctgaacgacaatgaaatgtcgatttcagaaaacgtcggggcgctgaataatcacctggcgcagctgctgtccggcaagctgtattcctcgctgcgtgaaggcggcaaaaaagtcttctccggcgtaccgccgattaaagaactgcttaagcgtaccgaagagcatattaaaggtatggtagtgcccggcacgctgtttgaagagatgggctttaactacatcggcccggtagatggccacgatgtgctgggtctggttaatacgctgaagaatatgcgcgacctgaaagggccacagttcctgcatatcatgaccaaaaaaggccgtggatatgaaccggcggaaaaagatcccatcaccttccacgcggtaccgaaattcgatcacaccagcggcgtgctgccgaaaagcagcggcggcctgccttcctattcgaaaatctttggcgactggctgtgcgaaaccgcggccaaagacgacaaactgatggccgtcaccccggcgatgcgtgaagggtccgggatggtcgagttctcgaaaaaattccccgatcgctatttcgatgttgcgattgccgaacagcacgcggtgacctttgccgccgggatggcgattggcggctataagccgatcgtggcgatctattccaccttcctgcagcgcgcttacgatcaggtgatccatgacgtcgccattcaaaagctgccggtgctgtttgcaatcgatcgtgcgggcatcgtcggcgccgacggtcagacccaccagggagcgttcgatctctccttcctgcgctgcattccggaaatggtgatcatgaccccgagcgacgaaaatgaatgtcgccagatgctctacaccggataccactataacgatggccctagtgcggtacgctatccgcgcggcacaggtaccggcgcggaactggaaccactggcgccgctgccgctcgggaaaggcgtggtgaaaagaaacggcgagaagctggcgatccttaacttcgggactttactgccggaagccgctcaggttgcggaaaaactcaatgcgacgctggtcgatatgcgttttgtgaaaccgcttgatgaggcgctgatcctgcagcttgccgccgatcacgaagtgctggtcacccttgaagagaacgctatcatgggcggcgctggcagcggcgtaaacgagctgttgatggcccaccgtcgcgcggtgccggtgctgaatatcggtctgccggacttctttatcccgcaggggactcaggaagaagttcgcgccgacctcggcctggatgccgccggtatcgaagccaaaatccgcgactggttggcataa

SEQ ID NO: 101924 - DNA, 900 bp, Enterobacter aerogenes
atggacttcccgcaacaattacagacctgtgtcacccaggccaatgacgcgctgcgccgttttatctctccgctgccatttcagaacactccgctggttgaagccatgcactatggcgcattattaggcggcaaacgcctgcgtcctttcctggtttacgccaccggcgagatgttcggcgttagccgttccacactggatgccccagccgctgccgtcgaatgcattcatgcctactcgctgatgcatgacgatctgccggcgatggacgacgacgatctgcgccgcggtcaacccacgtgccacatcaagtttggcgaagcgaacgctattcttgccggtgacgccctgcaaacgctggcattttctatactgagtgatacgccgatgccggaagtaccggatcgcgaccgtctggcgatggtttccgaactggcccaggccagcggcgtcgccggaatgtgcggcggtcaggcgttggatctcgaggcggaaggcaaacaggtcgatctacaggcgctggagcgaattcaccgccataagaccggagcgcttattcgcgcggcggttcgccttggcgcgctgagcgccggcgagcgtggccgtcaggcgctgccagcactcgatcgctttgcggagaatatcggtctcgccttccaggtgcaggatgacattctggatgtggtaggtgatactgcgactcttggcaaacgtcagggtgccgaccaacagttaggcaaaagtacctatccggcgcttttgggtcttgagcaagcccagcagaaagcgcgcgatctgattgccgatgcccgccaggctttagatgaactggctgcgcaatcgctggataccacggcactggaagcgctcgcgaattacattattcagcgcgataaataa

SEQ ID NO: 101925 - DNA, 243 bp, Enterobacter aerogenes; identical to SEQ ID NO: 87166

SEQ ID NO: 101926 - DNA, 1449 bp, Enterobacter aerogenes
atgaagtttatcattaaattgttcccggaaatcaccatcaaaagccaatctgtgcggttgcgctttattaaaatcttaaccgggaacattcgtaacgttctcaaaaactatgatgagacgctcgccgtcgttcgtcattgggatcatatcgaagttcgcgcgaaagacgaaaaccagcggccggttattcgcgatgcgctgacccgtatccctggcattcatcatattctggaagtggaggacgtacctttcacttctctgcataacatttttgaacagacgctaccgctgtggcgcgaacagctcgaaggcaaaagcttctgcgtgcgtgtgaagcgccgtggtaaacatgaattcacctcaattgaggttgagcgctacgttggcggcggcctgaaccagcatatcgaatcggcgcgcgtgaagctcaccgatccggacgtgacggttaacctggaaatcgaaaacgatcgtctgttgctggtgaaagggcgctatgaaggtattggcggcttccccattggtactcaggaagatgtgctgtcgcttatttccggcggcttcgactccggcgtctccagctatatgctgatgcgtcgcggctgccgcgtacactactgcttcttcaacctcggcggcgccgcgcatgaaatcggcgttcgtcaggtggcgcactatttgtggaaccgcttcggcagctcccatcgcgttcgcttcgtggcaatcaatttcgagcctgtggttggcgaaatccttgagaaagtcgaggatggccagatgggcgtggtgctcaaacgtatgatggtgcgtgcggcatcgaaagtcgctgagcgttatggcgtgcaggcactggtgaccggcgaagccttgggccaggtatccagccagacgctgactaacctgcgtcttatcgataatgtctcagacacgctgatcctgcgcccgctgatttctcacgataaagaacacattatcaatcttgcgcgcgaaatcggcactgaagattttgcccgcaccatgccggaatactgcggcgttatctcgaagagcccaaccataaaagcggtaaaagcgaagatcgaagcggaagaagaatacttcgattttagcattctggataaagtggttgaggaagcgaataacatcgacattcgcgatatcgcccagcaaacacagcaggacgtggtggaagtcgaaaccgtcagcggcttcagcgcgaacgacgtgattctcgatattcgttctgtcgatgagcaggatgataagccattgaaagtggaaggcgtcgatgttgtttcgctgccgttctataaactgagcacccaatttggcaacctcgatcagagtaaaacctggctgttgtggtgtgagcgcggcgtaatgagccgtctgcaggcgctatacctgcgtgagcagggctttactaacgtgaaagtgtatcgtccgtaa

SEQ ID NO: 101927 - DNA, 477 bp, Enterobacter aerogenes
atgtcccgtagcgcaaccgattctcgtgacctcgtcatcagccgcctactcagcgcccccacgacagccctctggcgcgcgtgggccgacccggctttactcaaaacctggtggtgtcctaagccatggtataccgacgttctggcctttgatttgcgtcccggaggggcttttcacaccgtgatgcacggccctgacggtgaacgtagcgataatcccggctgctttcttgaagtcattccacagcaaaaattagtcatgacctcaatgctgaccgccgactttcgccctgccgtttccccgtttgccatgacggctattatcacctttgcggatgaaaacgacggctgtcgctatacggcaacggtactgcatgcagatgatgaaacccgtgagcaacacgaaaagatgggattttttgaaggctggaatatcgttatcgatcagttgaatgccctggcaatgacgctacgctaa

SEQ ID NO: 101928 - DNA, 594 bp, Enterobacter aerogenes; identical to SEQ ID NO: 87163

SEQ ID NO: 101929 - DNA, 912 bp, Enterobacter aerogenes
atgaaagtaaccgtactgggatgcggtgcattggggcaactatggttaaccgcgctgtataaaaacggacatgaggttcagggctggttacgcgtcccgcaaccattttgtaacgttaatctcattgagactgacggtagtaatttcaacgaatcaatgaccgctaacgatcctgattttctcgccaccagcgatttactactggtgacgctaaaggcatggcaggtttcccaggcagtgagaaatctggctgctatcttaccggcttctgcgcctatcttgctcattcataacggcatgggcactcttgatgaattaaaaagcgttaaacacccactgctgctggcgtccaccactcatgccgcccgccgcgatggcaacgtcatcattcacgtcgcgcagggaacaactcatattggaccagccaaaagctatagcgaagattacagcggtctcgccgacattctgcaaaacgtcctgccggatgtcgcctggcacgacaatattcaccctgctctttggagtaagctggccgtcaactgtgtgattaatcccctgactgcgctgaaagattgtagaaacggcgatctgcgagattttccgcaagagatcggcgcaatctgtcatgaagtcgcagcggtaatgcaacgtgaaggcattcatacatctgcggaaaacctgttattgtatgtaaatcaggtaattgaaagtacagcagacaatatctcatctatgttgcaggatattcgcgcgcagcggcatacggaaatcgactacatcaccggttttctgcttaatcgcgcccgggcccatggtctgtcagtgccagaaaatgcccgtttatttgaacaggtaaagcggaaggagaatacttatgagcgcgtcggcactgatttgcctcgcccctggtag

SEQ ID NO: 101930 - DNA, 492 bp, Enterobacter aerogenes
atgccatctttcgatattgtctctgaagtcgatcttcaggaagcgcgtaatgcggtcgaaaacgcaagccgcgaagtcgagtcacgatttgattttcgtaatgttgaagccacctttgagctgaacgaaaccagtaaaaccatcaaggtgctgagcgagtctgatttccaggtcaatcagctgttggacatcctgcgtgcaaagctactcaagcgcggtattgagggaagctcgcttgacgtgccggaaaacttcgtacacagcggaaaaacctggtttgttgaagctaagctgaagcagggtattgagagcgcgatacagaagaaaatcgttaaactgattaaagacagcaaactcaaagtacagacgcagattcagggcgaagaaattcgcgtcactggcaaatcccgtgacgatctgcagtcggttatggcgttggttcgcggcggcgatcttggccagccattccagttcaaaaacttccgcgattaa

SEQ ID NO: 101931 - DNA, 2661 bp, Enterobacter aerogenes
atgaaatatcacgaaaataaaaaaaggtccgtgaaattaaacccaattgcggcatcattattactgctgatgcctgtagtggcgcaagcggaaatttctattaaaaatggcagcgttactgaagcctcaaatggtgtgccgattgtcaatatcgcgaaaccgaatagcaatggtctttcgcataacgtatatgacaccctgaacgttggcgcagaaggggtgatctttaaaaacgcgacaagcgcggcgcagtccgtgctggctgggcagattgcggccaacccgaaccttacggaccgcagcgcgatggttattcttaacgaagtgacttcaacgaatgcgagtaccattaatggcatgatggaagttgccggggattccgctcacttaatcattgccaaccctaatggcatcacgactcagggaggcgggttcatcaacgctgaaaaagggacgttgacgacaggtacgccaaagttaggtgaggatgggctgttaaatggctattccgttaatggcggaacgattactgtaagtggctttcagagcgaatcaccgaccgaaattctggcgcgtagtgtcgttgtgaatggtgcgctttcagccagtgagcttaagattgtcgcagggagtaatgcggtcaacgccgacggtgtggtcaccgactccgtaacgcctaccggtaacgcaagtacctacggcgtggatgtttctaagcttggtggtatgtatgcgaataaaattagccttgtcagcacagaaaatggcgtaggcgtgcgtaatctggggacgatttctgccggggatagcggtattaagattaccagtaacggtaaactgcttaacaacaatgcggttattcaatccagtggtgatatcaccctgaacaccaacggtgttttagaaaatagcgcagggaaaatcaacagcgacaaaatgatcgccattgataccgcgggtaataaagttagtaatatcaacggtggcaatattttagcaaccactaataactatattaccagcggtaaattcgataatagcaatggtaaactggctgccggacaaacgctggctgtcaatactagcggtaatacttttaccaataccggaaaagctaaaacggcgggtattgaggcgggtgtcgttgcaatcgaatcaggtgattttaataataacaacggtcagattcatgctggctatgttggcctgaaaaatacatcgttaactaataatggcggcactattgattcaactggaaatgttgaagttgaaagtacggggaatattgaaaacgtaactggtttgattcgctccagtgctggtgctgtaaaattaacgacaaccaaagcagttaaaaacaacgacaacaaatcggccgataccacgggcggtgaatccttgggtatcgtctcaggtaatggcatcgagattgctgctgactacttatttaactgggctggcgaaattgcctcagatggtgatgtgagcatccaaaccaccagtgatattgataactatatgggtaaaattgaaagcagtaagactgtgtcaattactggtcgcaacatgaataccagccaatccggtatcaatggcggggcgggtgttaatatcgatcttaacaactattatagccgtctgggcgtaataacttccgtgaacggtgacgtaaccatcaaagccgatacagtcagtacagacagttcggtgatcaaagctaaaaatatcagtattgattcaggcgctgatattgatgcgaaatatacaatgatggttgcggatgaaaaactagcgcttaatgcggttggtaaaatcaccagtactgacagtgacaaatttggtttctatgtggggcaatacttcggctatgggaatcagcaaggcggtctaattggcggtgaaggggttgatattacggctaagagcctgaataacgaatctggccgtattattgcgcaaaccggtgatgtaaatattaatctgactggcgatctcgcaagtaacaaagggcagattgttgctaattcagggggtatgacgattgctgcgaagaaaatcgctgctgattacgcaactatttatagctctggtaacatgcaaattgatgcatcttcattgtcatcaaaagcaagcggttccattgcaaagaatacggctaacggagtcatctcttcagatagcgacgtcttgattaatattaatggtgattataataacaccggatgggtgaatgctaaaggtaatctgacggttaatgcctccggttacttgacaaataatcacgcctttaatgctgatggtgacttgaacctgaccgggaaaaccatcactaacaacagcgatattgctgctggtaatactttgaacatttcgacggcgaatgatttgaccaataatcttggcgcaaacatttctgccaaaacaactaacgtcacagctaaaaatatctcaaactgggctaatttagttgctgatagccagttgaatgtcactgcaagtaataacatctacaactatggcaacctttatacagcgggtaaggcggtaatcgatgctaagaaaatcgtcaacactggtttctgggctgtattaggtggagctcaaggatttgagactacagctaatgttgtaaacgtatttggtaccgttgtaggtaaataa

SEQ ID NO: 101932 - DNA, 1647 bp, Enterobacter aerogenes; identical to SEQ ID NO: 92109

SEQ ID NO: 101933 - DNA, 369 bp, Enterobacter aerogenes; identical to SEQ ID NO: 92110

SEQ ID NO: 101934 - DNA, 756 bp, Enterobacter aerogenes
atgtataaatataacgatcttgcaagtaaaaaggtgctgattactggtgctagcggcgacataggtcttgcaatttgtgggaaatttcttgagcaaaaatgtattgtttatgcattatataaatcgaatgacgaaccgctgcttgcactgaaagaaaatcatgccaatggtgacttgctacatattttgccttgcgatctcacgaaccgggaagaagtcgttgcgttgtgcgagcgcctgaccatagatgccggaagactggacgtgctggtgaataatacgggaattgttaaagatagcctctttgcatcaatgagttttgatgatttttattcggttatcaacatcaatttacttagtctgtttcggttaacgaaagaagcattaatgttattacgttcagcggaaagtccagttgttatcaacgttgcatctgttgcagctctggtaccaagcattggccaggcaaactattgtgcatccaaaggtgcaattttaagtttcacccgcactcttgcggctgagctggccccgcggggagtgcgtgttaatgcggtagcgccaggaatgattgaatctaaaatggcgaagaaggttccccgtaccgtggttcgtgaggtgactaactcaattccattaaaacgactcggaaaatgcgatgaggtagcaaacgtcattgtttatttaagctcttcagcatccagctatattatagggcaaaccatcgtggtcgatggtggtatggtaatgcggtga

SEQ ID NO: 101935 - DNA, 510 bp, Enterobacter aerogenes
atggggggctggcgtcaacctctacttatggtcgaccagatagttgattataagtatggcgagaatggtttcatcaaagttataaagcatgtgacttataatgatccgtatctgcttgggcatttcccagaagatcccattatgccaggagctattatttctgaaatatttggtcaggcaagcgagtattactcttttctcactgatatctgtgatatttaccaggggcgaacgggtgaagaactgagaacattgcgtgacattcatgcttatataaagcatccggatatgctaaatacaatacgtacgaggcggtcgcaggtccgtggagtgttagcttctcagaacttgaagtttaaagggacagcgtacccgggagatacgattgaagtggtaagtaaactctcattttctgatgagagtgggtttaaacattattcagtcacagctaatgtcgggaagaagatcattagccagggcgtgattattaattttagagaagtcatttaa

SEQ ID NO: 101936 - DNA, 282 bp, Enterobacter aerogenes; identical to SEQ ID NO: 92111

SEQ ID NO: 101937 - DNA, 1170 bp, Enterobacter aerogenes; identical to SEQ ID NO: 92112

SEQ ID NO: 101938 - DNA, 2400 bp, Enterobacter aerogenes; identical to SEQ ID NO: 93000

SEQ ID NO: 101939 - DNA, 1221 bp, Enterobacter aerogenes; identical to SEQ ID NO: 92113

SEQ ID NO: 101940 - DNA, 954 bp, Enterobacter aerogenes; identical to SEQ ID NO: 92114

SEQ ID NO: 101941 - DNA, 708 bp, Enterobacter aerogenes; identical to SEQ ID NO: 92115

SEQ ID NO: 101942 - DNA, 651 bp, Enterobacter aerogenes; identical to SEQ ID NO: 92116

SEQ ID NO: 101943 - DNA, 1311 bp, Enterobacter aerogenes
atgtcaaagggtgtgatatttattaattcaattgtggtattgctattagtatttgttgtttataacattgtttttaattttggcgatgctaaattttcatttttgaacttactacggcaccggcgaagaacgttttctaccatttccgccattatattaggtggttgcgccatatttttatatggtggttttatcaactactctttttggatactcaaagagcaaacaatacgtacaaatattggacatgtacagatttataacagcacctactttgaaaccgctaacaaaaataagagtctgatatctgattatattacactgaaaaataaaattttgcagaacgccgatttttctgatgtgatttcaacaatctccggacaacttgagtttaccggaataatctcacattacgaaactgaaacatctaattatttttcagcacagggcgttgagccattaccggcgctgaagttgggagcttttgataagataatttttggtagcgacttatctcgtgtcaaacatgatgagattactattggcagcggcctggcaaaaaccttagatagccactacggggactggcttgatatcatgactgttaatatagcgggaggtcagggagctatatctgtaaaattacgtggaatatttgaatcaggtataaaggattatgatgatgttgtaatcaaaatgccccttgagactgcacagcaaatcatgggtactaatggtgttagtaagatagtcattttgctgaataacgatgatgtaacgtcgtttgttaagaaaatgagaagatatatagcggaccagcatttacctttgatcgttaaggattggagggagaattctattttttaccagcaggtggaaggtatgttgtccggtatctatttttttatcaaacttatcgtggcacttatcgtagtatttatgatcggcaattcaatgacgatgagtattgtcgagcgaacccgagaaattactacgctgcgcgcaattggcttacaatcaaaccgtgttacgcgtttattctggctggaaggtatatatatcggtatctttggcgcattggggagtcttctctttggattcactattgccgctataattaatatctcaggtattgccatgccgccttcgcctggacaatcagtaggttataccgcatttattaaaacgaatgatgtgggattgatttggataaccttgatattaccaattttaacatctgccgtggcttccattattcccgcatatcgtgcatcgcgcctcaacattaccgatgcattcaaattttcatag

SEQ ID NO: 101944 - DNA, 789 bp, Enterobacter aerogenes
atgaaaagcactgcatggtatttattcataatagctatattttcatattcagcccctggacaggcgacgagtgatagccagcaagccctggagattattcgcaaagctgatgatgttcgctcaccaaatgaacctttccgctataacgtgactgtacttgagtataaagaaggtagaacagagcctgaaaataagcaatcgctggatatatcgatgcgatttattaagccggtaaacggtttgaaagctgatgctcgttcacttatacgttttacctatcctccgcgagataaaggcaagatcatgttatctgattggtataatttatggttttatacaccggaactacgcaggcctattcctatttcgcgctcacaacgattaattggtcagatctccaatggggatgttatcgttacgaacttcgagtatgcctatgattccactctggaaggggaggaaccctgcggtgataaaatttgctatcgactgtctctcactcgtaactccgaggccgttacttatcctaaagtgatttatctggtggagaaagatgcagaataccggccattcaaagcatcttattacactcttgataataaacttctcaaaagtgtcttatataaaaactatcagatggtactagggaaatatcgtccaacagagatcattgtgcagaatgcgcgctatgaaaaggggtattctgtcatgaagtatagtgatgtccgcctggagtcgttacctgaatttcacttcactaaagagtttattcagagaggcatgaagtga

SEQ ID NO: 101945 - DNA, 1389 bp, Enterobacter aerogenes; identical to SEQ ID NO: 92117

SEQ ID NO: 101946 - DNA, 939 bp, Enterobacter aerogenes; identical to SEQ ID NO: 92118

SEQ ID NO: 101947 - DNA, 987 bp, Enterobacter aerogenes; identical to SEQ ID NO: 92119

SEQ ID NO: 101948 - DNA, 327 bp, Enterobacter aerogenes
atgaaagaattaaccgcaaacgaaatggaatatatctctggtgcaggcattatcgacctgccttgtgctttggttgatttcacgattcaatctgcactgggtcttgttgctgcgggtattaatgctggtatgattctggcctcctccgctctggaaaccacgattgacctggtttccaatattcttggtggttcgccatccagcctgggaagcattctaaccgaccatatcaactctctgctgtatgccgaatctggggtttggtctaattttgtttataatgctgccactgactggggtggtgttgttgatgccctgcagagctaa

SEQ ID NO: 101949 - DNA, 1368 bp, Enterobacter aerogenes
atgaacgataacaaaatgacgccaggagaactgcgcgcaacctggggtttagggaccgtgttttcactgcgcatgctcggcatgtttatggtcctgcccgttttgaccacatatggcatggcgctgcagggggctagcgaagcgctgattggtttggctataggcatttacgggctcgcccaggccgtcttccagatcccgtttggcctcctgtctgaccgcatcggccgtaaaccgttaattattggtggtttgctgatatttgttatcggcagcatcatcgccgcgctgaccgattccatctggggcattattcttggccgcgccctacagggttcaggcgctatcgccgccgccgtcatggcactgctttccgatttaacccgcgaacagaaccgtaccaaagcgatggccttcattggcgtcagctttggcgtgacctttgccatcgctatggtgctcggccctattgtcactcaccagttggggctgcacgccctcttctggatgatcgctattctggcaagcctcggtattttgctgactctgtgggtagtaccaaatagccacaatcatgtactgaaccgtgaatctggcatggtaaagggctgtttcagcaaagtgcttgctgagcctaaactcctcaagctgaacttcggcattatgtgtctgcacatcatgctaatgtcgacttttgttgcgctgccaggacaactggaggccgcaggtttcccggcagccgaacactggaaaatttacctggtgaccatggtcatttcctttatcgcagtggtgccgttcatcatctatgcggaagtgaagcgcaagatgaaacgtgtgttcctgttctgcgtcgctctgctactgatagcggaaatcgtactctggggagcaggtggctatttctgggagttggtcgctggtgttcaactattcttcctcgccttcaatctgctggaagcgttattgccttcgttaatcagtaaggagtctccagcaggctacaaaggcacagcaatggggatttattctaccagccagtttatcggtgtggccatcggtggcgccctgggcggctgggtagatggattctttgactcgcagaccgtgtttttactgggtgcgctactggcgatgctgtggctactggtggccagcaccatgagtgaaccgccttatgtcagcagtcttcgtgttgagatcccgggtgatgtcatcattaatgatgaactacagcgccgtctgcagtcgaaaccaggcatcgagcaggttatgattgtcgctgaagaacgttcagcctacataaaaattgacagcaaagtgaccaaccgcttcgaggttgaacaggccatcattgcaacttcataa

SEQ ID NO: 101950 - DNA, 333 bp, Enterobacter aerogenes
atgaaagaactaacattcaacgaaatggaatctgtctcaggtggttttaacctggtgagcgctgcaactggcttcgctagctttgtcgctaattctgcggctgggtttacctcatttgcgctgacttccggtctggctttcgcctctttcgttggcgatagcgcgattgagtttggcaagttcctccttggtcaggcaaactgggaaagcgtcgttagcacaggtcaagagaactgggcaaacttcgtttctaccgctggtaacagctggaacacattcgtgaacaacgccgctaccgactggaatagcttcctggagcaggccgcttcctaa

SEQ ID NO: 101951 - DNA, 888 bp, Enterobacter aerogenes
atgtttaagcaatacctgcaagtaacgaaaccaggcatcatttttggcaacctgatctccgtgatcggcggtttcctgctggcctccaaaggccacatcgactatccgctgttcgtctggacgctcctcggagtatccctggtggtcgcctcgggttgtgttttcaacaactacatcgaccgtgatatcgatcgtaagatggaacggacgaaaaaccgggtgctggtcaaagggctgatctcgccagaatcatcgctggtatacgccaccttgctgggtattgctggcttcatgctgctgtggttcggcgctaacccgctggcctgctggcttggcgtgatggggtttgtggtttatgtcggcatctatagcctgtatatgaaacgccactctgtctacggcacgctgattggctcactctccggcgctgcgccgccggtgattggctactgcgcagttaccggtgattttgacagcggcgcggcgattctgctggcgatttttagcctgtggcagatgcctcactcttacgccatcgcgatcttccgtttcaaggattatcaggcggcgaatattccggttctgccggtagtgaaaggcatctcagtcgcgaaaaaccatatcacgctgtacatcgtggcctttgccgtggcaacgctgatgctttctctgggggggtacgccggatataaatatctggtcgtagcggccgcggtaagtgtctggtggcttggtatggcgctgcgcggatacaaagtggcggatgataaagtctgggcacgtaagctgttcgtcttttccatcgttgccattaccgcgctgtcggtgatgatgtcagtcgatttcatggtgccggattcacataatctgctggcttacgtcagataa

SEQ ID NO: 101952 - DNA, 330 bp, Enterobacter aerogenes; identical to SEQ ID NO: 87139

SEQ ID NO: 101953 - DNA, 612 bp, Enterobacter aerogenes
atggcaactgatactcttgcgcacaatgcccacgcgcatgaacacgggcaccatgatacaggaccgatgaaagtcttcggtttctggatctacctgatgagcgactgcattatcttcgctacgctgttcgcaacctatgccgttctggtgaacggcacggctggcggcccagcgggtaaagatatctttgaactgccgttcgttctggttgaaaccgcactgctgttattcagctccatcacctatggcatggcggctatcgccatgtacaagaacaacaagagccaggtcgtttcctggctcgccctgaccttcctcttcggtgcagggttcgttgggatggaaatctatgaattccatcacctgattgttgaaggtatgggtccggaccgtagcggcttcctgtcagcgttcttcgcgctggttggtacccacggtctgcacgtcacctctggtctgctgtggatggcggtattgatggttcaggtatcccgtcgcggcctgaccagcactaaccgtacccgtattatgtgcctgagcctgttctggcacttcctggacgtggtgtggatctgcgtgttctctgttgtttatctgatgggggcgatgtaa

SEQ ID NO: 101954 - DNA, 1992 bp, Enterobacter aerogenes
atgttcggaaaacttacactggatgcagtgccctaccacgaacctattatcgtggtaacggttgctgcaatcatcgtcgggggactggcgatactggcagcgatcacttacttcggtaagtggtcctacctatggaacgagtggctgacgtccgtcgaccacaaacgtctcggtatcatgtacgttatcgtggcaatcgtcatgctgctgcgtggctttgctgatgccgttatgatgcgtagccagcaggtgctggcctcagccggggaagcaggattcctgccacctcatcactacgatcagatctttaccgcccacggcgttatcatgatcttcttcgtggcaatgccattcgttatcggcctgatgaacctggtggttccgcttcagctcggcgcgcgtgacgttgcgttcccgttcctcaacaacctgagcttctggttcacggttgtgggcgtgattctggttaacctgtctctgggcgtcggtgagttcgcacagaccggttggctggcgtatccgccgctttcgggaattgagtacagtcctggcgtaggggtcgattactggatttgggcgctgcagctctccggtatcggtactaccctgaccggtatcaacttctttgtgaccattatcaagatgcgtgcccctggcatgaccatgttcaagatgccggtattctcatgggcatctttgtgcgccaacatcctgattatcgcctccttcccaattctgaccgtcaccgtcgcgctgctgaccctggaccgctacctgggcacccatttctttaccaacgatatgggtggcaacatgatgatgtacatcaacctgatttgggcctggggtcacccggaagtgtacattctggttctgccggtattcggggtcttctccgaagtcgcagcgaccttctcgcgtaaacgtctgtttggttacacctcgctggtgtgggcaaccgtctgtattaccgttctgtcgttcatcgtttggctgcaccacttcttcaccatgggtgccggcgcgaacgtaaacgccttcttcggtattaccactatgattatcgcaatcccgaccggggttaagatcttcaactggctgttcaccatgtaccagggccgcatcgtcttcaactcggcgatgatgtggactatcggcttcatcgttaccttctccgttggtgggatgaccggtgttctgctggcagtaccgggtgcggacttcgtactgcacaacagtctgttcctgattgcgcacttccataacgtcatcattggcggcgtggtattcggttgcttcgcaggcctgacctactggtggccgaaagcctttggtttcaccctgaacgaaacctggggtaaacgcgcattctggttctggatcatcggcttcttcgtcgcatttatgccgctgtacgtgctgggcttcatgggtatgacccgtcgtctgagccaggacatcgatccgcagttccactccatgctggttgttgcagcatgcggcgcggcgctgattgcttgcggtatcctgtgccagctgatccagttctacgtttctatccgcgatcgcgatcagaaccgtgacctgactggtgacccatggggcggtcgtactctggagtgggcaacctcttctccaccgccgttctataacttcgctgtcgttcctaacgttcacgagcgtgatgcgttctgggaaatgaaagaaaaaggcgaagcgtacaagcaacctgcgcattatgaagaaattcatatgccgaaaaacagcggcgcgggcatcatcattgctgcattcgcaacggtgtttggcttcgcgatgatctggcatatctggtggatggcgattgttggtttcgccggcatcgtagtgacctggattatcaagagctttgacgaggacgtggattactacgtaccggttgcagaagtcgaaaaactggaaaatcagcatttcgatgagattaacaaagcagggctgaaaaatggcaactga

SEQ ID NO: 101955 - DNA, 945 bp, Enterobacter aerogenes
atgagactcaggaaatacaataaaagtttgggatggatgtcattaatcgcaggtactgtattactcagtggttgtgattctgcgctccttgacccaaaaggacagattggactggagcaacgctctttgattctgacggcattcggcctgatgatgattgtcgttattcccgccgtcttaatggcagtaggatttgcctggaagtatcgcgcgagcaataaagatgcgaagtatagcccgaactggtcacactccaacaaagttgaagctgtggtctggacggttcctattctgatcatcttgttcctggccgttctgacctggaaaaccactcacgctctggagccaagcaaaccgcttgtccacgacgagaaagcaatcaccatcgaagttgtatcgatggactggaaatggttctttatttacccggaacagggtatcgctaccgtcaacgaaatcgccttcccggcgaacgtaccggtacactttaaagtcacttccaactccgtgatgaactcgttctttattccgcgcttaggtagccagatttatgcgatggccgggatgcagactcagctgcacctcatcgctgatgaagcaggcacttatgacggtatctccgcaagctatagtggcccgggcttctctggtatgaagttcaaggctatcgccaccccggatcgtgcaaccttcgatcagtgggtagcaaaagcgaaacagtccccgaactccatggactccatggctgcattcgacaaagtggctgtgcctagcgaaaacaacaaagtggaatacttctctaacgtgaaaccggatttgttcaaagatgttgttaacaaattcatgtctcacgagagcatgaacatgtctaaacctgaaggcgagcacgctgcgcacgaagggatggaaggcatggacatgagccacgcggaaaccgctcactaa

SEQ ID NO: 101956 - DNA, 1476 bp, Enterobacter aerogenes
atgtccaatcactacttgcgtatttttcagcagcccaaatcagctattttgctgatccttggctttgcttctggtttacctctcgcgctgacctccggcacgctgcaagcgtggatgaccgttgaaaatatcgatttaaaaactatcggcttcttttctctcgtcggtcaggcctacgtatttaagtttttgtggtcgccattaatggaccgctacacgccgccgtttttaggccgccgccgcggctggctgctgacgactcagcttgcgctgcttatcgccatcgccgcgatgggctttcttgaacccgcaacgcagttgcgctggatggcggcgttggctgtggttattgctttttgctccgcatcgcaggatatcgtctttgacgcctggaaaaccgacgtcctcccggcggaagagcgcggcgccggtgcggcgataagcgtgctcggttatcgtttgggaatgctggtttccggagggttagcgctctggttggccgaccgttggctgggctggcaaggtatgtactggctgatggccgcgctgcttattccgtgtattatcgccacgctgctggcgccggagcccagcgacgtcattccggtgcctaaatcgcttgagcaggccgtcgccgcgccgttgcgcgatttcttcggtcgcaacaacgcctggcttattctgctgttaattgtcctttataagctcggcgatgccttcgccatgagcctgaccaccactttccttattcgcggcgtcggttttgatgccggcgaagtcggaatggtgaataaaacgttgggcctgttcgccaccattgtcggcgcactctacggcggcgtgctgatgcagcgcctgacgctgttccgcgccctgctgatctttggcttgctgcagggggcctccaacgccggatactggatcctctcggtcaccgataaacacctttattcgatggcggcggcggtattttttgagaacctgtgcggcgggatgggcaccgcggcgtttgttgcgctgttaatgacgctgtgtaacaagtcgttttccgccactcagtttgcgctactgtcggcgctgtcggcggtgggtcgcgtttacgttgggccgattgccggctggtttgtcgaagcgaacggctggccgacgttttatcttttctccgtcgttgccgccgtgccggggattttgctcctgcttctgtgtcgccgtacgctggaatatacccaacgcacggaaagcttcttgccgcgcacgcaataccctcagacttacgccctggcgctgcttatcctggcggtaggttgtttgatgctggcgatatggctgctgctgttggcgatgaacgcgctggattacacctctttctccttcctgcctggcctgctggaagtcgccgcgctgaccgctatcggtggtattttgctcggcgcgattctggactatatggcgctacgcaaaacgcagctgatttaa

SEQ ID NO: 101957 - DNA, 579 bp, Enterobacter aerogenes
atgctgaagaaaattctattcccgttggtcgcgatgtttgtactcgctggatgcgccactccgccgacgaccattgaagtatcgccgaaaatcaccctgccgcagcaggatccgagcctgatgggcgttaccgtcagcattaacggcgcagaccagcgtaccgatcaggcgctggcgaaggtcacccgtaacaaccagttggttacgctgaccgcctctcgcgatctgcgcttcctgttacaggaagtgcttgagaaacaaatgacgtcgcgcggctacatgattggcccgaacggcgccgtcgacctgcagatcattgttaacaaactgtatgctgacgtctcgcagggcaacgtgcgttacaacatcgccactaaagcggatatcgccatcgtcgccaccgccgctaacggcaacaagatgactaagaactatcgcgccagctattccgttgagggcgctttccaggcttccaacgagaacattgcgaacgcggttaatagcgtgctgaccgataccatcgccgacatggcgcaggacaccagcattcacgacttcatcaaacaaaacgctcgttaa

SEQ ID NO: 101958 - DNA, 315 bp, Enterobacter aerogenes; identical to SEQ ID NO: 87133

SEQ ID NO: 101959 - DNA, 1299 bp, Enterobacter aerogenes
atgcaagtttcagttgaaaccactcagggccttgggcgccgtgtaacgattactatcgccgctgacagcatcgagaatgctgtcaaaagcgagctggtcaacgtagcgaaaaaagttcgcattgacggcttccgtaaaggcaaagtgccgatgaatgttgttgctcagcgttatggcgcttccgttcgccaggacgtgctgggcgacctgatgagccgtcatttcgttgacgcgatcatcaaagagaaaattaatccggccggcgcgccgaactacgttccgggcgaatacaagctgggcgaagacttcacctacgcggtagagttcgaagtgtatccggaagttgagctgaaaggtctggacgcaatcgaagttgaaaaaccggttgttgaagtcaccgacgctgacgttgacggcatgctggacaccctgcgtaagcagcaggcgaactggaaagaaaaagaaggcgctgttgacgctgaagatcgcgttaccatcgacttcaccggttctgtagacggcgaagagttcgaaggcggtaaagcgtctgacttcgtactggcgatgggtcagggtcgtatgatcccgggcttcgaagacggtatcaaaggccacaaagctggcgaagagttcaccatcgacgtgaccttcccggaagagtaccacgctgaaaacctgaaaggtaaagccgctaagttcgttatcaacctgaaaaaagttgaagaacgcgagctgccggaactgactgctgaattcatcaagcgtttcggcgttgaagatggttccgttgaaggtctgcgtgcggaagtgcgtaaaaacatggaacgcgagctgaaaggcgccgtgcgtaaccgcgttaaatctcaggctatcgaaggcctggtgaaagcgaacgacatcgacgttccggctgctctgatcgacagtgaaatcgacgtactgcgtcgtcaggctgctcagcgtttcggcggtaacgagaagcaggctctggaactgcctcgcgaactgttcgaagagcaggctaaacgtcgcgtagttgttggcctgctgctgggcgaagtgattcgcaccaacgagctgaaagctgacgaagagcgcgtgaaaggcctgatcgaagagatggcttccgcgtacgaagatccgtcagaagtggttgagttctacagcaaaaacaaagagctgatggacaacatgcgcaacgtggcgctggaagagcaggctgttgaagccgtgctggcgaaagctaaagtgtctgaaaaagccacttccttcaacgaactgatgaaccagcaggcgtaa

SEQ ID NO: 101960 - DNA, 624 bp, Enterobacter aerogenes
atgtcatacagtggcgaacgagataactttgcaccccatatggccctggtgccgatggtcattgaacagacctcacgcggtgaacgttcttttgatatctattcccgtctgctcaaggaacgcgttattttcctgaccggccaggtggaagaccacatggctaatctgatcgtggcgcagatgctgtttctggaagcggaaaatccagaaaaagatatttacctgtacattaactctccgggcggcgtgatcaccgccgggatgtcaatttacgacaccatgcagttcatcaagccggatgtcagcactatctgtatggggcaggcggcttcaatgggcgccttcctgctgaccgccggggcgaaaggcaagcgtttctgtctgccgaactcccgcgtgatgattcaccagccgctgggcggctatcagggtcaggcgacggatatcgaaatccacgcccgtgaaattctgaaagtgaaagggcgtatgaatgaactgatggcgcatcatacgggtcaatcccttgagcagatcgagcgcgataccgagcgtgaccgcttcctgtcggcgtcggaagcggtggaatacggcctggtcgattccatcttgacccatcgtaattga

SEQ ID NO: 101961 - DNA, 1275 bp, Enterobacter aerogenes
atgacagataaacgcaaagatggttcgggcaaactgttgtactgctctttttgcggcaaaagccagcatgaagtgcgtaagctgatcgccgggccatccgtgtatatctgcgacgaatgcgttgatttatgtaacgacatcattcgcgaagagattaaagaagtcgctccgcaccgcgagcgcagcgcgctgccgacgccgcacgaaattcgccaccatctggacgattatgttatcggtcaggaacaggcgaaaaaagtgctggcagtggcggtatacaatcactacaaacgtctgcgcaacggcgacaccagcaatggcgtagaactgggtaaaagcaacattctgctgatcgggccgaccggttccggtaaaacgctgttggctgaaacgctggcgcgtctgttggatgttccgtttaccatggccgatgccaccaccctgaccgaagcgggttacgtgggcgaagacgtggaaaacatcatccagaagctgctgcagaaatgcgattacgatgtgcagaaagcgcagcgcggcatcgtgtacatcgatgagatcgacaaaatttcccgtaaatcagataacccgtcgattacccgcgacgtgtccggcgaaggcgttcagcaggcgctgttgaagcttatcgaaggtaccgtagccgctgttccgccacagggcgggcgcaaacatccgcaacaggagttcttgcaggttgatacctccaagattctgtttatctgcggcggcgcgttcgcaggcctggacaaagtgatttcccaccgtgttgaaaccggctccggcattggttttggcgcgacggttaaagcgaaatccgacaaagccagcgaaggcgaactgctggcgcaggtcgagccggaagatctgatcaagtttggtctgatcccggaatttatcggccgtctgccggttgtcgcgacgctgaatgaactgagtgaagaagcgctgattcagatcctgaaagagccgaaaaacgccctgactaagcagtatcaggcgctgtttggcctcgaaggcgctgagctggaattccgtgatgaagcgctggatgcgatcgccaagaaagcgatggcgcgtaaaaccggcgcccgtggtctgcgctcgatcgttgaagccgcgctactcgacaccatgtacgatctgccgtccatggaagatgtcgaaaaagtggtgattgacgagtcggtgatcgaaggtcagagcaagccgctgctgatctacggcaagccggaagcgcagcaggcatctggcgaataa

SEQ ID NO: 101962 - DNA, 2355 bp, Enterobacter aerogenes
atgaatcctgagcgttctgaacgcattgaaatccccgtattgccgttgcgcgatgtggtggtttatccgcacatggtcatacccctgtttgtagggcgggaaaaatctatccgttgtctggaagcggccatggaccatgataaaaaaatcatgctggtcgcgcagaaagaagcgtcgacggatgagccgggtgtaaacgatcttttcaccgtcgggaccgtggcgtcaattttgcaaatgctgaagctaccggacggcactgtgaaagtgctggtggaaggcttacagcgtgcgcgtattactgcgctgtctgataacggcgagcacttctccgccaaagcagagtaccttgcttctccggtcattgaagagcgggagcaggaagtgctggtacgtacggctatcagccagtttgaaggctacatcaagctgaacaaaaaaatcccaccggaagtgctgacgtcgctgaatagcatcgacgatcccgcgcgtctggcggataccatcgctgcgcatatgccgcttaagctggcggacaaacagtccgtgctggagatgtccgacgtgaacgagcgtctggaatatctgatggcgatgatggaatctgaaatcgatctgctgcaggttgagaaacgcattcgcaaccgcgtgaaaaagcagatggaaaaatctcagcgtgagtactatctgaatgagcaaatgaaagccatccagaaagagctcggcgagatggatgacgccccggacgaaaacgaagcgctgaagcgtaagatcgacgcggcgaagatgccgaaagaggcgaaagaaaaaaccgaagcggaactgcaaaagctgaagatgatgtccccgatgtcggcggaagccaccgtcgtgcgcggctacatcgactggatggtgcaggtgccgtggaatgcccgcagcaaggtcaaaaaagatctgcgtcaggcgcaagagatcctcgataccgatcattatggtctggagcgagtcaaggaccgcatccttgagtatcttgcggtgcagagtcgcgttaacaagctgaaagggccgatcctgtgcctggtagggccgccgggggtgggtaaaacctcgctgggtcaatctattgccaaagccaccgggcgtaagtacgtgcgcatggcgttgggcggcgtgcgtgatgaagcggaaatccgtggtcaccgccgtacctatattggttccatgccgggtaaactgatccagaaaatggcgaaagtgggggtgaaaaacccgctgttcctgctggatgagatcgacaaaatgtcctccgacatgcgcggcgacccggcttcagcattgctggaggtactggatccggaacagaacgtggcctttaacgaccactatctggaagtggactacgatctcagcgacgtgatgttcgtggcgacctccaactccatgaatatcccggctccgctgctggaccgtatggaagtgattcgtctctccggttataccgaagatgaaaaactgaacattgctaagcgccacctgctgccgaagcagatcgaacgcaacgcgctgaaaaagggcgagctgacggtcgacgatagcgccattatcggcattattcgttactacacccgtgaagcaggcgtacgtagcctggagcgtgaaatctccaagctgtgccgtaaagccgttaaacagctgcttctggataagtcgctgaagcacatcgagattaacggtgaaaacctgcacgattatcttggcgtgcagcgctttgactacggccgcgcggatagcgaaaaccgcgtaggtcaggtgaccggtctggcgtggacggaagtgggcggcgatctgctgaccatcgaaaccgcctgcgttccgggcaaaggcaagttaacctacaccggttcacttggcgaagtcatgcaggagtcgattcaggctgcgctgaccgtggtacgcgcgcgtgctgagaagcttggtatcaatccggacttctacgaaaaacgcgatattcacgtgcacgtaccggaaggggcaacgccaaaagatggtccgagcgccggtacggcgatgtgcaccgcgttggtttcctgcctgaccggtaacccggtacgcgccgatgtggcgatgacaggggaaatcaccctgcgcggccaggtgctgccaatcggcggtctgaaggaaaaactgctggcggcgcatcgtggggggattaagactgttctgattccttacgaaaacaagcgtgaccttgaagaaattccggaaaacgttatcgccgatttggatattcatccggtacagcgaatcgaggaagttctgacacttgccctgcaaaatgaaccgtttggcatgcaggttgtaagcgcaaaatag

SEQ ID NO: 101963 - DNA, 273 bp, Enterobacter aerogenes; identical to SEQ ID NO: 87128

SEQ ID NO: 101964 - DNA, 1875 bp, Enterobacter aerogenes
atgatggacaacctacgcacggccgccaacagcgtcgtgctcaagattattttcggtatcattatcgtctcgttcattttgaccggggtgagtggttacctgattggcggcggcaacaactatgccgcaaaagtgaatggtcaggagattggccgcgcgcagtttgaaaatgccgttgccagcgagcgtaaccgcatgcagcagcagctaggcgatcagttctccgagctggcggccaacgaaaactacatgaagaccatgcgtcagcaggtgctgaaccgtctgatcgatgaatcgctgctggatcagtatgcccgtgaactgggcctgagcatcagcgacgaccaggtgaaacaggccatcttccagacccaggccttccagtcgaacggcaagtttgataacgagcgcttcagcggcatcgtgaatcaaatgggcatgaccaccgatcaatacgcgcaagcgctgcgtaaccaactgacgacgcaacagctgatcaatgcggtagccggtaccgatttcatgctgccgggcgagtccgaccaactggcggcgctggtatcccaacagcgcgtggttcgtgaagcgactatcgacgttaacgcgctggcggcgaaacagaccgttagtgatgaagagattaacgccttctggcagcagaaccaggcccgttttatggcgccagagcagttccgcgtgagctacatcaagatggatgccgccagcatgcaggaaaacgcctctgacgaagaaatccagtcatggtatgaccagcataaagatcagttcactcagccgcagcgtaatcgctacagcgtgattcagactaaaactgaagctgatgcgaaagcggtgctcgccgaactgcaaaaaggcgccgatttcgccacgctggcaaaagagaaatctaccgacatcatctctgcgcgtaacggcggcgatatgggctggatggaagaggcctctaccgtgcctgagctcaaagatgccggcctgaaagacaaaggtcagctttccggagtgatcaaatcttccgtaggcttcctggtggcgcgccttgatgatgttcagccggcacaggtaaaaccgctggccgatgtgcgtaacgacatcgcggctaaagtgaaacaggaaaaagcgctggacgcgtactacgcgctacagcagaaagttagcgatgcagccagcaatgataacgaatccctggcgggcgcggcgcaggttgccggcctgaaagtggttgagaccggctggttcggccgtgacaacctgccggaggagctgaacttcaagccggttgccgatgctatctttaatggcggtctggtgggtgaaaacggcgcgccgggtagtaactccgatatcattaccgttgacggcgatcgcgcctttgttctacgtattagcgagcacaaagcggaaagcgttaagccactggcggatgtgaaagcgcaggtgactgatatcgtgaagcgcaataaagcggaacagcaggcgaaactggatgctgacaaactgttagccgccctgaaagcgggcaaaggtgatgaagcgatgaaagccgcagggctgagcttcggcgccgcgcagacgctgtcccgtaccggccaggatccactgagtcaggctgcattctctttgccgctgccgcagaaagataaagccagctacggcgtaggcagcgatgctaaaggcaacgtagtattgctggcgctggatgaagtaaaagcgggcgctatgccagaagagcagaagaaagcgatggtgcagggtattactcagaataatgcgcaaatcgcattcgaagcgttgatgagcaatctgcgtaaagaagccaaaatcaagctcggcgacatcatcgaccagcagcaataa

SEQ ID NO: 101965 - DNA, 366 bp, Enterobacter aerogenes
atgaacagaggaatgaaaatggttattgccgccgtgttgctggcttgtgcggcgggttctcagggggcgctggcggcatcggcgagcggcaaggcggcatcggcaaaagaaactattcaggcgccgcagacgaaaatgccggaggaggccaaaacggcggatacccacggcgcgcaggttagcatcaataatgccagcgcggaggagttagcacaggctatgaacggcgttgggctcaagaaagcgcaggcaatcgtcagctaccgcgaagaatatgggccgtttaagactctcgacgatcttaaacaggtccctgggatgggcagttcactggtagagagaaatctgtcacatctgacgctgtaa

SEQ ID NO: 101966 - DNA, 402 bp, Enterobacter aerogenes
atgcagactcaaattaaagttcgcggttatcacctggatgtttaccagcacgttaacaatgctcgttatctggagtttctcgaagaggcgcgctgggatgggctggagagtagtccggcgtttcactggatgaccagccataacatcgcttttgtggtggtcaatatcaatatcaattatcgtcgcccggcggtacttggcgacgtgctcaccgtgaccagtaagcttgagcagttgaacggcaaaagcggcacccttagtcaggttgtgacccttaaccctaacggtgaagtggtggccgatgcgctgattacctttgtctgcattgatttgaaaacgcagaaggcgcagctgctggaaggggagttgcgcgaaaagctcgaccagatgaatttgcgctaa

SEQ ID NO: 101967 - DNA, 711 bp, Enterobacter aerogenes
atgaaacgcgccgtagttgtcttcagcggaggacaagactcaacaacctgcctggtgcaggcactggaacagtatgatgaagtgcattgcgtcacttttgattatggccaacgccaccgcgccgagattgacgtggctcgcgagctggcgctaaaactgggcgcggtagcgcacaaagtgctggacgttacgctgcttaacgaactggcggtgagcagcctgacccgcgatagcattccggtaccggattacgagccggatgccgatggtattccgaataccttcgttccaggtcgcaatattctgtttttaaccctgacggcgatctacgcctatcaggttaaggccgaagcgattattaccggcgtttgcgagaccgacttctccggttacccggactgccgcgacgaatttgttaaagcgctgcaccacgcggttagccttggtatggcgaaagacattcgctttgaaacgccgctgatgtggctcaacaaagccgagacctgggcgctggccgattattggggccagttggatctggttcgccgcgaaacgctcacctgctataacggcatcaagggcgacggctgcggccagtgtgcggcctgcaacctgcgcgccaacggcctgaatcagtatctgggcgatcaggccggcgtgatggcgcaaatgaagcaaaaaaccggtctgggccaggggcacgaagcttaa

SEQ ID NO: 101968 - DNA, 1701 bp, Enterobacter aerogenes
atgagattattaaatcgtttaaatcagtaccagcgcctttggcagccgtcgtccggcgctccgcagcaggtgaccgttggcgagctggctgaacgctgcttttgtagcgagcgacatatccgtacgctgttgcgccaggctcaggaggccggctggttaagctggcaggccagctccgggcgcggcaagcgcggaatgctctgtttttacaaaaccccggaaagtttgcgtaacgagatgatggaacaggcgctgaataagggtcagcaacaaaacgcgctggagctggcgcagctggcgccggttgagctgaaagcgttgttgcaccccttcctcggcggccagtggcaaaacaataccccgacgctgcgtataccttactaccgtccactggaaccgctgcgccccggttttctgcccggtcgtgcggaacaacatttggccgggcagatctattccggcctgacgcgtttcgacgatagcgacaatacgccggtgggcgatctggcacaccactggcaggtatcatccgatgggctgcgctggcacttttatatccgctctaccctgtgttggcataacggcgataccgtgaaaacctcacagctgcagcaaagactactgttgctcctggaactcccggcactacgcaccctctttgccagcatcagccgtatcgatgtcacccacgcccaatgtttgacgattacgctgcatcgcccggactactggctaccgttccgtttagccagctattgcagcgtgctggcgcatcctgacgatccggcgctcggtagcggtccgttccgaataaagctttttggcccggatctggtccggctggagaaccatccccgctaccatttacagcatccgctgatccaggcggtagaatattggatcacgccgcagctattcgaaagcgatctcggcaccagctgtcgccatccggtacagatcaccatcggcgatcccgaagagcttaataatttgcgccaggtgagcaacagcatcagcctcggcttctgctatttgaccctgcgtcagagtccacgtctcagtaaagcgcaggcccagcggataatttcgattatccaccgctcgtcgttgctggaaacgctaccgctggatgaagatctgattacgccgagccatgaagtgctaccgggctggtccattccccagggcccggaaaaccatgaggtgccgctgcctcgccagctcaccctgctctatcatttgccggtcgaattacacacaatggctgagcaactgaaactacgcctcgccactctcggctgcgaactgacgctcatttttcacgacgccaaaaattgggacggctgccggtatctggcgcaggccgatatgatgatgggcgaccgcctgattggcgaagcgccggaatatacccttgagcagtggctgcgctgcgatacgctatggccccatttgctgaccggggcgcaatatgcgcacctgcaggcaacgttagatgccgtgcaggcgcagcccgaagcgcgtagccgcaacgatgccctgcgcaacgtcttcaatacgctgatggatgacgccatcatgacgccgttattcaaatataattaccgcatcagcgcgccgcctggggttaacggcctgcgccttaatgccagagggtggttcgactttgccagcgcctggctaccagcatcatcggcgtga

SEQ ID NO: 101969 - DNA, 819 bp, Enterobacter aerogenes
atggcaaaactggcggcatttgatatggacggcaccctgttgatgccggaccatcgtctcggagaacagactctgacggcgctgagacggctgcgtgaacgcgatatcgccctgacctttgccactggtcgccatgctctggaaatgcaccatgtgatcggcgagttttcccttgatgcttttctgattaccggtaacggcacgcgcatccattcactggaaggtgaagagttgtatcgccaggatctgaatccggaagtggcggaagaggtgctgcacagcgtgtgggatactcaggcgagtatgcacgttttcaatgatggcggctggtttaccggccaggcaaggccggaactgctccgggctcacgccttcagcggctttcattatcaactgcgcgatccgaaacggatgccggcgcatcacgtcaccaagatctgtttctgcggcgatcatgacgatctgcgccgtctgcggatccagctaaatgacgtgctaggcgatcgcgcgtttctttgtttctcggcgatggattgcctggaggtgctgccggtcggctgtaataaaggggctgcgctggcggtgctgagccagcacttaggtttcactttgcaggactgtatggccttcggcgatgcaatgaacgatcgcgagatgcttggtagcgtaggtcgaggcttcattatgggcaacgcgatgccgcagctcaaagctgaactgccgcatctaccgatcatcggagactgccgtcatcaggctgtttcccattttttaacacattggctggataatcctgatcttccttattcccccgaatag

SEQ ID NO: 101970 - DNA, 1053 bp, Enterobacter aerogenes
atgaacagcgcctgggtaaaacatgccattagtgaaattaacgccgactatcagcgttccgccgatacgcacctgatccgcctggcgttgcctggttttccgggtatccctatttatctgaaagatgagagtacgcatccaaccggtagccttaagcaccgactggcgcgctcgctgtttctctatggcctgtgcaacggatggatcaaagaaggcaccacgattatcgaatcgtcttcgggttcgacggcggtctcagaagcctattttgctcgcctgctgggcctgccgtttattgccgtgatgccctcctgcacggcgaaacgtaaaatcgaacagattgaattatatggcggacgctgtcatttcgtcgacaacgcctgcgaaatctacgctgcttccgaaatgctggcgcgcgagttgaatggccactatatggatcagttcaccttcgccgagcgcgccaccgactggcgcggcaataacaatatcgccgacagcattttccgccagatgacccatgagccgtatccgcagccgtcgtggatcgtcatgagcgccggaaccggcggtacttctgcaaccattggccgctatattcgctgccagggttacgagacgcaactgatggtcgtcgacccgcagaattcggtgttcctcgattactggcaaagccgcgacgccagcctgcgcagcccggtcggcagcaagatcgaagggattggccgtccgcgcgtcgagccatcgtttattcctgacgtcgtcgatgagatgctgcgcgttccggatgccgccagcgtcgctaccgccctgtggctggaaaagcagcttggaagaaaagtcggcgcctccaccggtaccaatatgtggggcgtgctgcaactggccacgcgcatgcgcgatgaaggacgccagggttccatcgtcaccctgttgtgcgacagtggcgaacgttatctcgaaagctattacaacccgcagtgggtcgcggcaaatatcggcgatattaccccgtggcaggcgcagattatgcaactaagcggcgcacaataa

SEQ ID NO: 101971 - DNA, 459 bp, Enterobacter aerogenes
atgctagataaaattgaccgtaagctgctctcattgctgcaaactgactgcaccctctctttgcaggcgctggcggatgccgttaatctgaccaccacgccctgctggaaacggctcaagcgtcttgaggacgaaggcatcctgcgcgagcgcgtggccatcctggatgcggaaaagctggggctcgggttaaccgcctttgtgttgataaaaacccagcaccacagcagtgactggtactgccgctttgtcagcgaagtgtcgcaaatggcggaagtgctgggtttctggcgtatggccggcgagtacgactacctgctacgggtacaggtcgcggatatgaagcgctatgacgacttttataaacgtctggtgaacagcgtgccggggctgtcggatgtcacttcgagttttgccatggaacagataaaatacaccacggccttgcctattgattaa

SEQ ID NO: 101972 - DNA, 1770 bp, Enterobacter aerogenes
ttgcgattatttgctcaacttagctggtactttcgccgggagtggcgccgctatctcggcgccgtcgctctgcttgccgttattgccgtactccagctaatcccgccgaaagtagtggggattgtggtcgatggcgtgactaaagaacattacaccgtagagcaggtgtggatgtggatcggcgcgctggtggttatcgcggtgatgatttatctgctgcgctatgtctggcgcgtgctgctcttcggcgcctcttatcaactggccgttgaactgcgtgaagacttctaccgtcagctcagccgccagcatccggccttctatctgcgtcaccgtaccggcgatcttattgcccgcgcgaccaacgatgttgaccgcgtcgtcttcgccgccggcgagggtgtcctgacgctggtggattcattggtgatgggttgtgcggtactgattgtgatgtcgacgcaaatcagctggcagttaacgctgctggcgctggtgccgatgccgtttatggcgctggcgatcaagcgtaatggcgatgccctgcatgagcgtttccgcgtggcgcaggcggctttttccagcctcaacgatcgcacacaggaaagcctgaccagcatacggatgattaaagcgttcggccttgaggatcgccagtcggcgcagtttgccgacgatgcggcggataccggggcgaagaacatgcgggttgcgcgtatcgatgcccgcttcgacccgacaatctatattgccattggcgcggccaacctgctggcaatcggcggcggcagctggctggtgttgcagggcgagctgacccttggtcagttaaccagttttgtcatgtatctcggcctgatgatttggccaatgctggcgctggcgtggatgtttaacatcgttgagcgcggtagcgccgcctatggacgtattcgttcgatgctggaagaagcgccggtggtcaacgatggtagcgaaacggtgccggaggggcgcggggcacttaacgtggcggtgcgcgaatttatctatccgcaggcgacgaaaccgtcgctggagaaggttaacttcaccctgcagccggggcaaatgctcggtatctgcggcccgacgggagccgggaaaagcaccatactttcccttattcagcgccattttgatgttaccgagggggatatccgtttccatgatattccgctgtctcgcctgcagcttgatagctggcgcgggcggctggcggtggtcaatcaaaccccattcctgttctccgataccgtggccaataacattgcgttgggtaaaccggacgcgacccgggaacaaatcgaacatgtcgcgcggctggccagcgttcatgatgatattctgcgcttgccgcagggctatgaaacggaagtcggcgagcgcggcgtcatgctctcaggcggtcagaaacaacgtatttctattgcccgagcgctgctgctggaggcggaaatcctgatccttgatgacgcgctgtcggcggttgatgggcggacggagcatgatattttgcataacctgcggcagtggggggaagggcggacggtgattatcagcgcccaccgcctctcagcattaaccgaagccagtgaaattttggttctgcaacacggccatattgctcagcgcggacgccatgagcagcttgccgcccagtcgggatggtatcgcgacatgtaccgctatcagcaactggaagcggcgctcgatgatgcgccgcaggatgaggaggcgacagatgcgtaa

SEQ ID NO: 101973 - DNA, 1779 bp, Enterobacter aerogenes
atgcgtaatttcgccgatctctggccgaccctgaaacgtctgctggcctacggttcgccgtggcgtaagccgctcatcattgccgttatcatgatgtggatagcagcggcggcggaagtcagcggcccgctgctgataagctatttcattgataacatggtggcgaaacagtcgctaccggtgaagctggtctgcggcctggcggcggcctatatcttcctgcagatccttgccgctacgctgcactataaccaggcgctgctgtttaaccgggcggcggtcggcgtggtgcagcagttgcgcagcgatgtgatggacgctgcgctgcgtcagccgttaagcgagtttgatacgcaacctgtcggccagttgatatcacgcgttaccaacgataccgaagtgattcgtgacctgtacgtgacagtcgtggcgacggtgctgcgtagcgcggcgctgattggcgcgatgctggtggcgatgtttagtctcgactggcgaatggcgctggtggcggtggctatcttcccggcggtgctgatcgtgatggctatctatcagcgttacagcacgccgatcgtgcgtcgcatgcgcgcctggcttgccgatatcaatgatggcttcaacgaagtcatcaacggcatgggtgttattcagcaattccgccagcaggtgcgattcggcgagcgaatgcgtgaagccagctatggccactatctggcgcgtatgcagacgctgcgtctggatggtttcctgctgcgcccgctgttaagcctgttttcatcgctgatcctttgcggcctgctgatgctgtttggctttagcgcttccggaagtatcgaagtcggcgtgttatatgcctttattagctacctcgggcggcttaatgaaccgctgatcgaacttaccacccagcagtcgatgctgcagcaagcggtggtggcgggcgagcgcgtgtttgagctaatggatcgcccacgccagagctggggtaacgataacgcgccgttacgcagcggcgcggtggcgattgataacgtctcttttgcctatcgcgacgatcggctggtgctgcaggatatcaatctggatattccttcgcgcggttttgtggcgctggttggccataccggtagcggcaagagcacgctggccagcctgatgatgggctactatccgttgactaaaggcgaaattcgtcttgatggccgcccgctgtcgtcgttaagccacagcgctttacgtcggggcgtcgcgatggtgcaacaggatccggtggtattagccgataccttctatgccaacgtgacgctgggccgcgatatcagcgagcagcaggtctgggaagcgctggaggcggtgcaactcgctgaccttgcccgtgaaatgagcgacgggatttatacccaactgggtgagcagggcaacaacctgtcggtgggccagaaacagctgctggcgctggctcgcgtgctggtggaaacgccacaggtgctgatcctcgatgaagcgacagcgaatatcgactccggtaccgagcaggctatccagcaggcgctggcgaaagtgcgcgagcacaccacgctggtagttatcgcccaccgtctgtcgaccatcgtcgaagcggatacgatcctggtgctgcatcgtggccaggccgtcgagcgtgggaaccatcagcaattgctggcggcgaagggccgctactggcagatgtaccagctacagctggctggcgaagagctagccgccagcgttgaggaggagtcgctgagcgcctga

SEQ ID NO: 101974 - DNA, 339 bp, Enterobacter aerogenes
atgaagctggttaccgtggtaatcaaaccattcaaactggaagacgttcgcgaagcgttgtcctccatcggcattcagggcctgacggtcacggaagtgaaaggcttcggccgccagaaaggccatgccgagctctatcgcggcgccgaatacagcgtcaatttcctgccaaaagtaaaaattgatattgcgattgccgacgatcagctggatgaggttgtcgaggtgataggcaaggccgcctggaccggaaaaattggcgacggcaaaatttttgtcgccgaactgcagcgcgtgattcgtattcgtaccggcgaatccgacgaagcggcactgtaa

SEQ ID NO: 101975 - DNA, 1290 bp, Enterobacter aerogenes
atgatgagaacgacgatgaaaacggctctgggagcgctggcgctgcttccgggactggcgctggcggccgaaccggcggtggcggataaagccgacaacgcctttatgatgatttgcaccgcgctggtgctgtttatgacaatccccggcattgcgttgttctacggcggcctgattcgcggtaaaaacgtgctctcaatgctgactcaggtcattgtgacttttggcctggtttgcgtgctgtgggttatctatggctatacgcttgccttcggtagcggcggtagcttcttcggcagcttcgactgggtgatgctgaagaatattgaactgaaagcgttgatgggctcgttctatcaatatatccacgtcgctttccagggctctttcgcctgtatcaccgtgggcctgatcgtcggtgcgctggcggaacgtattcgtttctccgcggtactgatttttgtggtggtttggctcacgctctcctacgtgccgattgcgcatatggtgtggggcggcggcctgctggcgacccatggtgcgctggacttcgccggcggtaccgtcgtacacatcaacgctgcggtagcggggctggtgggcgcgtatatgatgggcaaacgtgtgggctttggcaaagaagcgtttaaaccgcataacctgccgatggtcttcaccggtacggcgattctgtatgtcggctggttcggctttaatgctggttccgcaagcgcggccaacgaaattgccgccctggccttcgtaaataccgtcgtggcgaccgctggcgcgattctggcctggaccttcggcgaatgggccacccgcggcaaaccgtcgctgctgggcgcctgctccggcgcgattgccggtctggtcggcattactccggcgtgcggttatgttggcgttggcggttcgctgattatcggtatcatcgccggcctggccgggctgtggggcgtcacggtgctgaagcgctggctgcgcgtcgatgacccatgcgatgtgtttggcgttcacggcgtgtgcggcatcatcggttgtatcctgactggcatcttcgcttccactacccttggcggcgtcggctatgcggaaggcgtcacgatggggcatcagttgctggtacagctggaaagtatcggcattaccgtggtctggtccgccgtcgtcgcctggatcggcttcaaagtggcggcgatgaccgtcggcctgcgcgtgccggaagagcaggagcgcgaagggctggacgtcaacagccacggcgaaaacgcctacaacgcctga

SEQ ID NO: 101976 - DNA, 1488 bp, Enterobacter aerogenes
atgtctgaaccacaaatgaaagtaaccgatctgcgttctgctttggcggtattaagccagtacgatgatgaactgatctacaccgacgaacccgttgaccccatcgccgagctctccggcgtgtaccgctatgtcggcgcccacggcaccgttcagcgcccgacccgcgttggcccggcgatgatctttaataaggtcaaaggctacgatgatgtcagagtgcttattggcctgctgtgttcacgccagcgcgtcgcccgcctgtttggcaccacgccggaaaacctggcgtttatgctcaaagactccgtggcgaatcctatcgcgccaatcaccatcccgcgcgaccaggcggcctgccaggaggtggtacatctggcaagcgatcctgatttcgatattctcaaaattttgcctgcgccgactaacaccccggaagacgcaggtccctactttaccctcggcatgtgctatgccgcggatccggaaaccggcgatcatgatgtcaccatccaccgcctgtgcgtacagagcaaagacgaaatctcgatgtatttcgtaccgggacgtcatctcgatactttccggcaaaaagccgaggcggccgggaaagcgttgcctatctcgattagcatcggcgtggatccagcgattgaaattggcgcctgctttgagccgccgaccacccctctcgggtttgatgaactctccatcgccggcgctctacgtaatcaggccgtcgagctcagcgaatgcgtgagcgtcaacgcccgcgccatcgccaacgccgaaatcgttattgaaggtgaactgctaccgggcgtgcgggtccgcgaagatcagaataccaacagcgggaaagcgatgccggagttccccggctataccggtagcgctcaggcggaagtgccggtgatcaaagtcaaagcaattacccaccgccgtcacccgattctgcaaacctgtatcgggccgagcgatgaacataccaatcttgccgggatcccgaccgaagccagcattctgcaaatggtagagcgcgcgcttccaggctttgtgcaaaacgtccactgtccttcgccaggcaccggtaaatatctcgccgtgctgcaggtgaagaaacgcacccccagcgatgagggccgtcagcgtcaggccgcgctactggcgttttccgccttctcggagctaaagcacgtaatgctggtcgatgaagacgtcgacgttttcgacatcaacgacgtcatgtgggcgatgaccacccgctatcagggcgatgtcagcaccgtgtttattcccggcgtacgttgccatccgctggatccatcatccgacccggccttcagcccatcgattcgcgatagcggtattgcctgcaaaaccattttcgactgcaccgtcccgtggaatatgaaagcccacttccagcgcagccagtttatggaagtggatgttgaccgctttatccctggcttcagtaagaaataa

SEQ ID NO: 101977 - DNA, 891 bp, Enterobacter aerogenes
atggattatcgacagctacaggcatttacggttctggcggaagaattgcactttggtcgggcggcgcagcgtctgcatatcacgcaaccggcgctgacgcagcagattaaaagttttgagaacgcgctggaattgcggctatttacccgcgatcgacgcaacgtcgcgctgaccgccgaagggcattttttgctggccgaggcgcggatgatcctcggccactgcgataaatttcgcgagaatgcgcgcagtttgcggcaggggcgcaaagggcagttgaaaattggctacgttggctctgctattttcgacccggcgttgagcgtgttaattggaaattatcgtcaacgtaaacctgaagccgatctgctgattgaagagcataacgttaacgacctgataaccgggctattaagcgaaacggtcgacctggcgtttattcgctcgccaggggcgcaatatgatgaactggagtcgctggatattgcgacccggccgctggtggcggtggtacctcgccatcatccgctcgccagccggcgcgctattccactcgcggcgctggcggaagagacgttttttattcagcaagatccttgcggcgtcgggctgggttggtcagccatcagcgcctgtcggcaggcgggttttacgccccgtaagattcagtactcgcgtgatgtctccacggcgataggccaggtatcgatgggaatgggcgtgacgttggtgcccgagacgcaaagcgccatgctggtgtcggaggtcagctattgcctgctggaagagacctttgccgtgacgacgcttacgctgtgctggcggcgggagagtcgcaacgggctattgggtgattttattgccggtgcgcgcgaactgcttggccgttaa

SEQ ID NO: 101978 - DNA, 864 bp, Enterobacter aerogenes
atgagtcaggctctaaccaatctgctggcattattaaatctggaaaaaattgaagaagggctgtttcgcgggcagagcgaagacctcggcttacgtcaggtcttcggcggccaggtggtcggtcaggcgctgtatgccgccaaagaaaccgtgcctgaggaacgcctgattcactcctttcatagttacttcctgcgtcccggcgatagccaaaaacccatcgtttacgatgttgaagtgctgcgcgacggcaatagcttcagcgctcgccgggtggcggctatccagcacggtaaacccatcttttacatgaccgcctcgttccaggccccggaaccgggctacgaacatcaaaaagcaatgccggcagccccgtcaccggaaggcctgccctctgaaaccgatatcgcccgtaaactggcgcatctgctgccgccgcaggcgaaagagaagttcctcagcgataaaccgctggaaattcgcccggtggagttccataacccgctgaaaggccacgttgccgaacccacccgccaggtgtggatccgcgccaacggcgtagtgccggatgatattcgcgtccaccagtcgctgctgggctacgcgtctgattttaatttcctgccggtagcgctacagccgcacggcgtcggcttccttgagccgggtatgcaggttgccaccatagaccactcaatgtggttccaccgcccgtttaacatcaacgaatggctgctatacagcgtcgaaagcacttccgcctccagcgcccgtggttttgttcgcggcgaattctatacccaggacggtattctggtcgcctcgacggtgcaggaaggcgtcatgcgtaaccgcaataactaa

SEQ ID NO: 101979 - DNA, 513 bp, Enterobacter aerogenes
atgaaatttgcctatatgttaagtgctatcgccgttgctgcggcattatccgcctgtgcgaataacccgaacagcaacgccgctcatcagacgacggcacccgatccttacggcattgcctcactgagctcctcgcagcaacagcctaatgtttccgggactatcaatattcgccaacgtgtagcgttaccgccggatgcggtactgaccgtgacgttgtccgatgcgtcgcttgccgatgcgccagcgcgtgtattgtcgcaaaaagcggtccgtactgaaggtaagcaggcgccgttcaactttgtgctgccttacaaccaggcggatatcaaaccgaacgcgcggatcctgctgagttcggcgattaccgtaaatggccagctgatgtttatcaccgataccgtgcagaccgtggtaacccagggcggtaatcgcgccgatctggtgctggtgccggtgcagcatgcgccagtgccggtggctaatgatatggcgccgatggcgcaataa

SEQ ID NO: 101980 - DNA, 315 bp, Enterobacter aerogenes
atggaggacgcccacgacagctttccccagcgggtctggcagatagtcgcctcaattccggaagggtatgtcaccacctacggcgatgtcgctctgctggcgggttcgccgcgcgcggcgcgtcaggtgggcggcgtgttaaagcgcctaccggaaggctcaacgctgccatggcaccgggtggtgaatcgccacggcgatatttcgctgaccggccccgacctacagcgccagcgtcaggcgctactggcggaaggcgtccaggtctccggcagcggtcatatcgacctgcaacactatcgctgggtttattaa

SEQ ID NO: 101981 - DNA, 498 bp, Enterobacter aerogenes
atgaaaaagattgcgagccccatcgcggcacactttaccgcaacccgccatacttattcgtcctgtatcttttcaacgtgtagccgctacggtaatcgcatgactcaatcgccacgccccaccaccaccttgcccatgcccgccattgatggcgtaaccgtaccctttcacggcatgaattttctacgccccgagctgctgctggatttcgtcagcgtcagtcccgcgccgttgttatcagtgacccccgtcgccctgctcttttccacggtgggcgtgttgcaacacgtcgagctgcgtaagctgcccgttgaggtcaaaggcaaggtggtttatcccatttcatcactcaaatacccgacgctgcgcggcaaactgattatcaatgcgcaatcacagcggctgaaatttcttgaaagcctgatcgctaccagcccgcatgacaatattcacggtatgcagatcctcgggctggcgctggaattcaccgtcctttga

SEQ ID NO: 101982 - DNA, 258 bp, Enterobacter aerogenes
atgaccacagtagttctgaatgtgaaaattgacgcagagttaaaagataaactgcgtcattatgcggaagtgaataacgagaatttaggcacggctacggagaagctgctgcaattggcgcttgcggccattgattcagcagacgaggcgggggtttcgcatgaggatattgataaccagcataccgaagaggaagcgtcgccgttaacccctaaagaaatcaaagcattacggaaacttctgaagaagaaaagatga

SEQ ID NO: 101983 - DNA, 216 bp, Enterobacter aerogenes
atgaaacaacaattctctacagccagcagttacagtgaagcctgtgacctgctgcgttccgggtacgttaagcacgtgcgcctgaactggaatatcggtagtgatgagttttttcgcattgcttccgactggtgtgaaaccggcgcaaaaattaaaaaagatgacgatggctttattatttcgctaaaaggttttcctattccgcgccagcattaa

SEQ ID NO: 101984 - DNA, 1428 bp, Enterobacter aerogenes
atgtcagtacgtcgttttggaacacaatcgctggcacgcctgctcggcaactggcaatccccttcctcgcgcgcgccgctgtggcggcagctggcagaagcgctgcgtctgttgatccttgatggacggctggcgctggagacccgtctgcccggcgagcgggaactggcgacggcgctaaatgttagccgcaccactatcgccagcgcgctggggttattgcgagaagaaggctatctgcaaagtcgccagggaagtggttcacgcattgcgctacctgccggccctctgcaccccggagagcagacgctttcggcaccatcggtcaatctcgccaccgccgccctcagcgccggaccggagattcatcaagcctaccgccacgcgctgacgctgatgccgcagtatttgtcctataccggctacgatcagcaggggttagtcgatttgcgcgcaatcattgcccgccgctatagcgaacgcggcctgccgacacaggcggatgaagtgatgattgtgaatggcgcgctgagcggatttgccctggtactgcgtctgttaaccgggccaggcgatcgggtggtagttgacgcgccctcttacccgatggcgattaacgctattcgcggcgcctcctgccgaccgataggcgtctctttaccggaaaagggctgggactgcgacggcctggcggcgaccattgcccaaacttcgccgcggctggcctttatgatgccggattttcataatcccaccggtcgctgcatggatagcgaaacccggcagcgcgtcgccgatctggccgccagcacgcgaacgacgctggtcgctgacgaaacgatggtcgatttatggtacaacgccccaccgccgccgccgctggcggctttcacccctgaagcaccgataatcactattggttcagcgggtaaaacgttctggggaggactgcgaattggctggatccgcgccccggcacggacgattgcctcgctcatccaggcgcgggatacactcgatctcggttcgccgctgctggaacagctggcttgttgttggctactggagaacgaacaaacactgttgccgcaacggcgggcaatgctggccgcgcgtcgtgatatgtgcgctgcgttgatggcggaatattttccccactggcgcttttgcgtccccgagggcgggctatcgttttgggtggagctgccggagatgttggcaacgcagttttcggtgcgcgctgagaatgccggcattcatatcggtaccggtacacgattcggtctggaaggtgccttcgaccgttatttacgtttgcctttcacgctgccggatacggaattgcgcaacgccttcagcattttacaaccgctgtggcagacccttacgcaacagaaagaaatggcgagaacacgtaaaataatataa

SEQ ID NO: 101985 - DNA, 615 bp, Enterobacter aerogenes
atggtccgtcgtttgctacaactttatattggtctggttctctatggcgtgtcgacggcgttattcgtccatgccaacctcggggccgatccgtgggatgtgtttcatctgggggtggcgaaacagcttaatatcagtttcggtacggtgattattgcgaccggcgccgcggtgctgctgctgtggatcccgctgcgtcagatgccgggtctcggcaccattagcaatgtcatcgtgcttggccttgcggccgatgccacgctcgcggtacttccgccgctggaatcgctgcccgcgcgtagtctgctactcgccggcgcggtggtgatgaatgcgatagcaaccgggatgtatatcggcgccggttttggtcccgggccgcgtgatggcttgatgaccggattgcatgcgcgaaccggctggtctttgcgtggtatccgtaccgctatcgaagtctcggtactgctgattggctggctgctgggcggcaaagtcggggttggcaccgtggtttacgcctttgctatcggcccgctgatccagctgtttttaccctggttccgtcaaccgcgagcagtcagtacggcggcgaaaagccgggggctggcgtcctga

SEQ ID NO: 101986 - DNA, 354 bp, Enterobacter aerogenes
atgaagtatgttgatggttttgtcgttgccgtccctgcggaaaataaggaggcataccgcgaactggcagcaaaatcggcgccgctgtttaaagagtttggtgccacgcgcgtcgtggagtgttggtcggatgatgtcccggaaggaaagctgacggatttccgcatgtcggttaaagcgcaggcggatgaggaagtggttttcagttggatcgagtacccgtctaaggagatcagggatgcggccaatgcgaaaatgatgagcgacccgcggatcaaagcgcttagcgatagcttgccatttgacggcaagcgcatgatcttcggcgggtttgcgccgattcttgacgagtaa

SEQ ID NO: 101987 - DNA, 1560 bp, Enterobacter aerogenes
atgacgactcgccatttaatgagtctggttacaggggtgcttattctcgccatcgtgctacccatcgccttaagtatctggctggcaatgcgccaggcgcaggcgcagttttatagcgagctcgaccactactcaaaacgcattgtcatgcgcgtagaacaagtcgccgctcaggccaaagaagcattacaagaagccgatgcgcacagcgccagtgcctgttcaccagaacatttgctgaatatgcgccgtattgcctacacccatcgctatgtgcaggaagtactctggttgcgtaattcggtgccgatgtgctcatcgcttgaggatcaccaggtctcggtgacgtttccgcagcccgaccacgtcaccgccgacggttacagcacctggcttacctcaatcaacgacctcggcctgcaacatcgcatgaccgcctttggcaacaaaaatcatattgtgatgatcgacccggtgtcgtttattgatgtcatcgccaccggtcaggaaaagatccacacgatattattcggcaccgagcacgatcaggtggtgatcagtagccaaccgatcgatcccgcagtttggacgcgaattaaaaacctccatagcgagacgctaacgctgaatgacaccgtctatcgcgtgcatatcatccctgaactgggtcttggcgtcgccagttggtcgtccacgcagccactggatgcgcgccttcgccagcagctgctgctatggctgccgatagggctctttaccagtctgttgacctcttttttacttctacgcctgctgcgcagattacgctcgccgcgttatggcatgctggatgcgctacagtcagatgccattcaggtttactatcagccgatcgtctcgctggaggatggcaaaatcgccggcgccgaagcgctggcccgctggcagcagccggatggcacttttttatcgccggatatttttatcccgctggccgagcaaaccgggctgatcacccggttgaccgaggatatcgtgcgtaaaatctttgccgacctcggcccctggctgcgccatcatccgcagatgcacatctctattaatctgtcggtggatgacctgcgctcgcctacgttgccaacactactcaaggaacaactggcgcgctggggaatcaatgcggaacagatctcccttgagcttaccgaacgcggctttgtcgatccacaaaccactctgccggtgattattggctatcgccaggcgggacaccggatctcgatcgatgatttcggcaccggctattccagcctcagttacctgcaaacgctggatgtcgatacgctgaagatcgataagtcttttgtcgataccctggaatataagccgctgacgccgcatatcattgagatggcgaagtcgctgaatctggcgattgtcgccgaaggggtggaaacgcccgctcagcgcgactggctgcgcgcgcatggcgtcaattacgcgcaaggctggctgtactgtaaggcgctaccgaaagaggaatttattcagtgggcggaacataatattaaaacgcattaa

SEQ ID NO: 101988 - DNA, 261 bp, Enterobacter aerogenes; identical to SEQ ID NO: 87103

SEQ ID NO: 101989 - DNA, 141 bp, Enterobacter aerogenes
atgcaggtactgaactcattgcgtagcgctaaacagcgccacccggattgccagatagtgaaacgcaaagggcggctgtatgttatctgcaaaagtaacccgcgctttaaggcggtgcagggacgtaaaaaacgccgttaa

SEQ ID NO: 101990 - DNA, 711 bp, Enterobacter aerogenes
atgacgcaatacaaccaattcaaccaactcgttggcgacgctttacctgactggcagccacgcccctggccgcagcgccagaccttgcaaggacagttatgccgcctggaaccgcttgacgtcaaacacgcgcaagcgctgttcaacgcctatcgacaggcgcctgatacccgcgcctggacctggcttttgcgtgaaccggaaaacagcgttaccgagttcagcgcctggattgccagcatcagcgagctaaacgatccgcttcacttcgcggttattgatgaacgcagtgggcagccggtcggatcgttagcgctgatgcgtattgacagcaaaaacggcgtcgttgaagtcggccatgttcacttttcgccgctgctgagccgcaaagcaatggccaccgaggcacagtggctgctgatgcgttatgtctttgagtcgctcggctaccgccgctatgagtggaaatgcaatagcctgaatgaaccgtcgcggcgcgcggcgctgcgcttaggtttccagttcgaggggcgctttcgacaagcgctggtgataaaaggccacaatcgcgataccgactggttttccattatcgatagcgagtggccagagatagatagcgcaatgcgccagtggctggccgccggtaattttgatgccaacggccagcaataccgcacgctggaaagctttcgcaaaccaacgaattaa

SEQ ID NO: 101991 - DNA, 1455 bp, Enterobacter aerogenes
atgaatattccggacgatgctttttttgccctgctgacgcgcgggatacagcaacggggagacgcgacgctacagcgcgcgctctatcaggcgctgcgcgaggctattttacagggcgagttactcagtcatagccggttgccgggcgcgcgcgttattgcgcagcgtgctggcgtatcgcgcaataccgtaaacagcgcgctggaacagctggcgattgagggatatctgatccgcagtcgtcaggggacgtatgtggcagcgctcaatacgctggcggaaagcgagccggcgccaccagcgtttgttttgcctgagcgcttgcgcacgctaccgctgccgggtcgacgggactccccggcgctgttgttgactaccggaatgcccgcggtgaactacttcccgctggctatctggcgtcgtttgctcgatcgggtactgcgcgaggatggcagcacgatccttggatacggggaggcggccggtgaaccggcgctgcgcgaggcgatagcccgtcatctgactttatcccggggcatacgctgcacggcgcggcaaattgtgatcactgaaggcgcgctggagggcgttaacctttgcacgcatctgctgagcgtcgcgggggatactgcctgggttgaagagcccggttatttcggcgcgaaaagcgtgtttattaaagccgggttacagctgaaggggatacctgttgacggtgatggcatgtgtcctgatagcgttaacgaggtagcgccgcggcttatctttacctcgccttcgcaccaatatccgagcggggcggtgatgagcgccggacgtcgtctggcattgctggaatatgcccgccagcatgacgcgtggattgtggaagatgactatgatagcgagtttcgctacagcggcgagccgattcaggcgatgctcggcatggtggcgcaggcgccggtggtttaccttggtaccttcagcaaaacgctatttccttcattaagaataggcttcgcggtgatgccgtcggcgctggccgaggcggctcagggagcgatcggcgcgctgctgcgcggcggccatcgtctggaacagcgtgcgctggcgctgttcatcgaagagggccattatgcgcgccatctggcttcaatgcgccgattatatcgtcggcgtcagcagcagttacgcgaggctgtggcaagcgaattcacgctggcgaatgagatttgggggggagagggcgggctgcatttaacggttgccgtcgatgacattgacgatgtgcaaattgtcgagcaggcgcgtcagtatcaaatggcgccagcggcgcttagccgcttttatcttaacccgcataaggcgcgtagcggtttggttctggggtatggcaatacgtccgcggcgcatttcgtaccggcgctgcggacgttgaacaggctaatcaggcagcaacgcgggtcagggtga

SEQ ID NO: 101992 - DNA, 498 bp, Enterobacter aerogenes
atgccgggctctacgaagaattcggggactaaaatgacagaaatacagcgcctgctaaccaataccatcgaggaactgaacgaaaaagaaaagcgcgataatcgcccgcgttttagtatcagttttattcgcaaccatccatggctatttgtcgctatgtacgccgcctttttggccactctcatcgtcatgctgcgctctgagacgttggtggattccgtgtggctgctgatcgttctgtttgttctgctgaacggctttttcttctttgacgtctacccgcgctaccgttatgaagatatcgatgtgctcgattttcgcgtctgttataacggtgaatggtataacacccgtttcgtccctgaacagctgattgacggcattctgcaatcgccacaggtcgcccatgagcagaaagctcaactgcagaaaatgatcgcgaccaaaggtgaactctccttctacgatgttttcaccctgacccgcgttgctgcctga

SEQ ID NO: 101993 - DNA, 564 bp, Enterobacter aerogenes
atgagcgaagaaaaaaggaaaatgatcgccggcgaaccttaccttgctggagacgccacgctaaaagcagaccgcctgcatgcccggcaggtgctgcaccgctacaaccactcagcaccggatgagcgcgaatcgcgcgccgctctgctggctgaactatttggtaagcccactgacgcgtatatcgaacccactttccgctgcgattacggctataacatcagcctcggcgccaatttttacgcgaactttgactgcgtgatgctcgatgtttgcccgctccgaattggcgataactgtatgctggcgccgggcgttcatatctataccgcgacccatccgctggacccaacggaacgcaacagcggtatcgagtatggtaaaccggtaacgatcggccacaacgtatggattggcggccgggcggtcatcaaccctggagtgaccattggcgacaatgcggttattgcctccggcgcagtggtggtgaaagacgtgccggccaatgcggtagttggcggtaatcctgcccaaatcatcaagctgctattaaccgaaaaatag

SEQ ID NO: 101994 - DNA, 219 bp, Enterobacter aerogenes; identical to SEQ ID NO: 87097

SEQ ID NO: 101995 - DNA, 375 bp, Enterobacter aerogenes
atggacgagtactcgccaaaaagacatgatatcgcgcagctaagatttctctgcgaaacgttgtatcatgactgccttgcaaacctggaagaaagcaaccgcggctgggttaacgatcccacctcggcggtgaatcttcaattaaatgaattgatcgagcacatagcaacttacgcgcttaattataaaattaagtacgctgaggataataagctgatttctcagcttgatgaatacctggatgacacttttatgctgttcagtagctatggcataaacacaagcgatctccaaaaatggcgcaaatccggcaatcggttattccgatgctttgtgaacgccagccgggagaacccggcaagtctttcttgttag

SEQ ID NO: 101996 - DNA, 3147 bp, Enterobacter aerogenes
atgcctaatttctttatcgatcgccccatatttgcatgggtgatcgccataatcatcatgttggcaggggggctttcgattatgaaactccccgtggcgcaatatccaacgattgcgccgccagcagtgacgatctcggccacctatccgggggctgatgcgaaaacggtgcaggacaccgtgacacaggttatcgaacagaacatgaacggtatcgataacctgatgtacatgtcctcgaacagtgactccaccggtacggtgcagatcaccctgaccttccagtccggtaccgacgcagatatcgcccaggtacaggtgcagaataagctgcagctggcgatgccgctgctgccgcaggaagtacaacaacagggcgtgagcgtggagaaatcctccagtagcttcctgatggttgtcggggttatcaacactaacggcaccatgacgcaggaggatatttccgactacgtgggcgccaatatgaaggatgccatcagccgtacctccggcgtcggcgacgttcagctgttcggttcccagtacgcgatgcgtatctggatggacccgacgaagctaaacaacttccagttaactccggtagatgtcatcaacgccattaaagcgcagaacgcccaggtcgcggcaggtcagttaggcggtacgccgccggtgaaaggccagcagttgaacgcctcgatcatcgcccaaacgcgtctgacttccgctgatgaattcagcaagattctgctgaaagtcaatcaggatggttcacaggttcgtctgcgcgacgtggcgaaagttgaactcggcggcgaaaactacgacatcatcgcgaagttcaacggccaaccggcttccggtctggggattaaactggccaccggcgctaacgccctggataccgccaacgccatccgcgcagagctggcgaagatggaaccgtacttcccgtcaggcctgaaaatcgtctacccgtacgatactaccccgttcgtgaaaatctctattcatgaagtggtaaaaacgctggtggaagcgatcatcctggtgttcctggtcatgtatctgttcctgcagaacttccgcgccacgctgatcccgaccattgcagtaccggtggtattgcttgggacattcgccatcctggcggtgtttggcttctcgataaacaccctgacgatgttcgggatggtgctggccatcggcttgctggtggatgacgccatcgtggtagtagaaaacgtcgagcgcgtaatggcggaggaaggattgccgccgaaagaagcgacccgtaagtcgatgggtcagattcagggcgcgttggtcggtattgcgatggtactgtcggcggtatttatcccgatggccttcttcggcggttcaaccggcgcgatttatcgccagttctcgatcactatcgtttccgcgatggcgctgtcggtactggttgcgctgattctgacgccagcgctgtgcgctaccatgctgaaaccgattcagaaaggcggccatggcgagcacaaaggcttctttggctggtttaaccgcatgttcgataagagcacgcaccactacaccgacagcgtaggcaacattctgcgtagtaccggtcgttacctggtgctgtatctgattatcgtcgtcggtatggcttacctgttcgttcgtctgccaagctccttcctgccggacgaagaccagggcgtgttcctgagtatggcgcagcttccggcgggcgcgagtcaggaacgtacgcagaaagtcctcgacgagatgactgactactacctgaccaaagagaagaacaacgttgaatcggtgttcgcggttaacggttttggttttgctggtcgcggtcagaacaccggtatcgccttcgtgtcgttaaaagactggagcgaacgcccgggttcagaaaacaaagttgaagcgattaccggccgcgcgatggcccgtttctcgcagattaaagatgcgatggtcttcgcgtttaacctgccggcgatcgtcgaactgggtaccgctaccggctttgacttccagctcatcgatcagggtggtttagggcatgagaaattaactcaggcgcgtaaccagctgtttggtatggttgctcagcatcccgatctgctggttggcgtgcgtcctaacggcctggaagatacgccgcagttcaagatcgatatcgatcaggaaaaagcgcaggcgctgggcgtttcaattagcgacatcaacaccaccctcggcgcggcatggggcggcagctacgtcaacgacttcatcgaccgcggtcgcgtgaagaaagtgtacgtcatgtctgaagcgaaataccgtatgctgccagaggatatcggcaactggtatgtacgcggcagcgatggccaaatggtgccgttctccgccttctccacttcccattgggaatatggttcaccgcgtctggaacgttacaacggtctgccgtcgatggaaatcctcggtcaggcagcgccgggccgcagtacgggtgaagcgatggcgatgatggaacagctggcaagcaaactgccttcaggcgtcggttacgactggaccggtatgtcctatcaggaacgcctgtcaggcaaccaggccccggcgctgtatgctatctcgcttatcgtcgtcttcctgtgtctggcggcgttgtacgagagctggtcgattccgttctccgtcatgctggtggtaccgttgggtgttgttggcgcgctgttagcggcaaccttccgcgggctgactaacgacgtttacttccaggtcggcctgctgacgaccatcggcctgtcggcgaagaacgcgatacttatcgttgaattcgccaaagacctgatggaaaaagaaggcaaaggcctgattgaagcgacgctggaagcagtacgtatgcgtctgcgtccaatcctgatgacctctctggcgtttatcctcggggtcatgccgctggttatcagctctggcgcaggttccggcgcacagaacgccgtcggtaccggcgtaatgggcggcatggtgaccgcgacggttctggctatcttcttcgtgccggtgttcttcgtggtggttcgtcgccgcttcactaagaaaactgaagatattgagcataaccatccggttgagcatcattaa

SEQ ID NO: 101997 - DNA, 1200 bp, Enterobacter aerogenes
atgaacaaaaacagagggttaacgcctctggcggtcgttctgatgctctcaggcagcttagcgctaacaggatgtgacgataaaccggctcaacaaggagcccagcaaatgccggaagtcggtattgtcacgctcaaatccgcacctctacaaatcaccactgaacttcctggtcgtaccaatgcttatcgtgtcgcagaagtccgtcctcaggtaagtggcattattctgaaacgtaacttcactgaaggcagcgatattcaggcgggggtgtctctttatcagatcgatccggcaacctatcaggcaagctatgaaagcgccaaaggcgacttagcgaaagcccaggccgccgcaaacatcgctcagttgacggtcaaacgttatcagaaactggttggcaccaaatacatcagccaacaagaatatgactcagccgttgccgacgctcagcaaagcaacgccgccgtcgtcgcggcgaaagccgcagttgaaaccgcgcgtatcaacctggcttataccaaagtgacgtcgccaatcagtggacgcatcggtaaatccgcggtcaccgaaggcgcgctggtgcaaaacgggcaatctaccgcgctggctaccgttcagcagctagaccctatctatgttgacgttacccaatcgagcaacgatttcctgcgtctgaaacaggaactggcgaacggtaaactgaagcaagaaaacggtaaggcgaaagtcgaactggtcaccaatgacggtctgaaatatccgcaagagggtacgctggaattctccgacgtcaccgttgaccagaccaccggctctatcacgctgcgcgctatcttcccgaacccggaccacactctgctgccagggatgtttgttcgcgcacgtctggaagaaggtattaacccggatgcgctgctggttccgcaacagggcgttacccgtaccccgcgcggcgatgccagcgtgatggtggtcggcgaaggcgacaaagttgaagtgcgccaggtcaccgcgactcaggctatcggcgacaagtggttagtgaccgaaggtctgaaatcaggcgatcgcgtgatcgtcgctggcctgcaaaaagtcaaaccaggcgtacaggtaaaagcgcaggaagtagcttcagacaaccaacagcaaaccgccggcaacgcgaacgctcagtctgaacaaaccaagtcttaa

SEQ ID NO: 101998 - DNA, 651 bp, Enterobacter aerogenes
atggcacgaaaaaccaaacaacaggcacttgaaacccggcaactgattcttgacgtcgccctgcgattgttttcgcagcaaggggtatcatctacctcgttggccgcgattgcaaaagctgctggagtgaccaggggcgctatatactggcatttcaaaaacaaatccgatctgtttaatgaaatatggagtctctctgacgccagcattagcgatctcgaagttgagtatcgggcaaaattccctaacgatccactgtccgttgttcgcgaaatactcgtctatatcctcgaagcgacggtagtagaggaacgtagacgcctgatgatggaaatcatcttccataaatgcgaatttgtcggagaaatggccgttgtccaacaagcacagcgcagtttatggcttgaaagctacgatcgtattgagcaaacattaaaagattgtatcactgctcaacaattacctgcgaatttactcactcgccgtgcggcaattctgatgcgcagttatctttccggattaatggaaaactggctctttgcgccagagagttttaaccttcatgcggaagcccgtgcttatgtcgatgccctcattgagatgtatcagacctgcccgtcgctacgaagttcgtctgaggtcatggcctga

SEQ ID NO: 101999 - DNA, 3345 bp, Enterobacter aerogenes
atgcagcatacaaatcgttggcctcatgctatttccaccattgtctttgcactggtccttatagttggcactctgagcttcagccaggttcaggctgcagatttacctgaccgttctgacattcaaagccagctcactacgctaaataagcaaaaagaactcacgccgcaggaaaaattagttcagcaggacctgacgcagactttagaaacgctcgataagattgagcgtataaagtctgaaactgtgcaactgcgtcagcaggttgaacaggcgccggcgaaaatgcgtcaggcggtagacagcctgaatgcgctgagcgatgttcctgatgatgaggtcacccgtaaaaccctgagcacgttatcgttgcgacagcttgaatccagggtgtctcaggcgctcgacgatctgcaaagcgcgcagaacgatctggcgacctacaacagccaattggtctcgctgcagacgcagccggagcgcgtgcagaacgcgatgtactccgcctcccagcagctacagcaaattcgtaaccgtctcaacggcaccgcgccgggtgaagagacgctgcgcccgacgcagcaggggttgctgctggcgcagcaggccttgctgaatgcggagatcgaacagcagcgtaagagcctggaaggcaatactgtgctgcaggatacgctgcagaaacagcgcgattacgtgaccgcccacagcaaccggctggaacatcagctgcaactgttgcaggaagcggtgaacagcaagcggctgaccctcaccgagaaaaccgctcaggaagcggtctcgccggaggagacctcgcggatccaaaataacccgttggtcaagcaggagcttgaagttaaccatcagcttagcgaaaagctgattcaggcgacggaaaacggcaaccaactggtgcagcgcaatatcagagtgaaaaactggctcgaccgcgcgctgcaatccgaacgcgatatcaaagagcagatttcggtattgaaaggcagcctgctgctgtcgcgtatcctctatcagcagcagcaaacattgccatcagcggatgagctgcaggatatgaccaaccgcattgccgatctgcgcctggagcagtttgaagttaaccagcagcgcgatgcgttattccagagcgatgcctttgtggcaaagctggaagagggccatagcagcgaagtcacgccggaagttcacgacgccctgttggaagtcgtggacatgcgccgagaattgctcgaccagtttaacaaacagctggggaaccagctgatgatggccatcaacctgcagattaaccagcagcagttgatgagcgtctccagcaatctgaaatcgatcctgacccagcagattttctgggtgaacagcaataagccgatggattgggagtggattaaatccttcccggaagcgctgaaagcccagttcaaatcgatgaaaatcaccgtcaactgggagaaagcctggccggcggtatttatcgcgttcctcgccgggctgccgctgctgttgattgccgggctgatccgctggcgcttgcagtggctgcgtgattaccaggctaagctggcctcccaggtaggccagttacgcaatgatactcagctaaacacgccaaaagcgatcctgatagatttaatcagagcgctgccggtggtgctgctcatcctcgccgccgggcttatcctgctgacgatgcagctgaatgtcagcaacctgctatgggcctacagtaaaaaactagcgatgttctggctggtgttcggcctgtgctggaaggtgctggaaaaagacggcgtggcggtgaagcatttcaatatgcccgcacagctcaccagccactggcggcggcagatcgtccgcgtcagcctggcgctgctgccgctgaatttctggtcggttgtttctgagctctctccgcttaatttgatggacgacgtgctggggcagtttgttatcttcgtcaacctgctgctcattgcggtgctggtgtggccgatgtgccgcgaaagctggcgtgacaaagagtcgcacagcctgcgcctgctgacggtgaccgtgctgtcgattgtgcccgtcgcgctgatggtcctcacggcgaccggttacttctataccacgctgcgtctggctggccgctggattgagaccgtctatctggtgatgatgtggaatctgctataccagaccgttctccgcggcctgagtgtggcggcgcgacgtattgcctggcgccgggcgctggcgcgtcgccagcatctggtgaaagaaggggcggaaggcgccgaaccgcaggaagagccgacgatcgcgctcgaacaggttaaccaacaaacgctgcgcatcaccatgctggtgatggtggcgttgttcgcggtgctgttctgggcgatttggtccgatctgataaccgtgttcgcctatctcgacagcattacgctctggcactacaacggcaccgaagccggcgccagcgtggtgaaaagcgtgacgatgggtagcctgctgtttgcgattgtcgcctcgatggtcgcctgggcgctgatccgcaacttgccgggcctgctggaagtgctggtgctgtcgcgtcttaatatgcgccagggcgcttcttatgccatcacgacgatcctcaattacgcgattatcgccatcggcgcgatgacggtcttcggctccttgggcgtgtcgtgggataaactgcagtggctggccgcggcgctgtcggttggtttaggtttcggcttacaggagattttcggtaacttcgtctccggcctgatcattctcttcgaacgcccggtgcggatcggcgatacggtcactatcggtaccttctcaggcaccgtcagtaagatccgtatccgcgcgacgaccatcaccgatttcgatcgtaaagaggtaatcatcccgaataaagccttcgttactgaacggctgatcaactggtcgctctccgataccatcacccgcgtggtgatccgcctgggcgtagcttacggatccgatctcgataaagtgaaagaggtgctgctgcaggcggcgcatgaacatccgaaagtgatgcaggaaccggcgccgtcggtcttctttaccaccttcggcgccagcacgctggatcatgaactgcgcctctacgtgcgtgaactgcgcgatcgcagctacgcggtggacgaacttaaccgctcgatcgatcgcctgtgccgcgaaaacaatatcgatattgccttcaaccagctggaagttcatctgcgtaacgagaagggagatgaagtgacggaagtgaagcgcgataataaaggggatgatacggcgccaggcgtcgcataa

SEQ ID NO: 102000 - DNA, 174 bp, Enterobacter aerogenes
atgtcgctggaaaatgcaccggacgaggtcaaactggccgtcgatttaatcatgttgctggaggaaaaccgggtcagcgcaaaaacggtgctgggagcgttggatattattaagcgtgactatgaaaacaaactgaaaaacgcccaacctgacgcgccccggtcagaagaataa

SEQ ID NO: 102001 - DNA, 528 bp, Enterobacter aerogenes
ttgaaaacaacccggcttttacaaacgctgaaaaatcagctggctgaactggcgcttcaggtggcgccgctgtccagccacgctacgttgagcccgcgtttcgaccgccagctgttccgtacccgcgacacccagatgcaggcgtatctcgacgaagcacagcataatctcgccgagctccagcatgccgttgagcatcagcatctgccccaggtcgcctggctcgccgagcggctggtggcgcagattgccgccattagtcgtgagacggcgacctggtcgttacgccaatgggacagcgcctcgccgacgctaaaccgctggcaacgccgccgcctgcagcaccaggagtatgagcgccgcctgctggcaatgcgcaacgatcgccaacgtcagctggcgtcggcaactacccttgccgaacagcaacggctaacgaaagaggtcgaggcctatgccgggcgcctggcccgctgtcgcgatgcgctggaaaatattgaaaacgtactggcgcgtttaacgcgctaa

SEQ ID NO: 102002 - DNA, 378 bp, Enterobacter aerogenes
atgccacgtattattttaatcatcattggctggctggcggtagtgctggggacgctgggcgtcttcttaccgctgttaccgacaacgccatttatcctgctcgccgcatggtgttttgcccgctcgtcgccgcgctttcaccactggctgctgtatcgctcgtggtttggcggctatcttcgccactggcagcagtaccgggcgatgccgccgggggccaagccgcgagccattatcatgattttactgacctttgccatttctctgtggctggttaagcttatgtgggtgcgcatcatgctgctggcgatcctcgtctgcctgttgatatttatgtggcgcattccggtggttgacgcaaagcaacaaaagcactga

SEQ ID NO: 102003 - DNA, 552 bp, Enterobacter aerogenes; identical to SEQ ID NO: 87088

SEQ ID NO: 102004 - DNA, 1908 bp, Enterobacter aerogenes
atgagttatcaggtcttagcccgtaaatggcgcccacaaacctttgctgacgtcgtcggccaggaacatgtgctgaccgcactggcgaacggcttatcgttagggcgcatccatcacgcatatctcttttccggcacccgcggagtagggaaaacctccatcgcccgtctgttggcgaaggggttaaactgcgaaagcggtattaccgcgacgccgtgcggcgtctgcgataactgtcgcgaaatagaacaaggccgctttgtcgatctgattgagatcgatgccgcctcgcgcaccaaagtggaagatacccgcgatctgctggacaacgtccagtacgcgccggcccgcggccgcttcaaggtctacctgatcgatgaagtgcatatgctgtcgcgtcacagcttcaacgcgttattgaaaacgctggaggagccgcccgcgcacgtcaaattcctgctggcgaccaccgatccgcaaaagctgccggtgacgattttgtcccgctgcctgcagttccacctcaaggcgctggatgtcgaacagatccgccatcagcttgaacacatccttggcgaagagcagatcgcgtttgagccgcgtgcgctgcagctgctgtcgcgcgccgcggatggcagcctgcgcgatgcgttaagcctgaccgatcaggcgatcgccagcggcgatggccgcttaaccgcgcagtccgtcagcgaaatgctcggcaccctcgacgacgatcaggcgctatccttgatagaagcgctagtggccgccgacggcgagcgcgtgatggcgggcgtcagcgacgccgcctcgcgcggcgttgaatgggaagcgctgctggtggaaatgcaaagtctgctgcaccgtatcgcgatggttcagctctcgccatcggcgctgggggcggatatggccgccgtcgagctacgtatgcgcgagctggcgcgtaccgtgccgccggccgacgtgcagctttactatcagacgctgctgattggccgcaaagaactgccttatgcgccagaccggcgtatgggggttgaaatgacgctgctgcgcgcgctggctttccatccgcgtcagccgctgccggagccggaagcgaagcccatgcagaccgctgcgcctgcgccgcagcagcaaacagcgccgccggtcgcatcggctccgccgccgcagaatctgccgcaaagcaccagccaggtgctggcggcgcgcagtcggctgcagcgaaccccgggagcaaccaccccaaaaaagagtgaaccggcagccgcatcccgcgcgcggccggtgaataacgctgcgctggaacgactgagttcgattaccgagcgcgtacaggctcgtccggctgcggccgcgcttgagcaggccccggcgaagaaagaagcctatcgctggaaatcgacggccccgattgaagaaacccaggtcgaggttgccacgccgaaagcgctgaaaaaagcgctggagcatgaaaaaacgccggagctggcggcgaaactagccgtggaagcggtcgagcgcgatagctgggcggcggaagtgagccagttggcggtaccgaaactggttgaacaggtggcgctgaacgcgtggaaagagcaggacggcaatcgcatatgtctgcatttacgcccgagtcagcggcatctcaactccaccggcgcacagcagaaacttgctgaagcgctgggcgtgttgtacggtgcgccggttgaattgactatcgttgaagatgataattcggcgatgcgcacgccgctggagtggcgacaggcaatttatgaagagaagctcgcgcaggcgcgcgacgcgattattgcggataacaacatccagaccctgcgacgattcttcgacgccgatctggatgaagagagtatccgccccatttga

SEQ ID NO: 102005 - DNA, 333 bp, Enterobacter aerogenes
atgtttggtggaaaaggcggcctgggtaacctgatgaaacaggcccagcagatgcaagacaaaatgcagaaaatgcaggaagagatcgcgcagctggaagtgaccggtgagtccggcgcgggtctggtaaaagtaaccatcaacggcgcgcataactgccgtcgcgtggaaatcgacccaagcctgctggaagacgacaaagagatgctggaagatctggtggctgccgcattcaatgacgcagcgcgccgtattgaagagacccagaaagagaaaatggcctccgtttctgccggcatgcagctgccgccaggcttcaagatgccgttctga

SEQ ID NO: 102006 - DNA, 606 bp, Enterobacter aerogenes; identical to SEQ ID NO: 87085

SEQ ID NO: 102007 - DNA, 1875 bp, Enterobacter aerogenes
atgaaaggacaagaaacccgtggtttccagtcagaagtgaaacagcttctgcacctgatgatccattctctttattccaacaaagaaatcttcctgcgcgagctcatctccaacgcctcggatgcggcggataagctgcgtttccgcgcgctgtcccagccggatctgtatgaaggcgacggcgagctgcgcgtacgcgtatcgtttgataaagacaaccgcacgctgaccatcgctgataacggcatcgggatgaaccgcgacgaggttattgaccatctcggcaccatcgccaaatccggcaccaaagcgttcctcgaatctatgggttccgatcaggcgaaagatagccagctgatcggccagttcggcgtcggcttctattcagcctttatcgttgccgacaaagtcaccgtgcgcacccgcgccgcgggcgacaagccggaaaacggcgtgttttgggagtccgctggcgaaggcgaatatactgttgccgatatcactaaggccgatcgcggaaccgaaatcacgttgcatctgcgtgaaggcgaagacgacttcctcaacgactggcgcgtgcgttcgatcatcagtaaatattctgaccatatcgcgctgccggttgagattgaaaaacgcgaagaagtggacggcgaaaccgttatttcgtgggaaaaaatcaacaaggcgcaggcgctgtggacccgcagcaaatctgaagtcagcgatgacgaatacaaagagttctataagcatattgcccatgatttcagcgatccgctgacctggagccacaaccgcgtcgaaggtaagcaggagtacaccagcctgctgtatattccgtcgcaggcgccgtgggatatgtggaaccgcgatcataaacacggcctgaagctgtatgtgcagcgcgtcttcatcatggatgacgccgagcagtttatgccgaactacctgcgtttcgtgcgcggcctgatagattccaacgatctgccgctgaacgtgtcgcgtgaaatcctgcaggatagcaacgtcacccgtaatctgcgcaccgcgctgaccaaacgcgtgctgcagatgctggaaaagctggcgaaagacgacgccgaaaaatatcagaccttctggaaacagtttggcctggtgctgaaagaaggcccggcggaagatgcctccaaccagcaagcgattgctaaactgctgcgcttcgccactactcataccgattcttccgcgcagaccgtgtcgctggaagagtacgtttcgcgcatgaaagaagggcaggagaagatttattacatcaccgccgacagctatgcggcggcgaagagcagcccgcacctcgagctgctgcgtaaaaaaggtatcgaagttctgctgctgtccgatcgcattgacgagtggatgatgagctacctgaccgagttcgacggcaaggcgttccagtcggttgccaaagccgacgagtcgctggagaagctggcggacgaagttgacgaatccaccaaagaagccgaaaaagcgctggagccgttcgttgagcgtgttaagggcctgctgggtgagcgcgtgaaagaggtgcgtctgacgcatcgtctgaccgacactccggcgattgtcaccactgatgccgacgaaatgagcacccagatggcgaagctgttcgccgctgccggtcaggcggcgccggaagtgaaatacatcttcgagctgaacccggcgcatccgctggtgaaacgcgccgccgatacccaggacgacgcgcagtttggcgagtgggtcgaactgctgctggatcaggcgctgctggcggaacgcggtacgctggaggatcctaaccagttcatccgccgtatgaatcagctgctggcatcctga

SEQ ID NO: 102008 - DNA, 645 bp, Enterobacter aerogenes
atgcgtattattctgcttggcgctccgggcgcgggtaaaggaactcaggctcagttcatcatggagaaatacggtattccgcaaatctccaccggcgatatgctgcgcgccgcggtaaaatccggctccgagctcggtaaacaagcgaaagacattatggacgccggcaaactggtgaccgatgagctggtcatcgcgctggtgaaagagcgtatcgcccaggaagattgccgtaacggtttcctgctggacggcttcccgcgcactatcccgcaggctgacgccatgaaagaagccggcatcgccgttgactacgttctggagttcgcggtaccggacgagctgatcgtcgatcgtatcgtgggccgccgcgtacacgccgcttccggccgcgtctatcacatcaaattcaacccgcctaaggttgaaggtaaagacgacgtgaccggcgaagagctgaccacccgtaaagacgatcaggaagaaaccgtgcgtaagcgcctggtggaataccatcagatgactgcgccgctgatcggctactatcagaaagaagcgcaggcgggtaacacccaatacgcgaaagtcgacggcaccaaagcggtggctgacgtgcgcgccgatctggaaaaaatcctcggctaa

SEQ ID NO: 102009 - DNA, 963 bp, Enterobacter aerogenes
atgcatcagacgaaaacaggtattttgctagccaatttaggcactcccgatgcgcccacgcccgatgcggtaaagcgctatctgcgacaatttcttagcgacaaacgggtagtggatacgcctcgtctgctgtggtggccgctactgcgcggcatcatactgccgattcgcgctccccgcgtggcgaagctctatcagtctgtgtggatggcggaaggctcgccgttgatggtgtatagccggcaacagcaacaggcgctggcagccaggctacccgatgttccagtagcgctggggatgagctatggctcgccgtcgctggcaagcgcggtcgatgagctattggcccaggacgttgaccatatcgtggtattgccgctgtatccgcaatattcgtgttctaccgtggcggcggtatgggatgaactggcgcggatcctcgcgaaaaagcgcgccattccgggcgtttcgtttatccgcgactatgccgacgacgctgactatatccacgcgctggcggccagcgtacgcgcttcgttcgccgttcacggcgaaccggatgtgctgctgctctcctatcacggtattccgcaacgctacgcccatgagggcgatgattacccgcagcgctgccgggtaacgactcgcgagctggtttcagtgctcgggctgccgccggagcgggtgatgatgaccttccagtcgcgctttggccgcgaaccctggttgacgccatataccgacgaaacgctaaaaatgcttggcgagaagggcacacagcacgtacaggttatctgtccgggcttctccgccgactgtctggaaacgctggaagagatcgcggtgcagaaccgggaaattttccttgaggctggcggtaagcaatatgagtatattccggcgcttaatgccgatcctgcacatattgagatgatggtgaacctgaccgcgtcgtatcgctaa

SEQ ID NO: 102010 - DNA, 1305 bp, Enterobacter aerogenes
atgaaatttcccggtaaacgcaaatctaaacactatttccccgttagcgctcgcgatccgctgctgcaacaaattcagccagaaaatgagtccaacgtctcctgggtggttggcatcgaccagacgctagtggatatcgaagcgaaagtggatgaggcgtttatcgtacgctacggcctgagcgccggtcattcgctggtaattgaagatgatgtcgccgaagcgctgtatcaggaactggtacgcgacggcctgatcacccatcaatttgccggcggcaccattggcaataccatgcacaattattcggtgctggcggacgaccgctcggtgctgctcggcgtgatgtgcagcaacatcgagatcggcggctacgcttatcgctacttgtgcaatacctccagccgtactgatctgaactaccttcagggcgttgatggcgccattggccgctgttttacgctgattagcgatagcggcgaacgtacctttgccatcagtcctggccacatgaacaagctgcgtccggaaagcattccggaagaggtgattgccggcgcttccgcgctggtgctgacctcctacctcgtgcgctgtaagccgggcgagccgatgccggacgcgacgatgaaagccattgagtatgccaaaaagcatgatgtgccggtggtgctgacgctgggaacgaaatacgtgattgctgacaacccgcaatggtggcagcagttcctcaaggaacacgtttcgattctggcgatgaatgaagaagaagcggaagcgctgaccggtatcgccgatccgctcaccgcggcggataaagcgctggactgggtcgacctggtgctgtgcaccgcaggcccggcgggtctctatatggcgagcttcaccgaagaggaagcgaagcgtaaaacgcaacatccgctcctgccgggggcgattgccgagttcaaccagtatgaattcagccgcgcgatgcgccatcaggattgcgttaatccgctgcgtatctattcgcacatcgcgccttatatgggcggcccggagaagatcatgaacaccaacggcgcaggcgacggcgcgctggcggcgttgttgcatgatatcaccgccaataactaccatcgtaataacgtgccgaattccagcaaacataaatgcaaatggctgacctactcatcgctggcgcaggtgtgcaaatacgccaaccgcgtcagctatcaggtgctgaatcagcattcgccgcgtttaacccgcggcctgccggagcgggaagatagtctggaagaggcctactgggaccgttaa

SEQ ID NO: 102011 - DNA, 1677 bp, Enterobacter aerogenes
atgcatcacgcaacaccgctaatcaccaccattgtcggcggccttgtgctcgcctttatcctcggcatgattgccaataagctacgtatttcaccactggtaggatatttattagcgggcgtgctggccggtccatttactcctggttttgttgcggataccaagcttgcgcctgaactggccgaacttggcgtcatcttgctgatgtttggcgtcgggctgcacttttcgctgaaagatctcatggcggtaaagtcgatagccattcccggagccatcgcccagatagccgtggcgacgctgctcgggatggcgctctcttccctgctcggctggtcgctgatgaccggcatcgtttttggcctgtgtctttccaccgccagtaccgtggtgctgctgcgcgcgctggaggaacggcagcttattgatagccagcgtgggcaaatcgccatcggctggctgatcgttgaagatttagtgatggtactaacgctggtgctgctgcccgctatcgccggaatggtcgaaaaaggcgatgttgggctggcgtcgctggcgctcgacatgggcattaccatcggtaaagtcgtcgcctttatcgccattatgatgctggtgggccgccgtctggtgccgtggatcatgtcgcgcagcgcggcaaccggctcacgcgaactgtttaccctgtcggtactggcgctggcgctcggcatcgccttcggcgccgttgagctgttcgacgtctccttcgccctcggcgcattcttcgctgggatggtgcttaacgaatccgaactcagccaccgcgccgctcacgatacgctgccgctgcgcgacgccttcgcggtgctgttctttgtctccgtcgggatgctatttgacccgatgatcctggtcgaacagccgctggcggtgctggcgacgctggcgattatcatctttggtaaatccgccgccgctttcttcctggtacgtatgttcggtcactcgccgcgtaccgccctgaccatcgccgccagcctggcgcaaatcggggaattcgcttttattcttgccggtctcggcatggcgctggatctgctgccgcaggccgggcagaacctggtgctggctggggcgataatttcgattatgcttaacccggtgctgtttaccctgctggaaaaatatctcgataaaaccgaaacccttgacgagcagacgctggaagaggtgctggaagacgaaaaacaggtgccggtggatatctgcaaccatgcgctgctggtcggctttggccgcgtcggcagcctgcttggcgagaaactgatggcccaggggatcccgctggtggtgattgaaacctcccgcacccgcgtggatgagctgcgtgagcgcggcatcagcgccgtgttgggcaatgccgccaacgaagagatcatgaatctggcgcatctcgactgcgcccgctggctgctgctgaccatccctaacggctatgaagccggtgaaattgtcgcctcagcgcgggaaaaatgcccgaacattgagattatcgcccgcgcccattacgacgatgaggtcgattatattaccgaacgcggagccaatcaggtggtgatgggggaacgcgaaatcgcgcgggcgatgttacgtctgctggaaacgccgccggctggcgagattgttaccggttga

SEQ ID NO: 102012 - DNA, 1221 bp, Enterobacter aerogenes
atgacaaccaaccaatccgctcagtccttacccggtaccggcgcgccgccgcaaaaagcgcgcacctcatttggcatcctgggggcaatcagcctttcccatctgctaaacgacatgatccagtcgctcatcctggcgatttatccgctgctgcaggcggaattctcgttaactttcgtgcagatcggtatgatcaccctcaccttccaactgacgtcatcgctattccagccggtgattggttacatcaccgataaacgctcgatgccgtggtcattaccggtggggatgtgtttcaccctctgcggcttaattctgttagcgctggccggcagcttcggcatggtgctgctggccgccgcgctggtcggtactggctcttcggtcttccatccggagtcctcacgcgtggcgcggatggcttccggcggccgtcacggcctggcgcaatcactgttccaggttggcggcaacttcggcagctcgctggggccgctgctggcggcggtaatcatcgccccctacggcaaaggcaacgtcgcctggttcgtgctggccgcgctgctggcgatcgtcgtgctgtcgcaaatcagccgctggtatgccgcgcaacacagaatgaataaaggcaaaccgaagccggttatcgttaatccgctgccgcgtaacaaggtcatcctggccgtcagcattctgttaatgctgattttctccaaatacttctacatggcgagcattagcagctattacaccttttatctgatacacaaattcggattatcggtgcaaaacgcccaacttcacttgttcgccttcctgtttgcagtggctgcaggaacggtgattggcgggcctgttggcgataagataggtcgtaaatatgtaatttggggctctatcctcggcgtggcgccatttacccttattttaccgtacgcatcgctggaatggaccgggatcctgacggtgataattggttttatcctcgcatcagccttttccgctatcctggtctatgcccaggagctgttgccggggagaatcggtatggtttccggcctgttcttcggcttcgcgtttggcatgggcggccttggcgccgcggtgttggggttgttagccgaccataccagcatcgatctggtttataaaatctgtgctttcctgccgcttctcggcattctgacgatattcctgcctaataaccatcaaaaagcctga

SEQ ID NO: 102013 - DNA, 1653 bp, Enterobacter aerogenes
atgcattatttaaaacgcggcgtagcgctggcgttattcgccgccttatcgctgggcagcctgtcagcgcaggcctatgagcaggacaaaacctataaaatcaccatcctgcacactaacgaccaccacggtcatttctggcgcaacgactatggcgaatatggccttgcggcacagaagacgctggtggacggtatccgcaaagaggtggcggccgaaggcggtagcgtcctgctgctgtccggcggcgatatcaataccggggtgccggaatctgatttacaggatgcagaacctgattttcgcggcatgaacctgattggctacgatgccatggcggttggcaaccatgagtttgataacccgctcagcgtgctgcgccagcaggagaagtggtcgaagttccctttcctgtcggccaatatctatcagaaaagcaccggcgaacgcctgtttaaaccctgggcgctgtttaagcgcggcgggcttaaaattgcggtgattggcttaacgaccgacgatacggcgaaaatcggcaacccggaatatttcaccgatatcgaattccgtaatccggcggcagaagccaagctggtgattcaggaactgcagcaaaatgaaaagccggacgtgattctggcgaccacccatatgggccactatgacaacggtaatcacggctctaacgcgcctggcgacgttgaaatggcgcggagtttacctgcgggatcgctggcgatgatcgtcggcggccattcgcaggatccggtctgcatggcctcggaaaataaaaagcaggtcgattatatccccggcaccccgtgcgcgccggatcgccagaatggcatctggatcgtgcaggctcacgagtggggtaaatatgtcggacgcgccgattttgaattccgcaacggggagatgaagctggtgcactatcagctgatcccggtcaacctgaagaagaaagtcacctgggataacggtcagagcgagcacgtattgtatacgccgcaaattgctgaaaacccgcagatgctctcgctgttaacgccgttccagaataaaggcaaggcgcagttacaggtgaaaataggcagcgtcaacggccatcttgaaggcgatcgcagcaaagttcgcttcgtacaaaccaatatggggcgtctgctgctggcggcgcagatggcgcgcagcaatgctgatttcgcggtgatgagcggcggcggtattcgcgactctatcgaagcgggtgatattacctataaagacgtgatgaaagtgcagccgttcggcaacgtgctgacttacgtcgatatgagcggtaaagaggtgactgagtacctgaccgccgtcgcgcagatgaagccggattccggcgcttatccgcagttcgccaacgtcagtttcgttgccaaagatggcaagcttaacgatctgaaaatcaaaggcgaaccggtggatccggcgaaaacttaccgtatggcgacgctgagctttaacgccaccggcggtgacggctacccgcacatcgataataaaccgggatacgtcaataccggctttatcgatgccgaggtgctgaaagagtacatcgagaagaactcgccgctggatgcggcggcttacgagccgaagggcgaagtcagctggcagtaa

SEQ ID NO: 102014 - DNA, 480 bp, Enterobacter aerogenes
atgactcccgccgttaaattactcgaaaaaaacaaaattacctttcagatccacagctacgaacacgatcctcaagagaccaattttggcgatgaagtggttcgcaagctggggctcaatgcggatcaggtttacaagacgctattagtggccgttaacggcgatatgaaacatctggcggtcgccgtcaccccggttgccggacagttggatttgaagaaagtggccaaagcgctgggcgccaagaaggtagatatggccgacccaatggtcgcacagcggatcaccggatacctggtcggcggcatcagcccgctggggcagaaaaagcgcctgccgacggtgattgatgctccggcgcaggagtttgccaccatctatatttccggcggcaaacgcgggctcgacatcgaactggcggcaagcgatctggcgaagcttctggacgcgaagttcgccgatatcgcccgccgcgattga

SEQ ID NO: 102015 - DNA, 795 bp, Enterobacter aerogenes
atgggcctgttaaaccgaataaaaatgctgtggcgagccgccgtcggctcgtcttattcctggcctgtaatggatatcgtcctgcccggcgaacgttatttacacctcgtcggcagcatccatatgggcacccgcgacatggcgccgccgccggctaagctactgaaaaaaatacgtcaggcagacgccttaatcgtcgaagcggacatcaccggtaatgaaacgcctttcagtaatctcccctcttatcccccgctggctgaacgtctgagcgaaacgcaattagcagaattacgctcacgcgccggcgagctgggtttgtcggtcgatcttttcgatagccagccgctgtggcaggtggcgatggtgctacaagccactcaggcgcaaaaactgggattacggcccgattacggcattgattatcagttgctgatggctgcccgcgagagcaacataagggtgatggagctggaaggcgccgatagccaaatcgcgctcctgcgcaatctaccagacgctggtaaggctctgctggaagatacgttgacccactggcgcaccaacgcccgtttactgcaggtgatgatcggctggtggctggagcaaccgccgtcgcgcggcgcggaaacactgccgacgaccttcagccagtctttatatgatgtactgatgcatcagcgcaacatagcctggcgcgacacgctgcttgctctgccgccggggcgctatgtggtcgccgtcggcgcgctgcatctgtatggcgaagggaacctgccggatatgttgacgtaa

SEQ ID NO: 102016 - DNA, 2502 bp, Enterobacter aerogenes
atgtctaacactatcgacctgacgcttgatggcctctcctgcggccactgcgttaaacgcgtgaaagagagcctcgaacaacgtcccgacgttgaacaggctgatgtaaccgttaccgaagcccacgtcacaggtagcgccagcgctgaagccctgattgagaccatcaaacaagccggatacggcgcggagctcagccacccaaaggctaaaccgctggcagaatcatcaatcccgtcggaagcactgacagcggccactcctgagcttccggcagcccatgacgaggatgacagtcaacagctgctgatcaacggcatgagctgcgccagctgcgtttcccgggtacaaaacgcgcttgccgcggtgccgggagtctcacaggcgcgggtaaacctggcggaacgcacggcgctggtgatgggcagtgcgtccgccgcagaattagtgcaggcggtggaaaaagccggctacggcgcggaggcgatcgaagacgatctggaacgccgcgaacggcagcaggaaaccgccatcgccaccatgaaacgttttcgctggcaggcgattgtcgccctgctggtcggcgtaccggttatggtctggggcatgatcggcgataacatgatggtcagcgacgacaatcgatcgctgtggctggtcatcggccttgtcaccctcgcggtgatggtcttcgccggcggtcacttctatcgcagcgcctggaaaagcctgaaaaacggtactgccaccatggatacgcttgtcgccctgggaacgggcgtcgcctggctatattcaatgagcgtcaacctgtggccgcagtggtttccgatggaagcgcgccacctgtattacgaagccagcgcgatgattatcggtctgattaacctcggccatatgctggaggcccgcgcgcgccagcgttcctcgaaagcgctggaaaaactgctcgacctgacgccgccttcggcacgcgttgtgacgcctgaaggggaaaaagatctgccgctcgccgaagtccaggccggcatgaccctgcgcctgaccactggcgatcgcgttccggttgacggcgtgataagccagggcgaagcctggtttgatgaagcgatgctcaccggcgagccggtgccgcagcaaaaaggcgatggcgacgccattcatgccggtaccgtggtgcaggatggcagcgtactgtttaccgccagcgccgtcggcagccagaccacgctggcgcggattattcgtatggtgcgccaggcgcaaagtagcaaaccggaaattggccaactggcagataaaatctcggcggtatttgttccggcagtggtagccattgcgctgattagcgccgctatctggtacttcttcggcccggcgccgcaaatcgtctataccctggtcattgccaccacggtactgattatcgcctgtccatgcgcattgggcctggcgacgccgatgtcgattatttccggcgtcggccgggcggcagaatacggcgtgctggtgcgtgacgccgatgctctgcagcgcgccagcgagctcgataccctggtgttcgataaaaccggtaccctgaccgaaggcaagccgcaggtggtggccgtgaaaaccttcgccagctttgatgaatccactgtcgtgcggcttgccgccgcgctcgagcagggttcaagccatccgctggcgcgggcgatcctcgataaagccgctgacagcactttaccggaggtaagcggcttccgtaccctgcgcgggctcggcgtcagcggtgaagcggaaggccatcaactgctgctcggcaaccaggcgctgcttaacgagcagcatatcgctaccgctgaactggaaagcgagatgacggcacaggcctcgcgcggcgccacgccggtgctgctggcgatcgatggtcaggccgctgcgctgttcgccatccgcgacccgttacgggaagatagcatcgacgcgctggcgcgcctgcatcgtcagggctaccggctggtgatgctgaccggggataaccctactaccgccaatgccatcgccaaagaagcgggcattgatgaagtgatcgccggcgtgctgccggacggcaaagccgatgccattaaacgtctgcagagccaggggcacaaagtggcgatggtcggcgacggtattaacgacgccccggcgctggcgcaggcggatgtcggtatcgccatgggcggtggcagtgatgtcgctattgaaactgcggcgatcaccctgatgcgccatagccttaacggcgtggccgatgctttagcgatttcgaaagcgacgttacgcaacatgaaacagaacctgctgggcgcgtttgtttataactcgctgggtatcccgattgccgccgggatcctctggccgctgaccggtaccctgctgaacccggtggtcgccggcgcggcaatggcgctgtcgtcaatcaccgtggtgagtaacgctaaccgcctgctgcgctttaaaccgaaagattag

SEQ ID NO: 102017 - DNA, 411 bp, Enterobacter aerogenes
atgaatattagcgatgtggcgaaaaaaaccggtttaaccagcaaagcgattcgtttttacgaagagaaagggctggtgacggcgccgctgcgcagcgataacggctaccgtacctacactcagaagcaccttgatgaactgacgctgctgcgtcaggcgcggcaggtgggatttaacctggaagagtgccgcgagctggtgacgttattcaacgatccgtcgcggcacagcgccgatgtgaaaaaacgaacgctggagaaagtcgcggatattgagaaccatatccgcgagttgcaaaacatgcgtgcgcatctgctggcgctggcggacgcctgccccggcgatgagagcgcggattgcccaataattgataatctttccggctgttgtcaccgcaaagcgcaggcttag

SEQ ID NO: 102018 - DNA, 459 bp, Enterobacter aerogenes
atgatcgccctgatcctcgcccatccgcatattttctggctgacccttggcgggctgttgctggcggcagagatgctcggcagcaacggctacctgctgtggagcggcgtagctggcgtcgtcaccggcctgctgacttgggctattccgctcagttgggaatggcaagggacgctgtttgccgtccttaccctgctggcggcgtggctgtggtcaaaatggctgcgtaaacgcatgaggcagcagcgccccgccgacgcacagcttaaccagcgcggccagcagctggttggccgccgttttactctcgacagcgcgctggaaaacggccgcggccacgtccgcgtcggcgatagctcctggccggtgcttgccgatgaagacctcgcggcgggcagcaaggtggaggtggtcgccgtagaagggattaccttgcgggtaagagccgccgtccgctaa

SEQ ID NO: 102019 - DNA, 918 bp, Enterobacter aerogenes
atgctgatttttatccccgttcttatttttgtcgcactggtcattgtgggggcggcagtaaaaatcgtgccgcagggatatcaatggaccgtcgaacgctttggccgctacacgcagacgctgcagccgggtttaagtttagtggtgccgtttatggaccgcatcggccgtaaagtgaacatgatggagcaggtgctggatattccttcgcaggaagtcatctctcgcgataacgccaacgtcactattgacgccgtctgcttcattcaggtgatcgatgcgccaaaagccgcctatgaagtcagcaatcttgagctggcgatcgtcaatctgacgatgaccaatattcgtaccgtactcggctcaatggagctggatgaaatgctctcccagcgcgatagcattaacacccgcctgctgcatatcgtcgacgacgccaccaatccgtggggggtgaaaatcacccgcgtcgaaatccgtgacgttcgcccgccagcggagcttatctcctcaatgaacgcccagatgaaagccgagcgaaccaaacgcgcctatatccttgaggctgaaggggtgcgccaggcggaaattctcaaggccgaaggcgaaaagcagtcgcagatcctcaaagccgaaggcgaacgtcagtctgccttcctgcaggcggaagcccgcgaacgttccgccgaagcggaagcccgcgccacccagatggtctcatcggcaatcgcttcaggcgatattcaggcgattaactacttcgtggcgcagaaatataccgacgcgctgcagcagattggcgccgccaacaacagcaaagtggtgttgatgccgctggatgccagcagtctgatgggctcgatagccgggatcggcgaactgctgaaagagagtagcggcgagcggaaaaaatcatga

SEQ ID NO: 102020 - DNA, 678 bp, Enterobacter aerogenes
atgaaggaaaataacgcgattttgcgcctcgagggcgtcggttttaaaaccgacgacgcggtcatcctgaataatatcgatctccggattgcggccggggaatttaagttgattaccgggccatccggatgcggcaaaagtacgctgctgaaaattatcgcctcgctgctgagcccgaccagcggagagatttttttcaacgataaagatatcgccacgctgtcgccggaaaactatcgccagcaggtttcttattgcgcgcaaaccccggcgctgttcggcgattcggtttatgacaacctggtcttcccatggcagatccgcaacaaacagccggatcctaaagcgctggttgccgatctcgaacgcttcgggctggcggataatacgctggagaaatccattaatgagctttccggcggtgaaaaacagcgggtctcgctcattcgtaatttgcagtttctaccgcaggttctgctgcttgatgaaattaccagcgcgctggatgaaagtaataagcgcaacgttaacgagattattcatcgctacgcgacggaaaaaggggtggccattctgtgggtcactcacgatcagaacgaaattgcccacgctgatgaagtgatcacgctacagcctgccggcgggaaaatgcaggaggtaaaaaatgaacgggcataa

SEQ ID NO: 102021 - DNA, 783 bp, Enterobacter aerogenes
atgaacgggcataatattactaacgaatcgctggcgctctcgatggtgctggtgctggtggcaatcgtcgtcagctatcgggaaaaattggcgctggaaaaagatatcatctggagtatttgccgggcgatagtgcaattgattatcgtcggctacgtgctgaaatatatctttaacgtcaatcatgcggtgttgacgctattgatggtgctgtttatctgctttaacgcggcgtggaatgcgaagaagcgcagtaaatatatcgataaagcttttgtttcatcgtttatcgctattaccactggcgccggactaaccctggcggtgctggtcttctcggggtcgatcgcctttgtgccgatgcaggttattccgattgccggcatggtggccggtaacgccatggtggcggtagggctgtgctacaacaatatgggccagcgttttaacagcgagcagcagcagattcaggagaagctaagtcttggcgcgacgccgaagatggcctccgcgcggctgatccgcgatagcatacgcgcatcgttgattcccacggtagattcggcgaaaacggtcgggctggtgagtttgccgggcatgatgtcggggttgattttcgccgggatagacccggtgaaggcgattaagtatcagattatggtcacgtttatgttgctatcgaccgccagtctgtcgacgattatcgccggttatctgacctaccggaagttcttcaatgcccgccatcaattggttgtgacgcagttgaaaaagcgcccgtaa

SEQ ID NO: 102022 - DNA, 855 bp, Enterobacter aerogenes
atgtccgaacagaatattgtcaatattaccgaagccaacctgcagcagacgctgcagcaatccatgaacgcgccggtgctgttttatttctggtccgcccgcagccagcactgcgaacagctgacgccggtgcttgagcgcctggccgcccaataccacggtcagtttacgctggcgaaagtagattgcgacgcggagcaaatgctggcctcgcagtttggtctgcgcgcgatcccaacggtgtatctgttccagaacggccagccggtcgatggttttgaaggcccgcagccggaagaggctattcgcgccctgctggataaagtgctgccgcgcgaagaagaattgaaagcgcaagaagcgctggcgctgatgcaggaagaaaaatacgccgacgcgctgccgctactgaaagacgcctggcagttgtctaaccaggatagccagattggcctgctgctggcggaaacgctaattgccctgcagcgttccgatgaagctgaaagcgtgctgaaaaccgtgccgctgcaggatcaggacacccgttatcaggggctggtggcgcagattgaactgcttaaacaagcggctgataccccggaaatccagcaactgcagcagcaggtcgagcagaacccggacgacgcggcgctggcgtctcagctggcgttgcagctgcaccaggtcgggcgcaacgaagaagcgctggcgctgctgttcacgcatctgcaaaaagatttaggcgccggggatggccaggtgcgcaaaatgctgcaggagatcctcgcggcgcttggcaccggcgacgccctggcggcgaaataccgccgccagctgtattcattgctgtattaa

SEQ ID NO: 102023 - DNA, 768 bp, Enterobacter aerogenes
atgcaaaaatcggttttagttacaggatgttccagcggaattggcctcgaaagcgcgcttgatttaaagcgccagggcttccgggtactggccgcctgccgtaagggggaggatgtcgcccgtatgcaggagctgggtctgaccggtattttgctggatctcgatgatccgcaaagcgtcgaaaatgccgccgccgaggtcatcgcgctgaccgagaaccgcctgtatggcctgttcaataatgctggctacggcgtctacggcccgctcaccaccatcagccgtcagcagatggaacagcagttttccgccaactttttcggcgcccaccagctcaccatgctgctgctgcccgctatgcagccgcacggcgagggccgcatcgtcatgacctcttcggtgatggggctgatttccagccccggccgcggcgcctatgccgccagtaaatacgcgctggaggcgtggtccgatgcgctgcgcatggaactccgccacagtggcataaaagtcagcctgattgagcctggaccaatccgcacccgctttaccaacaatgttaaccaaaccggcgacaagacggtagaaaaccccggtattgccgcgcgctttacgctcggcccggaggcggtggtggaaaaagtgcgtcacgccttcgtcagcgataagccgaaactgcgctatccggtgacgctggtcacccacgcggtaggctggttaaaacgcctgctaccggcccgtgcgatggacaaaattatccagggctga

SEQ ID NO: 102024 - DNA, 579 bp, Enterobacter aerogenes
atggttctgtttacctgccgcgtaatggcggcggatacgctgttagtgcttggcgatagcctgagcgccggctatcggatggcggcgaatactgcctggcctgctctgctcaatgataagtggcaggccaaaacgacggtggtcaatgccagtatcagcggcgatacatcgcagcagggcctggcgcgcctgccggcgctactgaagcagcaccaaccgcgctgggtgctggtggaactgggcggcaacgacgggctgcgcggtttcccgccgcagcaaacggagcagacgctacgcaccgttattcaggatatcaaagcggcgaaggcccagccgctgctgatgcaaatacgcctgcctgccaactatgggcgccgttataatgaagcctttagcgcgatttatccgcagctggccaaagagttcgatattcctctgctgcccttttttatggaggaggtttatctcaagccacaatggatgcaggacgacggcattcatcctaatcgcgatgcgcaaccgtttattgccgactggatggcaacccagttggctcccttagttaatcatgactcctga

SEQ ID NO: 102025 - DNA, 687 bp, Enterobacter aerogenes
atgccagcggaaaacatacttgaagttcatcatcttaagaaatccgtcggtcagggagagcatcagctgtccatccttaccggagttgagctggttgtcaaaccggcgcaaaccatcgccctgattggcgagtccggttccgggaaatccacgctgctggcgattctcgccgggctcgacgatggcagcagcggcgaagtgtctcttttggggcagccgctgcatcagatggatgaagaggcgcgcgcgaggctacgcgcaaagcacgtaggctttgtctttcaatcgtttatgttgattccgacgctaaatgccctcgagaacgtcgagctgccggccttgctgcgcggcgccagcgatagccagagccgtggcgatgcgcgcgcgctgcttgaacagctggggcttggcaaacggctgcaccatttgccggcgcagctttccggcggcgagcagcagcgagtggcgctggcccgcgcctttaacggccgtccggcgctgctgtttgccgatgagccgaccggcaatctcgaccgtcacaccggcgataaaatcgccgatctgctgttctcgctcaaccgcgaacacggcaccacgctgattcttgtgacccacgatccgctgctggcggcgcgctgcgatcgtcgcttacgcctggtggatggcaagctgcaggaggaagcatga

SEQ ID NO: 102026 - DNA, 2415 bp, Enterobacter aerogenes
atgatagcccgctggttctggcgcgaatggcgctcgccttcgctgctcatcgtctggctggcattaagcatggcggtggcctgcgtgctggcgctgggctcaatcagcgaccgtatggaaaaagggttgagccagcaaagccgcgaattcatggccggggatcgcaccctgcgcagttcacgcgaagtgcctgccgagtggctcgcccaggcgcgtacgctagggttaaccgtcggcgaacagctgagcttcgccaccatgactttcgctggcgataccccgcagctggcggacgtgaaggcggttgatgatacttatccgctgtacggcacgctggagaccgcaccggcgggattaaaaccgcagcgcggcagcgtcctgctggcgccaaggctgatggcattactgaacctgaaaaccggcgataacattgacgttggcgacgccaccttgcgcatcgctggcgaggtcattcaggagccggacgccggattcaaccccttccagatggcgccgcggctaatgatgaatatcgccgacgtggcgaaaaccggcgcggtacagcccggcagccgcgtctcctggcgctataaattcgcgggtagcgcacagcagctggcggcttacgagcggtggctgctgccgaagcttggcgcggaacatcgctggattggcctggagcaggatgatagcgcgttgggtaaatcgctggagcgctcgcagcaatttttactgctgtccgcgttactaacgttgctgctggcggtcgccgcggtagcggtagcgatgggccattactgccgcagccgctacgatttggtcgccatccttaagacgctgggcgccgggcgggcgcagctgcgtaaacttatcgtcggtcagtggctaatgttgctggtgctggccgtggtggcggggggcgcgatggggctgctgctggaaaaagccctgctgctgatgcttaaaccggtgctgcccgccgcgctgccgcccgccagcggctggccgtggttgtgggctatcggcgcgatggtggtgatttcgctgctggtcggctggcggccgtaccggctgctgctggcgactctgccactgcgggtattgcggcaagatgtggcggctaacgtctggccgctaaaacactatattccggtggtttgcgcggtggttgtcggcggactggcatggctgatgggcggtagcccgctgctgtggtcggtgttggtcggggcgctggtactggcgctgttgtgcgggctggtaggctgggccttgctgtggttgctcaagcgcttaacgctgaaagcgttaccgttgcgcctggcggtgaatcgcctgttgcgccagccgtggtcaacgctgagccaactggcggcgttttcactgtcgtttatgctgctggctctgctgttggtgctgcgcggtgatctgcttgagcgttggcaacagcagttgccgccggaaagcccgaactacttcctgattaatattgctcccgaacaggtggtgccggtgaagacattccttgccgaacaccagacccgggcggcggagttttatcccatcgtacgcgcgcgtctgacgcagattaacggtcagacgacggaagggaataaagacgaagcgctgaatcgcgaactgaatctcacctggagcgagcagcgcccggatcataatccgctggtggccggcagttggccgccgaaggcaggcgaggtgtcgattgaagaggggctggcgcagcggttgggcgtcaggatcggtgatagcgtcacctttaccggcgacactcagcaatttaacgctaaggtgaccagcgtgcgcaaagttgactgggagagcctgcggccaaacttcttctttattttcccgccaggggcgctggatgggcagccgcaaagctggctcaccagcttccgctgggataatggcaacgcgatgctgacccagcttaatcgcgaattccccaccgttagcctgctggatatcggcgccatcctgcgccaggtaggccaggtgttgacgcaggtaagtcgcgcgctggaggtcatggtggtacaggtcaccgcctgcggcgtgctattgctgctggcccaggtgcaggtcgggatgcgtcagcggcatcaggagctggtcgtctggcggacgctgggggccggtaaaaccttgctacgtaccacgctgtgggcggagttcgctctgcttggcgtggtgtcggggctggtggcggccattggcgccgaggtggcgctggcgatgctgcaaaccaaagtgtttgattttccatggacgccggactggcggctgtgggttatgctgccattatccggcgctatattattatcgttgtgcggcggatggttgggattacgcttattaaaaggaaaagcgttattccgacaatttaaccagtaa

SEQ ID NO: 102027 - DNA, 1146 bp, Enterobacter aerogenes; identical to SEQ ID NO: 99326

SEQ ID NO: 102028 - DNA, 534 bp, Enterobacter aerogenes
atgttttccgtggcgcagggagcgcacaaagggcggccagtcgccgccgccctctgtactcccgggctctggccgccaaaatcgccacttcgtggtaccttcgacttatccctgcaggcttcgggtcgggccgaggcagcgtccttgcaaatcacggccctcagcccgcatccatgcgggctgccccggccttccggtaacgtctcagcgattttgaggccatcaacaccggcagtttcagtcagcgtggtgaataaattaaaggcaggccgcacggaccgtaggccggataaggcgcagccgccatccggcgcaaaaacggctccttatccgcggatattgcccggcggcgctgcgcttgcgcgggcctacagatccagtgcaatgggtggcccagtgccatgggtagcccgggtaaggcgccagccgctacccgggaagccgtctggttgggagagctacttcgccagccaggcggcgacctcctgccagttgccgcgaaaaataattttcccggcttttttccccaactga

SEQ ID NO: 102029 - DNA, 1077 bp, Enterobacter aerogenes
atggaaaatgggacacactatcgcgccatcctcagcgcggatacgccgcttatcgacgtccgcgcgccggtggaatttcagcaaagcgcgatgcccgcggcgattaacctgccgctgatgaacgacgaagaacgcgccgccgtcggcacctgttacaagcgccaggggccggaagcggcattaaccctcggacataaactggtcgatggcgacctgcgcgccagccgcctcaaggcgtggctgtcggcctgcgcccgctatccacagggctatctgtgctgcgcccgcggcggccagcgctcgcatatcgtgcagcagtggctacgtgaagcaggcgtcgactatccgctgattgtcggcggctacaaagcgctacgccaggcggcaatacaggctaccgaggagctggtacagcgccctatcgtgctgattggcggctgcaccggcaatggcaaaacccagctggtttgctcgcgcccggacggtatcgatcttgaaggtcatgcccaccaccgcggttcgtcatttggccgtacgttgcagcagcaacacccgcaggcgacgttcgaaaaccatctggcggtctccctgcttaaaaaggctgaacaacaaacacgttgggtgctggaagatgaaggccatatgattggcgcgaaccacctgccggagtgtctgcgtatccgcatggcgcaatcgccgctggcggtggtggaagatccgtttgacgttcgtctggagcgactgcgcgaagagtacttcgatcgtatgcaccgcgactttattgccgcctatggcgaagagaaaggctggcacgaatatagcgagtatctgcatcacgggctgtttgccatccggcgtcggctggggctacagcgctttgctcagttaaccgaactactcgacgcggcattgttgcagcaacagcgtaccgccagtaccgaagctcacttcgcctggctggtcccgctgttaaatgaatactacgacccaatgtatcgctatcagttggggaaaaaagccgggaaaattatttttcgcggcaactggcaggaggtcgccgcctggctggcgaagtag

SEQ ID NO: 102030 - DNA, 1068 bp, Enterobacter aerogenes
atgaaacaggtttgcgtcctcggtaacggacagttaggccgcatgctgcgtcaggccggtgaaccgctgggcatcgccgtctggccggtcggcctggaagccgacccggaagcggtgccattccagcaaagcgtcatcaccgctgaaatcgagcgctggccggaaaccgccctgacccgcgaactggcgcgccatccggctttcgtcaaccgcgacgtttttccgatcatcgccgaccgcctgacccagaaacagttgttcgacaaacttggcctcgccaccgcgccgtggcagctactggcggataaaagcgagtggcccgccgtgtttgcccgcttgggcgacctggctatcgtcaagcgccgcgtcggcggctacgatggccgcgggcagtggcgtctacgcgagaacgaaaccgcacaactgccggatgataattacggcgagtgtatcgtcgagcagggaattaacttctccggcgaagtgtcgctggttggtgcccgcggccgcgacggcagcacggtgttttatccgctgacccgcaacctgcaccaggacggcattctgcgcgccagcgtcgccttcccacaggccaatgcgcgccagcaggcgcaggccgaaagcatgctgacggcgatcatgaacgagctcgactacgtgggcgtgatggccatggagtgcttcgtcaccgccgagggactgctgatcaacgaactggcgccgcgcgtgcacaacagcggccactggacacagaacggggcttccattagccagtttgaactgcacctgcgcgccattaccgatttgccgctgccgccgccggtggtcaacagcccatcggtgatgatcaacctgatcggcagcgatctgaactacgactggctgaaactgccgctggtacatttgcactggtacgacaaagaagttcgtccggggcgtaaggtcgggcacctgaatctgaccgacagcgataccgatcgcctgagcgccacgctggaagcgctgaaaccgctcctgccagccgaatacgccagcggcgttttctgggcgcagtcgcagcttaattaa

SEQ ID NO: 102031 - DNA, 510 bp, Enterobacter aerogenes
atgtcttcccgcaataatccggcgcgtatcgccatcgtgatggggtccaaaagcgactgggctaccatgcagttcgccgcagaaatccttgataccctgaacgttccgcaccatgttgaagtggtttccgcccaccgtacgcccgataaattgtttagcttcgccgaaagcgccgaaagcaacggttatcaggtgatcatcgccggtgcgggcggcgcggcgcatttgccgggcatgattgcagcgaaaactctggtgccggtgcttggcgtgccggttcagagcgcggcgttaagcggcgttgacagcctctactctatcgttcaaatgccccgcggcatcccggtcggcacgctggccatcggcaaagccggcgccgctaacgccgccctgctcgccgcgcaaattctcgcccagcatgatgccgaactgcaccagcgtctgagcgcctggcgtcaggcgcaaaccgatgaggtgctggataacccggacccgcgaggtgcggcatga

SEQ ID NO: 102032 - DNA, 723 bp, Enterobacter aerogenes
gtggcgacactttttattgcagacctgcatctgcaaacagaagaaccggcgatcaccgccggttttctgcgttttttacagggggaagcccgtcaggctgacgccctgtatatccttggcgatctgttcgaggcgtggatcggcgatgacgatccgaacccgctgcatcagcaaatcgcttcggccatcaaagccgtcgtcgacgccggcgtaccctgctacttcatccacggcaaccgcgattttctcgtcggccagcgcttcgcccgccagagcggcatgatcctgctcactgaagaagagcggctggatctctatggccgtgaagtattgattatgcatggcgacactttatgtaccgacgaccccggttacctggcgtttcgcgctaaagtccataccccgtggatccaacgtctatttctcgccctgccgctgtttatccgccgccgcatcgccgctaaaatgcgcgccgatagcaaagccgctaacagcagcaaatcgatggaaattatggatgtgaatccgcaggcggtcgttgacgcgatggagcggcatcaggtgcagtggctaattcacggccatacccatcgcccggccgtccatgaactgctggccaacgggcagcccgcatggcgcgtggtcctcggcgcgtggcacagcgaagggtcaatggtgaaagtcagcgccgacggggtcgaactcatctatttcccgttttaa

SEQ ID NO: 102033 - DNA, 495 bp, Enterobacter aerogenes
atggttactttccacaccaatcatggcgatatcgtaatcaaaacgtttgacgacaaagcgccggaaacagttaaaaacttcctggactactgccgcgaaggtttctacgacaacaccattttccaccgtgttatcaacggcttcatgattcagggcggcggctttgagccgggcatgaatcagaaagcgaccaaatctccgattcagaacgaagctaataacggtctgaaaaatacccgtggtacgctggcgatggcccgcactcaggccccgcactccgccaccgcgcagttcttcatcaacgtagtagacaacgacttcctgaacttctctggcgaaagcctgcagggttggggctactgcgtctttgccgaagtggttgaaggcatggacgtggtcgacaaaatcaaagcggttgccaccggccgcagcggcatgcaccaggatgtgccgaaagaagatgttgtcatcaaaagcgtcaccgtcagcgaataa

SEQ ID NO: 102034 - DNA, 1386 bp, Enterobacter aerogenes
atgttaaaaatttttaatacactgacgcgccaaaaagaagaatttaaacctattcatgccggggaagttggcatgtacgtgtgtggaattaccgtttacgatctctgtcatatcggccatggccgcaccttcgtctccttcgacgttgtcgctcgctatctgcgcttccttggttacaagctgaagtacgtgcgcaacattaccgatatcgacgataaaatcattaagcgcgctaatgaaaacggcgaaagctttgtcgcgctggtcgatcgcatgatcgccgaaatgcataaagattttgacgctctgaacattctgcgcccggacaacgagccgcgcgccacccaccatatcgctgaaattatcgaaatcaccgagcagctgatcgcccgcggtcacgcttatgtggcggataacggcgacgtgatgttcgacgtgccgacagaccctaactacggtctgctatcgcgccaggatctcgaccagctgcaggcgggagctcgtgtcgacgtggttgacgtcaagcgtaacccaatggacttcgtcctgtggaagatgtcaaaagagggcgagccgagctggccgtcaccgtggggtgaagggcgtccaggctggcacattgaatgctcggcgatgaactgcaaacagctgggtaatcactttgatattcacggcggcggttcggatctgatgttcccgcatcacgaaaacgaaatcgcgcaatcgacctgcgcccacgacggcgaatacgtcaactactggatgcactccggaatggtgatggtcgatcgcgagaaaatgtcgaaatcgctgggcaacttctttaccgttcgcgacgtgctgaagtactacgatgccgaaaccatccgctacttcctgatgtccggccactatcgcagccagctgaactacagcgaagagaacctcaagcaggcgcgttcggcgctggagcgtctgtacaccgcgctgcgcgggaccgacaaatccgcgcagcctgccggcggcgaagccttcgaagcgcgctttattgaagcgatggatgacgacttcaataccccggaagcctactcggtgctgttcgatatggcgcgtgaagtgaaccgcctgaaaacggaagacgcggcggctgcgaacgcgctggcggcccatatgcgtaagctcgcttcggtgctggggctgcttgagcaggagccggacgctttcctgcagagcggcgcgcaggccgatgatggcgaagtggctgaaatcgaaaggcttatccaacagcgtctggatgcgcgtaaagcgaaagactgggcggcggcggatgcggcgcgcgatcgtcttaacgagatgggtattgtgttagaagacggcccacagggcactacttggcgccgtaagtaa

SEQ ID NO: 102035 - DNA, 213 bp, Enterobacter aerogenes
atggcgaatttttctctgggcaaacacccgcatgttgaactgtgtgacctgctgaagctggaaggctggagcgaaagcggcgcgcaggccaaaatctttatcgccgaagggctggtgaaagtcgacggcgcggtggaaacccgcaaacgctgtaaaatcgtcgccgggcaaacggtgacctttgacggtcaaagcattactgtgatcgcataa

SEQ ID NO: 102036 - DNA, 867 bp, Enterobacter aerogenes
atggcagcaaaaattattgacggtaaaacgattgcgcagcaggtgcgctctgaggtcgcggaaaaagtgaaggcgcgcgtagcggccggaaaacgcgcccccgggctcgccgttgtgctggtcggcagcaaccctgcgtcgcagatttatgtcggcagcaaacgcaaggcatgtgaagaggtgggtttcgtctcccgctcttacgatctcccggaaaccaccagcgaagccgagctgctggaacttatcgacacgctgaatgccgataatactatcgacggcatcctggtacagctgccgctgcctgccggtatcgacaacgttaaagtcctcgagcgcattgcgccggacaaagacgtcgacggcttccatccgtataacgttggtcgtctgtgtcagcgcgcgccgcgtctgcgcccatgtacgccgcgcggtatcgttaccctgcttgagcgttacaatatcgatacctatggcctcaacgcggtggtgattggcgcttctaacatcgtcggtcgtccgatgagcatggagctgctgctggcgggctgcaccaccaccgtcacccaccgtttcaccaaaaacctgcgccaccacgttgaaaatgccgatctgctgattgtcgcagtcggtaaaccgggctttatcccgggcgagtggattaaagaaggcgccatcgtggtggacgtcggcattaaccgtctggaaagcggcaaagtggtcggcgacgtggtgtttgaagacgcggcggaacgcgcgtcctacattacgccagtgcctggcggcgtcggcccgatgaccgtagcgaccctcattcagaatacgctgcaggcgtgcgaagagtatcacgacattcaggaggcctaa

SEQ ID NO: 102037 - DNA, 402 bp, Enterobacter aerogenes; identical to SEQ ID NO: 92121

SEQ ID NO: 102038 - DNA, 999 bp, Enterobacter aerogenes
atgaagatcaaagcaaccattgaacgtatccctggcggcatgatgctggttccattgctgctgggcgcggtgcttaataccctggcgccggataccggtaattactttggttcattcaccaaaggtatgattggcggcacggtaccgatcctggcggtgtggtttttctgtatcggcgcatcgatcgatttgcgcgccaccggtaccgtattacgtaaatccggcacgttagtgatcaccaaaattgccgtcgcctggatcgtcgcttttatcgccgcgatggtcattccggaaaacggcgtccagaccggtttctttgccggactgtcggtgttggctattgtctcggcaatggatatgaccaacggcggtctgtacgccagcctgatgaatcagtacggcagtaaagaagagtccggcgcgtttgtattgatgtcgctggagtccgggccgctgatgacgatggttatccttggctccgccggtctggcttccttcgagcctcaccattttatcggcgcggtgctgccattcctggtgggctttgccttaggtaacctcgaccacgacttccgcgccttctttagcaaagccaccccggtgctgattccgttctttggctttgcgctgggcaacaccatcaacctgagcgtgattctggataccggactgctggggattgtgcttggcgtggcggtcatcatcattaccggcatcccgttgattattgctgaccgggttatcggcggcggtaatgggacagctggcgtcgcggcctcttccgcagcgggcgcggcggtcgcgaacccggtgatcatcgcgcagattaatccggcctttgaaccggtggccgcttcggcgacggcgctggtcgcggcaagcgtcatcgtcaccgcgattttagtaccgattattaccgccctgtacgccagacgttttggcaacgcgcaggtggtgaaagcgcctggcgccagcgtggtgtcatcggcaaatcactaa

SEQ ID NO: 102039 - DNA, 837 bp, Enterobacter aerogenes
gtggacgtaagacaaagtatccacagcgcgcatgcgaaaactctggatacccaggggctgcgtaatgagtttttagttgaacgagtgtttgtggctgatgaatacaccatggtgtacagccatattgaccgcattattgttggcggcgttatgccggtgcagcgcggggtgtcggtgggtggcgaagtcggtaaacagcttggggtaagctatttcctcgaacgccgtgagttaggggtgattaatatcggcggcccgggttgtattaccgttgatggccaatgttatgaaatcggccaccgtgaagcgctgtacgtcggtaaaggggcgaaagaggtggtgtttaccagcgtcgaccacgcaaaaccggcgaagttttactacaactgcgccccggcgcataccacttatccgacgaagaaagtcacccctgccgatgtagcgccggtgacgctgggtgacaacctgaccagcaaccgtcgcaccatcaataaatatttcgtgccggatgtactggaaacctgtcagctcagcatgggcctgaccgaactggcgccgggtaacctgtggaacaccatgccttgccatacccatgagcggcggatggaggtctatttctatttcaacatggatgaggacgcctgcgtgttccacatgatggggcagccgcaggagacccgtcatattgtgatgcataacgagcaggcggtgatttcgccaagctggtcgattcactcaggggtgggtacccgcgcttataccttcatctgggggatggttggcgagaaccaggtctttgacgacatggatcacgttgccgtgcgcgatatacgttaa

SEQ ID NO: 102040 - DNA, 1308 bp, Enterobacter aerogenes
atgtccgcaactgccgctacttcagtgtttcgcgccagggccaaagtgatcctgcaggtgacctcagggaattttcttgagcagtttgacttctttttatttggtttttacgccacctatattgcccatactttttttccttccgaaaatgaattcgcttccttaatgatgaccttcgccgttttcggcgccgggttcttgatgcggcccgttggcgccgtggtgttaggcgcctggattgacaaggtcggcagacgtaaaggtttaatcggcacgttgtcgattatggcgatggggaccatcctgatcgtgctggtgccaggttatcagactatcggtttgtgggcgccggcgctggtgctgtgcggccgactgctgcagggcttttctgctggtgcggagctgggcggcgtctcggtttacctcgcagaaatggcgacacctggacgtaaagggttctataccagttggcaatctgccagtcagcaggtctcgattatggtggccgcttcattgggctatctgctcaatatgctgctcagtgagtcgagtctgcatcagtggggatggcgaattccgttcgcgattggctgcctgatcgtgccttttatcttctttttacgccgcaatctgaatgaaaccgcggagtatacggagcgtaaggaacatccgaccttaggacaatcgctgactattctgctggcaaactggcgggtggtgattgcggggatgctaatggtggccatgaccactaccgcgttctatttgatcacggtctacgcgccaacctttggcaaaaacgtgctgttattaagcgcctcggatagcctgctggtcacgctattggtggctatctccaatttcatctggctgcctatcggcggcatgctttccgataagtttggtcgtaaacccgtgctggtcagcatgacgctgctggctattttcaccagttggcctgcgttatcgctgctggcccgcatgccggacttcgccatgatgttgtccgtgctgctgtggctctcctttatttatggcatctacaacggcgcgatgatccccgcgctgacggaaattatgcccaggtcggtcagggtcgctggtttttccctggcttacagcctggctaccgctctgtttggcggttttacgccggcgatgtccactgcgttaattaaaatcaccggggataaggcggcgcccggctactggatgagttttgcggcaatctgcgcgctactggcgacgctgtatctctatcaacgcgtttcccgacaggcattgaaaacgcaaaattctttaggttaa

SEQ ID NO: 102041 - DNA, 801 bp, Enterobacter aerogenes
atgcaacgtaaatcatgggttttctcgttagtggtattcacctgcggctatgcgcatgttgccgtcgcgcaggagatcacggtgatgatttccggcggcttctccgcggcgttggataaactggcgcccgactatcagcaaaaaagcggcaataccttacatatcattcatggtccctcgatggggaaatccgcggaggcgataccgaaccgcctggcggcagggcaaaaggcggatgtggtgattatggtgggatacgccctggatgatttgcaaaagcagggcaaagtgatgccggggtcgcgtattgaactggcggattcacgtattggcgccgtcgtgccaaaaggggccccggtaccggatatcagcagcgtcgccgcgttgaaacaaacattgctgcaggcgaaatccatcgcctattcggatagcgccagtgggcgctatgttgaaaaggagctgttcagcaaactggatattgccgcgcaggcgagccccaaagcaaaaatgatcgaaaaaatccccgttgcttcgctggtggcaaaaggggactacgcgatagggtttcagcaggttagcgaactgttgccggtcagcggcgtgacgttcgttggccgtctgccggatgaagtgcaatacgttacccgattcgcgggcgccgtagttgccgattcatccgcgcagtcgcaggcgaagcagttgctgtgctatctggcttcagtcccggcgcaggcggaaatccgtcgcacaggcatggatcctttaccctccaacgcctgcgaattaccggaagagggctaa

SEQ ID NO: 102042 - DNA, 900 bp, Enterobacter aerogenes; identical to SEQ ID NO: 92122

SEQ ID NO: 102043 - DNA, 867 bp, Enterobacter aerogenes
atgcactacaaattggttaaacaactcaaagatgataatacattaagaaaaagctttattgatttagccatcaaaacgttcgatctatcctttgacgcctggtatcagcagggatactggagcgaatcctatatcccttacgctttcgttgataagaataaagttatcgccaacgcctccgcgaatattattgatctggtctggcaaggccaaccccgacgctatattcaaataggtacggtaatgaccaatattgattaccgtaataaagggcttgccggacagttgatacaacatatccttgatgactggcgtgacaaagcggatgcttttttcctgttcgccaactctactaccgtcgacttctatcccaaatttggctttacgcggaccgacgaatatcaatatgtggcacccgtttcgcctactcccggcgacttccgtaaactggatatggatagtgcgcaggatatcgccctgcttaagcactactaccagaaatccaaccccttttcacagctacgagtggaaaataacttcggcctgctgatgttttactgttcggcgtttatgaagcattttgtctactactcggagaaaaatcaggccgtcgccattgcgatgcaaagcgcccatgagcttatctgctttgatattttttgcgatgccggacaatccatggcgaccattatcaatgaactcgcccagccgcaatcgcaacaggcagtgctaggttttacgccgaaggaagcgcgcctgggcgagtacgaaaaaatagacggcgacgatatgttgtttatctattcgactaaaaagaacatcttccacgacaacaaattgatgttcccgctgctggcgcacgcctga

SEQ ID NO: 102044 - DNA, 837 bp, Enterobacter aerogenes
atggcattcgtaacaactaaagatggcgttaatatttattttaaagactggggtccgaaagaggctcagcctattgtgttccaccatggctggccgttaagcgctgatgactgggataaccagatgctgtttttcctcgcgcaagggtttcgcgtcatcgctatcgaccgccgcggccatgggcgttccgaccaggtaagcgaaggccatgatatggatcactatgcggccgatgcttctgctgtggtcgaaagtctggatttgcataacgctgttcacgttggtcattcaaccggcggcggtcaggtcgcgcgctatgtggctaaatatggtcaaccgcagggtcgggtagccaaagcagtattaattagttccgtaccgccgttaatggtgaaaaccgacaataaccccggcggtacgcccatcgaagtatttgacggtttccgcaaggcgcttgcggctaatcgctcacagttctatctcgatgttgccagtggcccgttctacggttttaaccgagatggcgcagaggtttcgcaaggtaccattcaaaactggtggcgtcaggggatgaccggtagcgcgaaagcccattatgaagggattaaagccttctctgaaaccgatcagaccgacgatctgaaagcgattacggtgccggtgctggtgatgcagggcgacgacgaccaggttgttccttataagaatgccgccattttgcaggataaactcttagcgaatagcgagctgaaaatttatccgggcttaccgcatggtatgcacacgtcacatgcggatgtgattaacgccgatctgctggctttcattcgttcataa

SEQ ID NO: 102045 - DNA, 921 bp, Enterobacter aerogenes
atgtcgcatttacccaaattctctctttcattattacacccgcgttactggccggcatggctgggcattggcttattgtggctggtggtacaacttccttatccgctgatctatcgtctgggccatggtctggggcgtttatctatgcattttttgcgcggaagggtacgtattgcgcagcgcaatcttgagctctgctttcctcacctcagcccggcgcagcgtcatgaaatgttgattaagaattttgaatctctgggcatggggttgatggaaaccggcatggcatggttctggccgacccatcgcgttgagcgctggaccgagaccagcggcgtcaacgaagtcgttgaactgcaggaacagaagcagggtattttgctgattggcattcactttctgaccctggaactcggcgcgcggatgtttggcatgttcacgccggggattggcgtttaccggccaaacgataatccgctgatcgactggctgcaaacctggggacgactgcgttctaataagacgatgctggatcgtaaaaacttgaaaggcatggttaagtcactgaaagagggcgagatcctctggtacgctccggatcatgattatggtcgcgccagtagcgtatttgttccctttttcaatgtggataatgctgcgaccaccaccggtacctggatgctggcgagaatgtcaaaagccaccatcgttccctttgtcccgcgaagaaagcccaacggcgccgggtatgagctgattgcgctgcagccagaggcgacgccgccgctggattccccggaaactaccgccagatggatgaacaaaattattgagcaatgtatcctgatggcgccggaacagtacatgtggctgcaccgtcgttttaagactcgtccggaaggggtaccgtcgcgttactaa

SEQ ID NO: 102046 - DNA, 273 bp, Enterobacter aerogenes
atgaaaaaggtattagtcgctttagctctttcagcagttgcctttggcgcctcggcagcgcaattaattactaaagaagaagcttcgcatttcaaactgactcacgtgggcagtatttctgtgggaccgtctggcgggcaattctcttcaccttctgatcttcacgatcagctttctaagctggcagatgagaagggcggtaaatattatattattaccgcggcgcgcgaacatgggccgaactttgaagcaacggcggaagtgtataaataa

SEQ ID NO: 102047 - DNA, 1107 bp, Enterobacter aerogenes
atgttattcgaccactattccttgcaggccctatcgttaaacaaccgtatcgtgatgccgccgatgacgcgttcccgcgccggagccggtgatgtcgctaccgatcagatggcggagtattacgcccaacgcgccagcgccggtttaattatcagcgaaggcacgcagattagccaacagggacagggttatgcctggacgccgggcatctataataaagcgcagatcgccggctggaaaaaagtcacctctgcggtacaccaggcgggaggcaaaatttttgcccagctctggcacgtagggcgtgtctcccataccgtactgcagccgggcaatgccgcgccggtttcctcgtctgctattcaggctgaaggggtgaaggtctttgtcgatgtcgaaggccgcggcccggaaaacggcgtcggtgaaatggtgcagcactcgatgccgcgcgctctgactcgcgaagagatcccggctatcatcgaacaatatgcgcaggccgcgcgtaatgctatggccgccggttttgatggcgtagaactacacggtgcgaatggctatctgattaatcagtttattgattctcgagaaaaccagcgcaccgatgagtacggtggttcgttaaccaatcgcctgcgtttcctcaaagaagtcgcgcaggccgttgccgatgcgattgggaaagagaaactgggtatccgcctggcgccgctgaccaccttgatggggtcgaaagacgatacgccggaagccacctatctggcggcggccagcgtcctcaatgatatcggcatcgcctatatccatatcgccgaagccgactgggacgacgcgccggtgatgcccgccgcctttaaagaagcgctgcgccaggtgttccgcggcacgatgatttattcagggaaatacaccgtagaacgtgccgaagaggcgctggccaagggctgggccgacctgattggttttggccgtccgtttatcgccaacccggatctgccctatcgcctgcaacacaacctgccgctgaaccagccaatcagagagcagtttttcggcggtggtaaagagggctacctcgactaccctaccgtcgatgcgaagtaa

SEQ ID NO: 102048 - DNA, 1572 bp, Enterobacter aerogenes
atgtggtattatcgcgcctttcccttttcgtcctggggtttttttatgcaacaacctgttgttcgcgttggggaatggctcgttactccttctgtaaaccaaattagccggaacggacgtcagcttactctcgaaccgcgtttaatcgatcttctggtctactttgctcaacatcctggcgaggtacttagccgggacgagcttatcgatcacgtctggacgcgcaacgtggtgaccagccatgtcgtcacccaaagtatttccgagttgcgtaaatcactgaaagacggtgatgacggcagcatggaatatattgcgacggtgcccaaacgcggctacaagctgacggtcccggtaatttggtgtacggaagagggcgaagagttggcgccggttgtcccgccagtggcccctgtcaccgttcctgaaacgtcgccaccgactatttctccttcatctgctgcgccagcggcggcggcagtgccggaaaaacgtaaacggatcaccaccttttgggtatggacgctattcctgctggcgttgggcagttgcgtcgcgttagttgctttgtcgtcgatagaatcgcggccgccggaaaccaaaactcgcctgctgctcaacccgcgcgatatcgacatacacctggtaaacggcagttcatgcaacaactgggcatcgcagcatgcctatgcggtagggttgggcagcctggtaaccacctcgctcaacactttctcgacctttatggtccacgataaaacgaactacaacatcaacgagcccagcagttcgggtaaaacgttgaccatcgaattcgttaatcagcgccactatcgcgcccagcagtgctttatgtcggtgcaactggtcgataacgccgacggctcgacgatgctcgataaacgctactttattaccatggataaccagctcaccattcagaatgacctgctggatagtctgtcaaccgcgctaatgcagccgtggccggatcgcatgaaagcgatgctgaaacagtatcaacccgcgcaaagcccttcattaacccgtctttatcaggcccatcagctgttaatgaaaggtgatgtcgattcattaggtaaagccagcgatatacttgatgacgtcattaaacaatcgccggactttatttatgcttacgccgaaaaagcgctggtggatgtattacgtcattcgcagcagccgttggatgaaaaacaattagcgacgctgtatgccgaggttgaaaaagtaggtaaaatgcccggcattaaagatatggcgattttctaccagataaaaacggtagatatgttaggcaaagggaaaatagatgaagcgtacagcgcgatcaacacgggcattgatttagaaatgtcgtggatgaattacgtgctgctcggaaaagtttatgagatgaaaggacagaaccgcgaagctgccgatgcctacctgacggcgtttaatttacgccctggcgaaaacaccttgtactggattgaaaacggagtattccagacctccgtcacccgcgtagtaccgtatctcgacaatttcctcgcttcagaataa

SEQ ID NO: 102049 - DNA, 1338 bp, Enterobacter aerogenes
atgagttctgccaaaaagatcgggctatttgcctgtaccggcgtagtcgccggtaatatgatggggagcggtattgcactattacctgcgaacctcgccagcatcggtggtattgccatttggggttgggtgatttctattattggcgcgatgtctttggcttatgtttatgcccgactggcgaccaagaacccgcagcagggtggtccaattgcgtacgcaggggaaatttctccggccttcggtttccagaccggcgtcctttattatcatgcaaactggattggtaacctggcaatcggtattaccgccgtctcttatctctctacgttcttcccaattttaaataacccggtgccagcaggtattgcctgtattgccatcgtgtggatctttactttcgttaatatgctcggcgggacctgggtaagccgtctgaccactattggtctggtactggtgcttattccggtggtgatgacagcggtcgtcggctggcactggtttgacgcggcaacttatcaggcgaactggaacacctccagcaccactgatagccacgcggtcattaaaagtatcctgctctgcctgtgggccttcgttggcgtagaatccgccgcagtgagtaccgggatggtgaaaaacccgaaacgtaccgtaccgctggcaaccatgctgggtactgcgatggccggtatcgtctatattgccgcgactcaggttatcgccggtatgtatcctgcttctcagatggccgcatccggcgcgccgttcgcgattagcgcctctaccattctcggcggctgggctgctccgatggtttccgctttcaccgccttcgcttgcctgacttctctgggctcgtggatgatgctggttggccaggccggcgtacgtgccgccaacgacggtaacttcccgaaagtgtatggcgaagtcgatagcaacggtatcccgaaaaaaggcctgctgctggcggcggtgaaaatgaccgcgctgatggtgctgattaccctgatgaactccgccggtggtaaagcttctgacctgttcggcgaactgaccggtatcgcggtactgctgaccatgctgccttacttctactcctgtgttgacctgattcgtttcgaaggcatcaatattcgtaacttcgttagcctgatttgttcggtactgggttgcgtgttctgcttcatcgcgctgatgggcgcaagctccttcgaactggccggcaccttcatcgttagcctgattatcctgatgttctacggtcgcaaaatgcaccagcgccagcagaacaacgcaacggataacaacagccccgctaacgcgcactaa

SEQ ID NO: 102050 - DNA, 2148 bp, Enterobacter aerogenes
atgaacgttattgcaatcatgaatcacatgggtgtttacttcaaagaagaacccatccgtgaactgcatcgtgctctcgaacgcttggacttccgtattgtctacccgaacgaccgtgacgacttattaaaacttatcgaaaacaactctcgtctgtgcggcgtgatcttcgactgggataaatacaatctcgaactgtgcgaagaaatcagcaaaatgaacgagtacatgccgctgtacgctttcgctaacacctactccaccctggacgttagcctgaacgatctgcgcatgcaggttcgcttcttcgaatatgcgctgggcgccgctgaagatatcgcgaacaaaatcaaacagaacactgatgaatacatcgacaccattctgccgccgctgaccaaagcgctgttcaaatatgtacgtgaaggcaaatataccttctgtaccccaggccacatgggcggtaccgcgttccagaaaagcccggtaggcagcatcttctatgatttctttggttccaacaccatgaaatccgatatctccatttcggtttctgaactgggttcactgctcgaccacagcggcccgcacaaagaagcggaagagtatatcgctcgtgtgtttaacgctgaacgcagctacatggtgaccaacggtacatctaccgctaacaaaatcgtcggtatgtactccgcgcctgccggcagcaccgtgctgattgaccgtaactgccacaaatcgctgactcacctgatgatgatgagcgacattacgccgatctacttccgtccgacccgtaacgcctacggtatcctcggcgggatcccgcagagcgagttccagcacgcgactatcgccaagcgtgtgaaagagacgccgaatgcgacctggccggtacacgcggttatcaccaactcaacctatgatggtctgctgtataacaccgacttcatcaagaaaaccctggatgtgaaatccatccactttgactccgcatgggttccttacaccaacttctcgccgatctatgaaggcaaatgcgggatgagcggcggtcgcgttgaagggaaagtgatctacgaaacccagtccacgcataaactgctggcggcattctctcaggcttcgatgatccacgtgaaaggcgacgttaacgaagaaaccttcaacgaagcctacatgatgcacaccaccacttctccgcactacggtatcgtggcttccaccgaaaccgcggcggcgatgatgcgcggtaacgccggtaaacgcctgatcgacggttctatcgaacgttctatcaagttccgtaaagagatcaaacgtctgaaaggcgagtctgaaggctggttcttcgatgtatggcagccggaacatatcgatggcgctgaatgctggccgctgcgctccgatagcgcatggcacggtttcaaaaacatcgataacgagcacatgtacctcgacccgatcaaagtcacgctgctgactccggggatgaagaaagacggcaccatggatgatttcggtattccggcaagcatcgtggcgaaatatctcgacgaacacggcatcgtggttgagaaaaccggtccgtacaacctgctgttcctgttcagcatcggtatcgataagaccaaagcgctgagcctgctgcgtgcgctgaccgacttcaaacgcgcgttcgacctgaacctgcgggtgaaaaacatgctgccgtctctgtaccgtgaagatcctgaattctatgaaaacatgcgtattcaggacctggcgcagaacatccataaactggttgagcatcacaatctgccggacctgatgttccgcgcattcgaagtgctgccatccatggtgatgaccccgtatgccgcgttccagaaagagctgcacggtcagactgaagaagtgtacctcgaagagatggtaggccgcgtcaacgccaacatgatcctgccgtatcctccgggagtaccgctggtcatgcctggtgagatgatcaccgaagaaagccgcccggtgctggagttcctgcagatgctgtgcgaaatcggcgctcactacccgggcttcgaaaccgatatccacggcgcatatcgtcaggctgatggtcgttacaccgttaaagtgctgaaagaagaaaacaacaagtaa

SEQ ID NO: 102051 - DNA, 1473 bp, Enterobacter aerogenes
atgaaaacaccctcacagccgcgcgcgatttactacatcgtagcgatccagatctgggagtacttcagcttttacggcatgcgcgccttactcatcctttatctcacccaccaacttggctttgacgatagccacgccatcagtctgttcagcgcctacgcatctttagtttacgtaacccccattctcggcggctggcttgccgaccgcctgctcggcaaccgcacggcggtgattgccggggcgttgttgatgaccctcggccacgtggtgctgggcgtcgaatctgattccacctggagcctctatctggcgctggcgatcattatctgcggctatggcctgttcaaatccaatatcagctgcctgctcggcgaactgtacgccgctgacgaccatcgtcgcgatggcggtttctcgctgctgtatgccgccggtaacgtcggttcgatcgccgcccccattgcctgcgggctggcggcgcagtggtacggctggcatatcggctttgcgctggcggggatcggcatgttcatcggcctgatgattttcttaagcggcagccgctacttccgcgacacccgcggcgtcgataaacaggcgctgcgcgcggtgaaattcgtgctgccgacctggggctggctggtggtgatgctgtgcctggcgccggtgttcttcaccttgctgttagaaaacaactggtccggttatctgctggcgattgtctgcctgttcgccgcgcagatggtggcgcggatcatgatcaaatcgccgcagcaccgccgcgcgctgtggcaaatcgttctgctgatgttgaccggaacgctgttctgggtgctggcgcagcagggcggcagctcgattagcctgtttatcgaccactttgttgatcgccggctgttcaatattgaagtaccgaccgcgctgttccagtcggttaacgcggtggcggtgatggccgccggcgtgatcctggcgtggcttatccgcccggaagggcgaacccgctcggtgttaaaagtgtggctgaaatttgctttcggcctgctgctgatgggcggtggatttatgctgctggcgctgaatgcccgccacggcgcggctgatggtcaggcctcgatgggcatgatggtcgccgggctggcaatgatgggctttgccgaactgtttattgacccggtggcgatggcgcagataacccgtctgaacatgcccggcgtcaccggtgtattaaccggcatttatatgttggccaccggcgcggtcgccaactggctggccggggtggtggcgcagcaaaccaccgaatcgcaaatcagcgacacggcgattgccgcctatcagcatttcttctcgcagatgggcgaatggactatcggctgcgtggcggtgattgtcattgtcgcctttgccgcgatttgcagccccggccagcgcagcgcgaccggggacattaactcaacagccaagtga

SEQ ID NO: 102052 - DNA, 1518 bp, Enterobacter aerogenes; identical to SEQ ID NO: 99324

SEQ ID NO: 102053 - DNA, 1389 bp, Enterobacter aerogenes
atgaataaagacaatagccgccgtgaatttcttacccaaagcggaaaaatggtcaccgccgccgccctgctggcggcaggcgcgccggcggcgtatgccgcaagcaacccgccatccgcggccacctgcgataataaaggcgcggtcaacgtcgccgataaacattactaccttgataacgtgctgctggaaagcggcttcgaatatgaaaacggcgtggtggttcacacccggaccgagcggcaaacactggaaataaaagacggcaaaatcgtcgccctgcgcagcaatctgagccacccggacgccacgctgccgcgctacgatgcgggcggtaaactgatgctgcctgccatgcgcgacatgcatatccatctggacaaaacgttttacggcggcccgtggcgctcgcttaaccgcccggcgggcaccaccattcaggatatgatcaagcttgagcagaaactgctgccggaactccagccttacacgcaggcgcacgccgagaagcttatcgacctgattcaatccaaaggctcgaccatcgcccgcagccactgcaatattgagccggtgtccgggctgaagaaccttgagaatctgcaggaagtactggcgcggcgtaagccaggctttgactgcgaaatcgtcgcttttccgcagcacgggctgctgctgtcgaaatcggaatcgctggttcgcgaagcgatgcaggccggcgcccattatgtcggcggcctcgacccgactaacgtcgatggcgcgatggagaaatcgctcgataccatgttccagattgcgctcgattacgacaaaggggtggatattcatctgcatgaaaccagcccggcgggcgtggcggcggtgaactatatggtggaaaccgtggagaagaccccggcgctgaaaggcaagctgaccatcagccacgcttttgcgctggcgacgctcaacgagcagcaggtcgatgccatcgcgacccgcatggcggcgcagcagatcaccatcgcctccaccgttccgatcggcactctgcacatgccgctcaagcaactgcgcgaaaaaggcgtcttcgtgatgaccggtaccgatagcgtaattgaccactggtcgccgtacggactgggcgacatgctggagaaagccaatctctacgcccagctgtatatccgccccaatgagcagaccctgtcgcgcgcgctggccatcgccaccggcgacgtgctgccgctgaatgacaagggcgagcgcgtatggccaaaagcgcaggacgacgccagctttgtgctggtcgatgcctcctgttccgccgaagccgtggcgcgaatttcgccgcgcaccgccaccttccataacggtaagatggtctggggcagcgtcggcacctga

SEQ ID NO: 102054 - DNA, 951 bp, Enterobacter aerogenes
atgaaagaacttatcgtcgttgccattggcggcaacagcattatcaaagataacgccagccagtcgatcgagcatcaggccgaggcggtcaaagcggtggccagcacggtgctggagatgctggcttcggactataacgtggtgctaacccacggtaacggcccgcaggttgggctggatttacgccgctcggagatagcccatgaacgagaaggtctgccgctgacgccgctggctaactgcgtcgccgatacccagggcggcatcggctacctgatccagcaggcgttgaataaccgccttgcccagcgcggcgagcaaaaggcggttaccgtcgtcacccaggttgaagtcgataaaaacgatcccggctttgcctatccgaccaagcctatcggcgcgttctttagcgaaagccagcgcgatgaactacaacaggcgcatcctgagtggcgctttgtggaagattcgggccgcggctatcgccgggtggtcgcctcgccggagccgaaacgcattgtcgaagcggaagctattaaagcgctgacccggcaaggctttgtggtgatcggcgccggcggcggcgggatcccggtggtgcgcagcccgcagggcgactaccagagcgtggatgcggtgatcgacaaagatctctcaaccgccctgctggcccgcgaaattgatgctgatattctggtgatcaccaccggggtggagaaagtgtacgtgaatttcggcaagcctaatcagcaggcattgggtcgcgtcggtatcgacgagatgagccgctatatgcaagaaggacatttcccggctggcagcatgctgccaaaaatcgtcgccagcctcgcgttcctgcaacacggcggcaagcgggtgatcatcaccacgccggaatgtctgccagccgcgctacgtggcgaaacgggaacccatattgtgcatgactga

SEQ ID NO: 102055 - DNA, 1419 bp, Enterobacter aerogenes
atgagccagtcgctatttaaccagccgttgaacgtgattaacgtcggtatcgccatgttcagcgacgatttgaaaaagcagcacaccgccgtcacccagctcgactggacgccgccgggccagggcaatatgcaggtggtcgaggcgctggatcgcatcgccgactcgccgctggcggataaaatcgccgccgccaaccagcaggcgctggagcgcattattcagtcgcacccggtactcatcggctttgatcaggccattaacgtcgtgccgggcatgacgccaaaaaccattctacatgccggcccgccggtggaatggcaaaacatgtgcggcgccatgaaaggcgcggtcaccggcgcgctggtctttgaagggctggcgaaagatctggatgaagccgccgagcttgccgcctccggtgaaattaccttctcaccctgtcacgaacacgactgcgtgggttcgatggcgggcgtgacgtcggcgtcgatgttcatgcacatcgtcgagaacaaaacctacggcaatatcgcttataccaacatgagcgagcagatggcgaagatcctgcgcatgggagctaacgataagagcgtgatcgatcgtctgaactggatgcgcgacgtgcagggccccatgctgcgcgacgccatgaagatcatcggcgaaatcgatctgcgcttaatgctggcgcaggcgctacacatgggcgatgagtgccataaccgcaacaacgccggcaccaccctgctgattcaggcgctcacgccggggattattcaggccggttatccggtagagcagcagcgcgaagtgttcgaatttgtcgccagcagcgattacttctccgggccgacgtggatggcgatgtgcaaagcggcgatggacgcggcccacggtattgaatacagcaccgtggtgaccaccatggcgcgtaacggcgtcgagttcggactgcgggtcagcggcctgccgggacaatggtttaccggcccggcgcagcaggtgataggcccgatgtttgccggttttaaaccggaagactccggcctcgatatcggcgacagcgcgattaccgaaacctatggcatcggcggtttcgccatggcgacggcgccggctatcgtcgcgctggtcggcggaacggtagaagaagcggtcgatttctcgcgccagatgcgtgaaatcacccttggcgaaaacccgaacgtcaccattccgctgctcggctttatggggatcccgaccgcgatcgacatcacccgcgtcggcagcagcggtattttaccggtgatcaacaccgctatcgcccacaaagacgccgggatcggcatgatcggcgccgggatcgttcatccgccgtttgcctgtttcgaaaaagcgatcctcagctggtgcgatcgttacgacgtttag

SEQ ID NO: 102056 - DNA, 1548 bp, Enterobacter aerogenes
atgtcagttaaaatagtggtgaagaagaatacctattttgattccgtctcattaatgtcgatttccacccgcgctaataagctcgatggcgtagagcaggcatttgtggcgatggcgacggaaatgaacaaaggggtgctgaataaccttgggctgctgacgccggagctggaagcagcgaaaaacggcgacctgatgatcgtcatcaagggcaaagacggcgccgattgcgaacagatactcagtgaaatagaagcgctgttcagcaaaaaggccgaaagcggccagcacgaagcgcgctacgctaccctcgccagcgccaaaaaacatcttccgcaaagtaacctcgcgattatttcggtcaacggcctgtttgccgctcgcgaagcgcgtcaggcgctgcaaaacgatcttaacgtgatgttgttttccgataacgtctctattgacgacgaactggcgctgaaacagctggcccacgaaaaggggttgttgatgatgggaccagactgcggcaccgccattattaacggcgcggcactgtgcttcggtaacgcggttcgccgtggcaacatcggtattatcggcgcctccggcaccggtagccaggagctgagcgtccgtatccatgatttcggcggcggcatctcgcagctgattggtaccggaggccgcgatctgagtgagaaaatcggcggcctgatgatgctcgacgccattcagatgctggaagccgatccgcaaacagaaattatcgtccttgtttctaaaccaccggctccagcggtggcgaaaaaagtgctcgaacgcgctcgcgcctgccgtaaaccggtggtggcgtgcttcctcggccgcgccgagcctcccgccgatgagccaggcctgcagttcgcccgcggcactaaagacgcggcgctgaaggccgtcctgctgagcggtattaagcaggaaaatctcgatgtacatccgctgaaccaggcgctgattgctgacgttcgcgcgcagctcacgccacagcaaaagtacattcgcggcctgttctgcggcggtaccctgtgcgatgaaaccatgttcgcggtactggaaaaacacgcggatgtttatagcaacattcagccggatccggcttatcgcctgagcgatatcaatcgcagcatcaaacacaccttcctcgatttcggcgatgacgacttcaccaacggtaagccgcacccgatgatcgacccaaccaaccgtatcagtcgcctgctgcaagaagcgcgcgatcccgaagtggcggtcatcgtcatggacttcgtgctgggcttcggagcgcatgaagatccggtgggttcgacgatcgcggcgatcaaagaggccaaagccattgccgccgccgatggccgcccattagcgattctcgcttacgtgttaggcaccgacatcgatacgccgtcgctggagcaacagcgccagatgctgcttgacgctggcgtcattctggccagcagcagtaccaataccggtttgctggcgcgtgaatttatctgcaaaggggagcaagcctga

SEQ ID NO: 102057 - DNA, 864 bp, Enterobacter aerogenes
gtgcaagcgctaactgcggatgagagctttctctcgcagcgcggcggcggacaggtcgagcaggttttcactcatgcggtgaacctgctcatccccggcaaaccagggcttctgacgctgttgtgtgaaacctctgataatgcgcccaatagctgtaggttagcactcacccactttgacaacctgctccggccaggggaaagcgtccggtttaccgattcagggatttacattggcgataatacatggatagacatccaccgttgtgagcgctggcaaacgccgcaggcggtattaaacgcggcaacatttagccagatagcctggcgacgatggcgcaacattatcgttacgcagttacatgaggatgacacgttatttctctatcgcggcgacaatcccttttatcacgcgatgcgtcatgaactccagcagcgacgggaaaccttatttaaagcgcttggcgaaaataaaaatatcagcgccgccgtggcgaacatgatcggattaggcattggcctgacgccatcggcggatgattatttgctaggtctaagcgttattttattcataaaggggcacccggctaatcaataccgggaagcatttataaccgcgctgcagagcgcccgacaaaatactacgccgctcagcgcgataacgctggaggcagcgataaaccaacgttatcgcgaaagtatcgccgtgttgattaatctgctggttaatcaatcgacaaccttttctattgaggctattgccgatattaaaaatattggctcaagttccggcagcgacatgctattgggcatggcggatgcctgcgcgctgagccaaacgtatggagggaataatgtcagttaa

SEQ ID NO: 102058 - DNA, 606 bp, Enterobacter aerogenes
atggccacggaaaatattattgctgactatcttttggctgcagagcagggaaatattgcgaaattaacagcctgcctggcaagtggcgtcgatattaatgccagtaatcgtcaggggcgaaccgccattaccctcgccagcctgaataaacattatgcttgtgtctcggttcttattgccgctggcgcggatattaataagcaggatcaaacctgttttaacccgtttttaattagctgcctgaataacgacgtcgaactactgcgcttaattttgccggcaaatcccgacctcgaacgattaacgcgttttggtggcgtaggcctgaccccggcctgtgaaaaaggccatcttgagatcgtcaaaatattgctgacggaaaccaatattaacgttaaccacaccaatttcgttggctggacaccgctactggaagcgattgtcttaaacgacggcggtgcgacgcagcaggagatcgtcaaactgctgctggaccacggcgccaacccgcatatgaccgataagtacggtaaatcgccgctggagctggcatgggataagggattcagtgaaatcgcccacctgctggtcgccgccggagcctga

SEQ ID NO: 102059 - DNA, 495 bp, Enterobacter aerogenes
atgaacggactcaccgctacggggatcaccgtcggtatttgcgcaggcgtttggcagctcatttcctcgcacgtcgggctgcagcacggttgggaattattgggaaccatcggcttcgtcgcgttctgtagtttctatgcggcagggggtggccaatccggctttgtcaaaagcctgtgcgttaactattccggggcagtgtgggcgtggctggcggcgctggccgccggcgctctcgcttcagccagcggtatgtcggggttctgggcaagcgttattaccacggtgccgttttcggcagtcatcgtctggcaggggcgctttacgctaacctcatttattcccggcggcttcctcggcatgacgctctttttcgccaccggtttgaactggacggtgacattgctgggatttctggcgggcaactgcgttggctttatttcagaatatagcgggcgcaaactcagcgaggcgaccagtaaggagcgagcctga

SEQ ID NO: 102060 - DNA, 939 bp, Enterobacter aerogenes
atgaactcgatttttactgaagaaaatctgctggcattcaccaccgcggcgcgttttggcagcttcagcaaggcggccgatgagctggggttaaccacctcagccatcagctataccatcaaacggatggaagccgggctggacgtggtgctgtttacccgcaacacccgcagcattgaactgacggaatctggctactatctgtttcgcaaggctaccgatctgcttaatgatttccatgcgataaagcgcagcattgatactatctcgcagggcattgaagcgagggtgcgcatctgcatcaatcaactgctatatacgccgcgccataccgcccgcctgctgcaggtgttgaaaaaacagtttcccacctgccagataaccgttaccaccgaggtatacaacggcgtctgggattcgatcatcaataaccaggcgaatattgctatcggcgcgccggatacgctacttgacggcggcggaatcgattataccgagatcggcgcgatccgctgggtgtttgctattgccccggatcatccgctggcgtttatgcccgaacctatttcagaaagccagttacgcctctatcccaatatcatggttgaggacaccgccagtacgatcaataaaaaggtcggttggctgctgcatggccaggaggcgatcctggttcccgacttcaataccaaatgtcagtgtcagatcctcggcgaagggatcggcttcttacccgactatatggctcatgaagccattgcggagaatctgttggtgatccgccagatccacaacccgcgccaggattccggcatgttgctggccacccagcacgcggcaaccggccaggtgacgcagtggattaagaagcaattccgccccggcgggattttaacggcgatatatgctgatttattgcatcgtggagcagcgaaatag

SEQ ID NO: 102061 - DNA, 657 bp, Enterobacter aerogenes
atggatacggggaagttgaacagcagttttggtcgtattcatgcctgctaccagaagctgcagttaaatgcgcatctcccacacgtcatcgcctgtagcgaaaacgtcgagtgcgccgccggcgagcgttttcatccgcaggatgggttcatttactttctgctgtccgggcaaatcaccctcgcagtcaacgaccctgataacctgttggggattgtgatcgagcatatgccgctgggcctgcttgagcactactgtccggcggtagagctgctatatcaatgtctcgatcgctgccgttttgccagaatcagcgtggaggatttcgagcgtatcttcttttactcttcgccggagtatatgaaagagctgacgactattctggcctacatgggcatttttgctcttgatgcgcacaacgagcgcggcaacctgtccggttttcagaccataaaatcgatgctatcgcgttatctgtaccgtaacgagatcgattgtggaaaacgtgaaagcctgtccgcttttattattaaacggaccaatctttcgcgcagctatgtttatcaggttttagcggcgttaaaagaaggcggttatatcacggtgaaaaaaggtcaacttatttctatcgaccgaaaaataccggataaattctga

SEQ ID NO: 102062 - DNA, 336 bp, Enterobacter aerogenes
atgaccctggattatattgctttagccatcctgattgcggtggtgctgattttattttatggaattatcatgatccacgatattccgtatgaaatagccaaaaaaagaaatcatccgcaccaggatgcgattcattacgctggctgggtgagcttgttcaccctgcacgtgctgtggccgctgctgtggatctgggccacgctgtggcgagaagaccgcggctggggaatgcagcagttaaagaccgaccagcacgatttacatcagcgtctggatgcgatgcaggcggaattaaaccgtctgaaaaatagcgccgtcaatcaggagggtaaataa

SEQ ID NO: 102063 - DNA, 1143 bp, Enterobacter aerogenes
atggaaacgttattgctgctgtgttatgccgccttgtgtatcgtgatatttaaagtattccgtattccattaaataaatggacggttcccactgcggtattaggtggcgtgatactgattggcatgttaatcctcggtatgaattataacttcccctatagcgaagtcgggaagcaggtttatcgcacggtgcccattgtttcgcaaacccgcggtcgagtcaccagcgtgccggtgaaaccaaatcagatgctgcatgaaggcgacatcttgttcaccatcgacccaaccccgttccaggcgaaggtggacgacctgaccgcacaagtgaaagcggccagccaggaggcgttgtcgctggatgcggggttaaccagcgcgcaggctgatttaagcaaagcggtcgccgagcgcgaccgggcccagcgtgaatacgcccgcttccaggcaggtcatgataaaggggccttttccgatcagatggtcgatacccgtcgccagaactggaaagcgacgcaggcggcggttgacgccgcccgggcaaaggtcgcacaggcgcgtaacgatctcaattcggtggtgcacggcgagaacactaaagtcgcttcgctgctggcgcagctgcgcgaggcgcaatttaagctcgataacacggtggtacgcgcgccgtctgacggctatgtcagtaccgtcggcctgcgtcctgggaccatgtccaccgcgttggggctgaagccggtaatgacgtttgtgccaacggataatgcgaattcacgtgaatacgtcgccgcattccgtcagaacgcgctgcagcgtttgcaaaaaggtgaacaggctgaattactgttcccctctattccgggaaccgtatttaaagcgcaggtcgcggaagtgctgccggcgattggcgaaagccagtttcagggtcaggggacgttgctgacggccaacgatctggcggcgcgcggccgagcgctggtggtattaaaagtgaccgacgatcgtctggcaaattatcagctgccgcagggcgcggatgtcgaagccgccgtctattcggaacattttgagcacctgtcgctgataagaaagatcctcatccgtatgaaaagctgggaaagctatctctatctcgatcactaa

SEQ ID NO: 102064 - DNA, 426 bp, Enterobacter aerogenes; identical to SEQ ID NO: 87021

SEQ ID NO: 102065 - DNA, 465 bp, Enterobacter aerogenes
atgaaaaagattatttctctggcggttattttatcttgcgtgctgagcgctcaggcttttgccgatggcccaaatgacggtcatcgtccggggcaacagcaggtatggcagaatggcccgaagcagggtgaccagaatggacaccaccagtcgggcggtcctggcgataaccatcagggcaacaatgatagccgcggcccggaccgaagaggtcatgacgatcgtcgccaggaacgccatgaacaggaccatttcgcctggaggggtaacgatttccgtaaaggccatccggcgccggagcattatcgcggtgatgaatatcgcgtgagtaactggaacgagcgtggcctgccgcgcccgccggagggtcatcactggtcttatatcgatggcaattacgtgctgatcgccgcagcgaccggaattattacttcaattctggtaagcggcgccctcggtcattaa

SEQ ID NO: 102066 - DNA, 591 bp, Enterobacter aerogenes
atgaaatatcatttacttttacttgcctgcgcgctgacgctaacaggctgcagcgctgagggcgacaccgccagccagcaacgcgccagcatccaaaagatgcgtaccaacacgctcagtaaactctatagcctgtatccacaagcgcgtagcgatatccagcattcaaagggctacgcggtcttcgccagtaacagcagcaagatattagtctttggcttcggtagcggttacggcgtggtgaaaaatagcgccaccggcaaagatacctatatgaaaatggcccagggcggcgccggtgtgggtatgggcgtgaaacagttgcgtaccgtactggtattccacgataaagacgcattgaatactttcattactaaaggctatatggtcggcgcggatgccaacgcggcagcgaaatatgacgacaacggcatcgccccgataggcgcgtcagccaacggcgtggcgaaagatacctcttcgctgccgtcaaaagtcaacgtttatgaaatcaccgagaaaggtttggcggctcaggcaatggtcaacggttataaatactggccggatgacgagctgaataaaaggtga

SEQ ID NO: 102067 - DNA, 1179 bp, Enterobacter aerogenes
atgtctgattgtgtaattccagaaattaaagccacggaagatgaaatgatttctatccgtcattatttacatgccaatccggaattaagtctggaagagtttaataccagcgagctggttgccggtaagctgacagaatggggctatcaggtgacccgcggcctcggtaaaaccggcgtcgtcggcagcctgagcaaaggcgactcgccgcgcactattggcctgcgcgccgatatggacgcattaccgatttatgaaaccaccgatttaccctgggccagtatcgtacccggaaaaatgcacgcttgcggccatgatggccacaccacgattttgctcgcggcggcgaaatatatcgcctcgccggcctgccagttcaacggcacggtgcatctgattttccagcccgcggaagaagccatcggcggcgcggatctgatgattaaagatggcctgtttgagcagttcccctgcgaacgcatcttcggcctgcacaatatgccggggctaccggttggcaagctgggcttctatgccggcaactttatggcctcggcggacacggtcaaaatcacgattaccggctacggcggccacggcgcgcatccggaacgaaccgtcgaccctatcgtggccggcgcggcgctggtgatggcgctgcagagcatcgtcgcgcgcaacgtgccgccgggtgaaacggcggtcgtcagcgtggggactttccaggccggcatcgcctcgaacgtgattcctgagagcgtggtgatggagctcagcgtgcgggcgatgaaaccggaaattcgcgatctgctgattaagcgtattcaagagctgaccgagtttactgccaaaagctatggcgccagcagcgaagtcgagatttacgactcttacccggtattaaccaacagtaacgaagagaccgatttcgcccaggcgctggcgctggaagtctttggccgcgaaggggtgctggagtcggtatcgccaatgaacgccagcgaagatttcgcttttatgctgcgcgagcgtccgggctgttacttcctgctcggcaacggtgaaaaaggcgagaagggcggctgcatggtgcataaccccggttatgactttaacgatgacattatcagcaccggcgcgacgctgttcgcgcgtttagtgcaagcgcactgccgttaa

SEQ ID NO: 102068 - DNA, 777 bp, Enterobacter aerogenes
atgaaaaaatcactgttgttgtgtttggcattaatggcgtcgacgtcggcgctggccgccggggcgaaagagatccgttttggcgttgacccgaccttcgcgccgtttgaatggaaagatccgcagggcaagctggcgggatttgatatcgatttgggcaacgcgatatgtcagcaactgcaggcgaagtgcgtgtgggtggaaagcaacttcgacggcatcatcccggcgctgaaggcgcgtaaattcgacgcgatcctctcagggatgtatatgaccgagaagcgtaaagagcagattgcttttagcgataagctgtacaacgggccggtgtttctggtggcgcgcaaaaataccctcaaaggcaatacgccagagcaactgaaggggaaaaccatcggcgtcgagcaggggtcggcgcaggaaacttacgtgaaccagtactggcggccgcaggggattaatattgtcgcctatcagggagccgatagcgtcgttcgcgaccttgaatcaggtcgtctcgatggcgcggtactctccggcatgatggccgattacagcttcctgcagcagccgcagggcaaggatttcgcctttgttggcggacaactgcaggataataaactgttcggcgccggggcggcgattggcctgcgtcaaggcgacgatgcgctgcgcgaagagataaatggcgcgattgcgaaaatgcttgccgacggcacctacaaaaaactggccgggaaatattttagctttgacgtttattccgggacataa

SEQ ID NO: 102069 - DNA, 954 bp, Enterobacter aerogenes
atgatgacacgtccattgggcaaaagcggattttccatcgccccattagtatttggcggcaacgtctttggctggaccatcgatgagaaaaccagttttgccattcttgatgcttttgttgaccacggttttgatgctatcgatacggcggatgtttattcccgctgggcggagggcaatcagggcggcgaatccgaaaccattattggccgctggctgcaggcgcgcccaggcatacgcgataaagtcaaaatcttcactaaagttggctctgatatggggctacccggccataaaggattgaaaaaagcctggatccagcaggcgattgacgactcgttgcgccgcatgaatacggattacgtcgacctctatttcgcccactggccggatcctgaaacgccaatcgatgaaacgttagaagcattccaggcgctgcagcaggccggcaaggtgcgggcgattggcgcttcaaacctcgacgccggacagctgtcatcggcgctggaagtggcgcgtaaaggaggccttcctgcctggcaggtgctgcagccggaatataacctctatcaccgttccgcctttgaaggggcgctacgcgatctctgcgtcagccgcgatataggcgtggtgacctactacagcctggcttccggcttcctgagcggtaagtatcgccagccgtccgatttagcgcaaagccagcgcggtagcggcatcgctaaatatctcaatccacgcggaatgcggattattgacacactggtcgcggtggcggaagaacagcaggcgaagcccgcagaagtggcgttagcgtggctgatgagccgggaaggcgttaccgcgccgattgccagcgccaccagcctggcgcaggtggaaagcttcgcccgcgcggcggcgctgagccttagcagcgagcagttggcgcggctcgacagcgccagcgcctga

SEQ ID NO: 102070 - DNA, 792 bp, Enterobacter aerogenes
atgacttcagaagccgtatttatccaggtcggcgcgctggccgatggtttcgccccgcacggcaacctgctggccgccgccagtctgcccgcaggcgaacgctttaccttttatgccgacgggagcgagccgcagcagttggttatcgaaaatgaccagacactgctttggaacggcaaacgcgcgccctggcgggcaaccgccctgcgccccgatattctgtttatcgattttcttgacccggagcgcgataacgccagtatcagcgcggtatgcaacctgacgcagcgcaacgccacgctggtatacggccagctaccggacgaagccgccgcgcggctggacgccttcagccgggtagagcaagggttgccgctgaccgccgtcgaggcgcgatttgtcttcgcccgcctggatacccagccgggaccgctgccggactttaccaccgcgctggtcggcatgcgcaatcagtacacctatagcccgaccgagcgctatgaacacatctatctcaacgataatttttacgcctggcagtgtctggatggcgtggaaaaggggctggcggatgtcgatcgctgccattacgtgcaggtggctgaggatctctatttgttcgtctggcgggagaaaatcattcccacgttgggggctatcttgatcgatcttcagcagatgcgtaccgatggtaagatcatgggttatcagggcagtgattttggcgccttgagtaatttcccggtcggcgcgagcgcgaagatcctcaacgtcacccgccatcaggaataa

SEQ ID NO: 102071 - DNA, 777 bp, Enterobacter aerogenes
atggcgagagtcgtggtgattaccggcggcggaagcgggatcggcgccgcctgcgctcggttgatgagcgcggcgggagatcgggtgtttattaccggcagacgtgaagcgccgctacacaagatcgccgttgaaaccggtgcgacggcgctggtgggcgatgccgccgacggcgacgtctggcgggaacggctgctaccgccgattctcgaccagactcacggtattgatgtactcatctgcagcgccggcggcatgggcaatagcgccgccgccgataccagcgatcgccaatggcgcgaggcgctggacgcgaatttaaacagcgcttttgccagcgtgcgcgcctgcctgccttcactgattgcctgccgcggcaatgtgctgtttgtcgcctccatcgcctcgctcgccgccgggccgcaggcctgtggctatgtcaccgccaaacacgcgttaattggcctgatgcgctccatcgcccgcgattacggcccgcagggcgtccgcgccaatgcgatttgtcccggctgggtcaccaccccgatggcggatgaagagatgatcccactgatgcaggaacacgggctgtcgcttgccgaggcctatcaacgggtgtgccgcgacgttccgctacgccgccccgccagccccgaggagatagcccaggcctgtcagtttctctgctcgccgcaggccgccatcatcagcggcgcgacgctggtcgccgatggcggttccagcatcgtcgatgttccaacgctggcgtttacttaa

SEQ ID NO: 102072 - DNA, 1734 bp, Enterobacter aerogenes
gtgaacaaaaaagccatggccgcggcggtcagcatgatcctcgccggcggcgcgcacggcgcgcagaatgagcatccaaacgtcatcgtgattatcgccgatgatatgggttattccgatatcagccccttcggcggtgagatccccacccccaacctgcaggccatggcggagcaaagtatccgcatgagccagtattacacctcgccgatgtcggccccggcgcgttcgatgctgttgaccggcaacagtaaccagcaggccgggatgggcggcatgtggtggtacgacagcaccattggcaaggagggttacgagctgcggctgaccgaccgcgtcaccaccatggccgagcgctttaaagatgccggctataacacgctgatggccggcaaatggcatctcggttttgttcccggcgccacgccgaaagatcgtggctttaaccactccttcgcctttatgggcggcggcaccagccattttaacgatgcgataccgctcggaaccgtcgaggcgttccacacttactatacccgcgatggcgagcgcgtctccctgccagatgatttttactccagcgaagcttacgcccgccagatgaatagctggattaaagcgacgccgaacgagcagccggtcttcgcctggctggctttcaccgcccctcatgaccccctgcaggcgccggacgagtggattaagcgctttaaaggccagtatgagcagggttacgccgaggtctatcgccagcgcatcgcccgcctgaaagcgttgggaattattcatgacgacaccccgctgccgcatctggagctggataaagagtgggaagcgctaacgccagagcagcagaaatatacggcgaaagtgatgcaggtatatgcggcgatgatcgccaatatggacgcgcaaatcggcacgctgatggagacgctgaaacaaaccgggcgcgataaaaataccctgctggtgtttttaaccgataacggcgccaacccggcacagggtttttattacgaatctacccccgaattctggaagcagttcgataacagctatgacaacgtgggccgcaaaggatcctttgtctcctacggtccccactgggccaacgtcagcaacgccccctacgccaattatcacaaaaccaccagcgcccagggcggcatcaataccgactttatgatctccggccccggcattacccggcgcggtaaaatcgacgcctcaacgatggcggtgtacgacgtggcgccgacgctatatgaattcgccggcatcgatcccaacaaatcgctggctaagaaacccgtattgccgatgattggcgtcagctttaagcgctatctgaccggtgaaacgcagacgccaccgcgctcgaagtacggggtcgaattgcataatcaggcggcctgggtcgatggcgactggaagctgcggcgcttagtcaagctcggcctcagcgccggcgacgcgccgtggcagctgtttaacctgcatgacgatccgctggaaacgcacgatatcgcggcccaacatgccgacagggtcaaagccatgagcgacgcctacgaggcatttgctaagcgcaccatggttaccaaagcgcagggcaagatgatcgattatgtcggcatcgatagcaaaaccggacgctacctggcggtcgatccggcgaccatgaagccggtgcccgcgccgcaagccattcctgtgagcgagggcaaataa

SEQ ID NO: 102073 - DNA, 1188 bp, Enterobacter aerogenes
atgctgaatatcgccgccttacgccagcagcaaattccgctggccgttgaaccgcgctcatcgctgccgtttcatattctgatgaaaccgattggtcccgcctgcaacctcgcctgccgctactgctactacccgcaggatgaaacgccggtcaagaagatggacgaggcgcggctggagcagtttatccgccgctatattgccgcccagcccgccagcgcgcgggaaatcaattttgtctggcagggcggcgagccgctactggccgggttaagtttttataaaaaagcgctcgccctgcagcagcgctacgcccctgatggcgtaaccatcagcaatagcctgcagaccaacgggacgctgatcaacgacgcctggtgtcgactgtttcgcgaacatggctttattatcggcgtcagcctcgaaggtagcgaagcgctgcaaaaccaccatcgtcctgataaacgcgggcaggcttcctggccggctgcgctgcgcggtatcgccctgctccaccagcatcaggtggagtttaatctgctggtggtggtgcataacgaaatcgccgcccacgcggcggcgatttatgaccgggtggtcacgcttggcgcgcgctatctgcagttccagccgctaatgagcgaaggcgccgcgctgcgtaagggttatcagctcagcgctgataactgggggcgttttatggtcggtatctggcgccagtggcaaaagcgctgcgatatggggcgggtattcgtcatcaatatcgaacaggcgtgggcgcaatactttacccataccagcggcagctgcgtgcatagcgcccgctgcggcagcaatctggtgatggagtccgatggacaactttacgcctgcgatcatctgatcaatgccgaacatcgactgggtcgccttgacgagcagacgcttgccgccgcagttgacgcttcagttcagctccctttcggccagcaaaaaagcctgcgccgcgaatgtcagacttgctccgtaaaaatggtctgccagggtggctgccccgcgcatctcaacgccgctggcaacaatcggctatgcggcggttattaccgtttctttagcgaaatcctcgcgccagtacgccccttttcccgcgaccttaacggcctgaaagcctggcgggccgcgtttgttggggccgcgcatcccgcgtag

SEQ ID NO: 102074 - DNA, 747 bp, Enterobacter aerogenes
atgcttcatcttactctggtaatccgcgtgttacgcaccaccaccttgacggggggaaatatcatgtctgctttattaaaagccagtcgtaatgatgcgataatagcccgttgtttacagactatttcacagttaattccactgtcttcagcggttttttatcgagtaaataatcgtttaaaacctgaaaactatatattgcataatatttcggataatacacaccaacaatatctggagagcttccagccgttggatccacacctgccggcgcactttagccaccagagtacgaccatggcagcgatgacgccgcgactctgtgaccgcaaccgtcattactatcatgaatttatgttgccgaataacgtacgcgacatgaccgaaatctttattcgccgcgaacggcggatcgttgccggtatctcgctgatgcgcgacgtgcctttttccagcgaggaacgactgcgggcccaggcggtactgccgttggtggaattggctattcgcgatttcctgcaggaagaggatgaactccctgccatcctgacggccaaagagcgcgaaatcgtcggcatggtgcgtgaaggcgccagcaacaagctgattgcccgccagctggatatctcgctctcgacggtgaaaacccacctgcgcaatattttcgccaagaccgaagtcgtcaaccggactgaactcgtttcccgaacctggatgcctgccgctcagcgtacgctgcatctgtaa

SEQ ID NO: 102075 - DNA, 1194 bp, Enterobacter aerogenes
atgtcgagtacacctctttctgaaaataccctttcccggcctgacgggctggtggtgtcgctgcgtttgctggcggcgattgttattttcgccgccattgcgccggggattttaatgaccgcgccggcggtggcggcgcagctggccagcgaatggcaccttaaaccaggacagatcggctggctattttcggcggagctcggcgcgatgagcctggcgacgctcccggcgtggtggtggatgaaccgcctcgactggcggcgggtggcactcgtcgcctgcgcggtatttctgctcgctaaccttgcttcggcggtggtaactcagtatgcgtcgctgctggcggtacgctttattgcttccctggcgggcggcacgctaatgattttgtgcatcagctgcgcggcgggaacgccgaatccatcgcgggtgtacgcattctgggtactggggcagctgctgttaggcatgcttggcctgctggtgttgcccggcctgttcgtgacctttggcctgaaggttgtttatctgattctcgccgccatcatgctctgctgtttgccgctggtttccgccttcccgtcgtgttttcaagcgcgatcggcttcccatcgccagccgcctgcggcgtcgtggcgaaaggcgctggcggtgctcgcagttctcaccttctatatcagcctcagcgcggtatggacctttatcggcaccatcggcagcggggcggggttgagtccgacacaggtcggtctggtgctggcggcggcgacggtgttcggcattatcggcgcaggcggcgcggcgctgcgcggtactcatcgcccggaccggctggcggtgtggctgggatacgcgctgctgatcgccagcgtgctgttactgacgggccatccgctgctggtgcgttacgccattgcggcgctgctgtttaagttcacctggacattcgtgctgccctttatcctcgctcgcgtggccgcgctcgataataacggccggttgatgaacagcatcaatctggtgatcggcggcggaatggccgccggtccggcgctcgcgggggccttactgcaacacttcgccagcgccaatccgctgctggcggcggcaggcgcctgcgcgctgttgtcgctgattttgattgcggcggcgtcgtccgccggaaaaggtttagccaacgggaggatagagtga

SEQ ID NO: 102076 - DNA, 1116 bp, Enterobacter aerogenes
gtgaaaagaaaaaccggtttcttctttgatgaacgttgtttctggcacagtaccggcctgcacgcggtaacgctgccggtcggtggttgggtgcagccgccggctggcggcggccatgccgagtcgccggagaccaaacggcggatgaaaaacctgatggacgtctccgggctgacgccgcagctggaactatgcagcgcggcggcggcgagccttgaggacctgcggcggatccatcccgatagctatcttgagcgttttaaggcaatcagcgataacggcggcggcatgctcggcaaagaagcgccgctggggccggggagttatgaaatcgcctgcctttccgccggactggcctgtgccgccgtggaagcggtgttgaaaggggagctggataacgcctattcactgtcgcggccgccaggacatcactgcctgccggaccagtcgatggggttttgtttcctcgccaatattcccattgccgttgaacgggcgaaagcgttgctggggctcggcaaggtagcgattattgactgggacgttcaccacggtaacggtacacagcatatctatctgcagcgcgatgatgtgctgactatctcattgcatcaggatggctgcttcccgccgggctactccggggaggacgatcgcggcgttggcgcgggcgaaggttacaacatcaatattccgctgctggccggggcgggcgacgacagctggcgctatgcgctggaaactatcgtcattcccgcgctggcgcgttttgaaccggagttgatcattgtcgcctgcggctatgacgccaacgcgatggatccattagcgcggatgcagctacatagcgacagcttccgcgcgatgaccgaacaggtccagcaggcggcggatcgactatgcggcgggaaactggtgatggtgcatgaaggcggctacgccgagtcctacgtgccgttttgcggcctggcggtgatggaaacgctgagcggggtgcgcaccgaggttcaggatccgctgctggaatttattcagcagcagcagccgcgcgccgcattcgcgcagttccagcgccaggccatcgatcggctggcgcagcagtttggtctgctataa

SEQ ID NO: 102077 - DNA, 594 bp, Enterobacter aerogenes
atgtcctccgtcccctggtttgaaacgccattaatgaacgcggtgcagcgcgacttagcgggctggccgagcgaaaaactgagcgaaagcagcgcgatgttgcggctaaacgacgtcaccgccgtcaccttcagcgtgcgccagaagcggctatttatggccagcattcacagctgcgagtttgtcgtcgaggggccggttacccggcccgctcgcggcaagatccgcgcccaccaatccggctggctaaaacgcctgccaatccgttttatcggcagtaaagagagcgcggaactcgccggctatctcaatggttttcctaatctccaacagaccttaagcgagctggactaccgccgcttttcgttgacctttgacgatagcggctggcgctgctgcattgaaccctgggccgccagcgaagtggtctgtaaaatgccgccgctgcgccgttatctgaagctcgaagcgcagcagcggatgctgctgctcagcgtgctggcgatgattaatcaggcggtaagtcagtggatgcgcggtgaaatcgcagaagggaaagcattgacttccccgccatcaccgcggggaagctga

SEQ ID NO: 102078 - DNA, 1500 bp, Enterobacter aerogenes
atgtttagtaacagactcgccagccatcttgaacgcggcgtcgtcggctttccgacgaccctcgccagctcggttgggctgattatggcaagcccggtgatcctgacggtcaccagcggattcggcatgggcggcgacaccttcgcgctggcggtactgctggcttttattatgatgcaggcgcaggtcactaccttcgctgaagccgcgacgttaatccccaccaccggttcggtgtacgactatatctcctgcggtatgggccgcttcttcgccattaccggcgcgctgtgcgcctatcttatcgtccatatcttcgccggcaccgcggagaccattctcgccggcattatggcgctggtgaacttcgaatcggtcaacgcgcagatggccgcccatcaaaacacctggatggtcggcgtcggtatggtggtcattttcggcctgctgaacgccattggcgtggaaattttcggcaaggtcgaagtggtgctcacctttggcatgtggacgacgctgaccattttcggcctgtgcggcatttttatggcgccggtgactcacctttccggctggttcggcacgccgctgaacgttagcgatatctccggcctgttcggctatatcggcatggcgatgtttatgttcgtcggctgcgaactggtgacgccgatggcgccggaaatcaaaaaagcccaccgcaccattccgcgggcgatggcgctgggtttactgggcgtcgccagctgcatgtttatctacggcgcggcgattaaccgccaggtggaaaacgtggtggtcgatgcggcgaataacatccatctgctggacacgccgatggcgatcccggccttcgccgagcgggtgatgggccacgccggccagtactggctcggggtcggcctgctgctggcgggctgcgccacaattaataccttgatggccgcagtgccacgtattatttacggtatggcgctggacggcgcgctgccgcgttttcttacctggctgcatccgcgcttcaaaacaccggtgatcgcgattgccatcggcgtggccatcccctgcctgcacgcctggtacctgaacggcgatctggaccgcatcgtgccgctgatcctcgccgcggtctgcgcctggggcgtagcctatctgctggtcaccctgtcggtggtgatgctgcgcattcgccgcccggacctgccgcgcgcctaccgctcgccgtggttcccgctaccgcagattatctccagcgtcggaattatcatcgcgatcgtgaatattaccccaccgggaatggacagccgcgaggtgctggtgccgttcgggattatgctcggcctgaccgctgcctatgccctgttctggacgctgtgcgtacagcgcgttaatccgttcaagccgctggaggtggaagaggtggtcgagcgcgctatcggcaattacgagaaacagacccgcggggagatgacgcctgatgtcctccgtcccctggtttga

SEQ ID NO: 102079 - DNA, 366 bp, Enterobacter aerogenes
atgcacgcttttaaactcaaacacccggtacctgaactgcagccgatcggcagcgtcagcctgctcggcgcgacgccgaccggcggcgacccgcaggtagccggcgcgatgatctacggcgagccgcaggacgcctttacctgcgggctgttttcgtccaccgaagggagctttaccatgacctatccgtttaccgaacacgccaccgtgctggaaggcgaagtggagctgaccgtcgccggtggcgagccgcagcgcttcgcgccgggggacagctggtttgtcaaacagggtaccgaagtggaatggaaaatcctcaccccacgtttcgtcaaacactatctggcgaacgtcgagacgcgctaa

SEQ ID NO: 102080 - DNA, 1302 bp, Enterobacter aerogenes
atgaatattaaaatcgatgcgctgaactactacggcgcgacgaagaaataccagcttcatttcccggcgctacgggaagatatcgaagccgatgtggtgattatcggcggcggcttctccggcattaacaccgcgctggaactggcggaacaggggatcaccaacgtggtggtgctggaagcgcgccatcttggctatggcggcaccgggcgcaacggcggccaggtgatggctggaatcggccacgatatcgaagcggtgaaaaaacacgtcggcaaagaggggctggagacgctatttaaaatcgccaatctcggcgcgggtatcattcgcgaacgcatccgcaaatataatatcgacgccgatttcgtccccggctacggctacctggcctataaccagcggcagcttaaaacactacgccagtgggagaaggagtttaaagccgccacccccgatgaagaaatcgaactgtataccgggaaagaggtgcagcaggtggtcggttccgaagtttactgcggcgcgctgaaacatatgggcggcgggcagatccattcactcaatatgctgcttggttcggcgcaggccgcgcattcgctgggggtgaagattttcgaatcctcgccggtggtggaggtgaattacggcaaacaggtacgggtgcgcaccgcgatgggcagcgttaaagccgccaaactactgtgggcctgcgacagcttcctcaacaatatggagccggagatctacaacaaaacgctggtcacctactcctatcaggtgtcgaccgagccgctctccgatgaactgatcgagcgcatcagcccgctgcgcggcgccttcagcgatattcgcccggtgattaactactaccgcgtcactcgtgaaaaccgcctgctgttcggcagcgctacccgcttcgtggagtatacgccgaacgatttcgccgcctggaaccgtacgctgctggcggaggtcttcccatacctgaaagatgtgaagatcgatttcgcctggggcgggccgatggcctgtagcgccaacctgttcccgcagattggcaccttacgcgaccataacaacgtcttttacgtccaggggtactccggcttcggcgtcaccccctcgcacatcgtgtgcaaaatcctcgccgaagggatcaatggcggttccgaccgctatcgtctgctaagcagcattcctcacgcgaccatccacggccgtgacagcctgcgcttgctattagtcaccgccggaaaactaatgcatcaaaccgccggtttctggaaaggccggagttaa

SEQ ID NO: 102081 - DNA, 1485 bp, Enterobacter aerogenes
atgagcgaaataaccttactggcggaagtgaccgcctttttacgccagccgcacgggcagtttattgccggtcatcgggagacgggccacggcgcgccgttcgcggtgataaacccggcgaccggagaggcgattgccgaaatcacggcggcggatgtcggccaggcggaccgcgccatggaaagcgcccgccaggcgtttaatcagtggcgcgagatgccgacgctggcgcgcggcgcgttgctgctgaaactagcggacacgctggcagagcatcgcgaagagctggcgcaactggaaagtctctgctccggtaaaaccatcatgctggcgcgaatgctcgagctggatcagtcggtggcgtttttgcgctacttcgccggctgggcggggaaaatcaccggcgaaaccctggatgtctcgctgccgtcgatggccggggagaaatataccgcctttacccgccgccagccgttgggcgtggtggtcggcatcgtaccgtggaacttctcgattatgattgccatctggaagatggcggcggcgctggtctgtggctgcactatcgtcctcaagccgagcgagtatacgccgctgacgctgctgcgggtggcggaactagcgaaagcggtaggtatcccggatggcgtcattaacgtggtcaacggcgccggcggcgaaattgcccaacgccttatcacgcatccgacctgcgccaaggtgagcttcaccggctcggtggcgaccggggaaaaagtccagcagtcggccagtgcgtcaggtaaacgggttacgctggagctgggcggtaaaaacgccgcgctgtttctcgatgacctgacgccggaggccatggtgaacggcattatcgaagccggttacctcaaccaggggcagatttgcgccgccgctgagcgcttttatctgccgcagggcaaactggatgcggtgctggcgctgctgaaagacaggctcagcgctttcgcgccggggtcgccgctggatgaacaaacgctgatggggccgctggccaaccgccagcaatatgacaaggtattgcggctcattcagaccgcacgcgaagagggggataccatcgtctgcggcggcgaagcgctgcccggcgagggctatttcctgcagccgacggcggttaaggtgcgcagcgaagagagcaccctgatgcgcgaggagaccttcggcccggtatgcagctttattggctatcgcagtgaagaggaggcgctggcccgaattaatgcttcgccgtatggactggcggccagcgtctggtcggataatatccgccaggcgctgcgctattctcaggccattgacgccgggatcgtctgggtcaatatgcataccttcctcgacccggcggtgccgttcggcggcatgaaaggatcgggtattggccgtgagtttggtagcgcgtttattgatgattatactgaacttaaatcggtgatgatgcgttattaa

SEQ ID NO: 102082 - DNA, 1305 bp, Enterobacter aerogenes
ttgactacgccattaaaagagatcgttattgtcggcggcggcgccggcgggctggagttggcgacccaactgggacgcaaattagggcgtcgacagaaagcgaatatcactctcgttgaccgcagccagagccatctgtggaaaccgctgctgcatgaagtcgccaccggttcgctggatgaaggcgtggacgcgttgagtttcctcgcccatgccagcaaacaccacttttccttccagcacggttcggtaatagatatcgatcggcagaataaaacgattaccatcgccgcactgcgggacgaacagggcgaagtgctggtgccggagcgtaaattatgttgggacactctggtaatggcgctgggcagtacttccaatgatttcaatacgccgggtgttaaagagcactgtatttttctcgacagttctgagcaggcaaaaatatttcatcagcaaatgctgaaccaatttctgcgctattccgccgacccgcagaccaccggtaaggtcaatattgccattgttggcggtggcgctaccggcgttgaattatctgccgaattacataatgcggtaaaagaactgcgcagctacggttataaagatctgaccaacgaagcgttaaatgtcagcctgatagaggccggcgacggtattttacctgcgctgccaaaacggatttccagcgctgtgcacgaaaagctgacccaacttggcgtgaatgtgatgaccaataccatgatcaccggcgttgaagaaggcggcctgcataccaaagatggccagtttatcgaggcgagtttaatcgtctgggcggcggggataaaagcgccggacttcatgaaggatattgccgggctggagaccaaccgtattaatcaactggtggtgaccccgacgctgcaaaccacgcgcgacgctgatatttttgctttcggcgactgcgcggcgtgcccgcgtccggaaggtggatttattccaccgcgtggccaggcggcgcatcaaatggcgctcttcactgccgacaatattatcgcccggatgaaggggcataagttgaaatcgttctcctatcgcgatcgtggttcgctggtttcgctctccggctacacgacctttggcagcatcatggggcatctaccgatcggcccgatgatggtcgaaggccgtattgcgcggatggtttacgattcgctgtatcggatgcaccaggtgacgctgcacggttattttaaaaccggcctgatgatgttgtccggcgggattaaccggattattcgcccgcgcctgaaattgcattaa

SEQ ID NO: 102083 - DNA, 1083 bp, Enterobacter aerogenes
atgaaatacactcttccggcgttggcgctggccatcagcgcgacgttaggcggctgcgcgactcaccattccgctgccgttgcgcaaccggttgttaactctcctgcggctaacgtggcgcaaccgctgcagcgccagctagcggaagggttgtacgagatggcgctaagcccgcagggcgattcgctgtacgtcgccagcgccgaaggctttaaagatgtgcagggcggggcggtttacaagctggatccgcaaacccttaataccatcggcctgacgcataccgatctgaaaaacttcgctttgcagctctctgcggatggtaaaacgctatacgtcagcaattcgcttgacggcggcatcagcgctatcgacaccgccaccggcaaggtaaaaaaccgcctgctgttcagcgagcgcaatgaaaaagggctcccctatggggcgcgtcagctgctgctgttaaataataccctctacgttggcgcggtcgccgacccggcgcaaatctgggtggttgacgccactaccatgaagctgaaaacgcggattaaaaacaccggtaaatggatgaccggcctgcactattctgcacaaaccgggcgcgtatacgccgccaacggcagcggtgaaattctggtgatcaacccgcgtaaccaacgcattgaacagcgctggaagccgctgggcgacaagccggcgctgctgcttaatatggccgaagatagcgacaccggtcgtctgttcgtgaccgataactcgaaagcgaaaaccaccctggtgctggatatccacagtggcaaactgcttaaacagctcgaggtcggcgattcgctggcggtgcagttcaatgggaaacgccacgaaatttatatttcacagcgtgaatccggcaaggttatcagccttgacgacagccgctacacgctgaagaaaagctgggcgctgccggccaatcccaacagcctgctgctttccgccgatggtcagacgctgtttgtcaccgtcaaacagcccttcaataaagaccactccactaaaggcccggacagcgtcgtacgcatcgacctgaacgagcaataa

SEQ ID NO: 102084 - DNA, 2211 bp, Enterobacter aerogenes; identical to SEQ ID NO: 96739

SEQ ID NO: 102085 - DNA, 1377 bp, Enterobacter aerogenes
gtgaaagacgcgtcaacgtcgtcggatgccgtagaagagagcggcccgacgcttcatcgcggtttacagaaccgacatattcaacttatcgcccttggcggcgcgattgggaccggcctgtttcttggcattggtcccgcgattcaaatggctggcccggcggtgttgctgggttacgccgtggccggtattgtcgcttttctgattatgcgccagcttggcgagatggtggtggaagagccggtatccggttcttttgcccactttgcctataaatactggggcccgttcgccggtttcctgtccggctggaactactgggtgatgttcgtgctggtaggaatggcggaactgactgccgccgggatttatatgcagtactggctccccgatgttcccacctgggtttgggcggcggctttcttcatcattattaacgccgtcaacctggtcaacgtacgcctgtacggcgaggcggagttctggttcgcgctgataaaagtgctggcgattatcggcatgatcgcctttggcctgtggatgctgtttggcggccacggcggtagcaaagccggttttgataacctgtggaagcatggcggtttcctcgccactggctggcatggcctggtgctgtcgcttgcggtgattatgttttctttcggcggcctggagcttatcggcatcaccgctgcggaagcgcaaaatccggaaaagagcattccgaaagcggttaaccaggtggtttaccgtatcctgctgttttacatcggttcactggtggtgctgctggcgctctatccgtgggtagagattaaatccgatagcagcccgtttgtgatgattttccataatcttgacagcaacgtggtggcctccgcgctgaacttcgtcattctggtggcatcgctgtcggtctataacagcggcgtctattccaacagccggatgctgttcggcctgtcggtacagggcaatgcgccgaagtttctcgcccgcgtcagcaaacgcggcgtgccggtgaattcgttgctgctgtcaggcgtcattacctcgctggtggtggtgctcaactatctgctgccgcatgaagcgctggggctgctgatggcgctggtggtggcgacgttgctgctgaactggatcatgatctgtatggcgcacctgaagtttcgcgccgcgcagcgtcgtaaggggcgtgaatcgaagttcaaagcgttactggcgccagccagcaactacttctgtatcgcctttctcggtttgattctggtgctgatgtgcaccattgacgggatgcgtctgtcggcaatactgctgccggtgtggattatcttcctgtttgccgctttcaaactgctgcgccgcccggcgtaa

SEQ ID NO: 102086 - DNA, 1245 bp, Enterobacter aerogenes
atgcaggaattaatatcgcaaatcgccgcattaggcatcaaaatcacccctaccacctcgctcatcattacctttggcattatttttctgacggcgattgtcgttcatctcattctgcacaaagtggtactgcgcaccttcgaaaagcgggcgcaggccagcagccatttatggctgcaaatcatcacgcaaaataaactctttcaccgcctggcgttcaccctacagggaattatcgtcaacgttcaggccgtgctctggctgcagaaaggcagcgaagcggcggaaatcttatctacctgcgcgcaattgtgggtcatggtttacgccatgctctctttcttctcgctgctggacgtgattttcaacctggcgcaaaaattccccactgcctcgcagctgccgcttaaaggtatcttccaggggattaagctggtcacggcaattattatcggcatcctgatcatatcgctgctgattggacaatcgccggcgattctgattagcggtcttggcgcgatggccgccgtgctgatgttagtatttaaagacccgattcttggcctggtggccgggatccagctttccgccaacgacatgctcaaactcggcgactggctggagatgccgaaatatggcgccgatggcgcggttattgatatcggtctgacgacggtaaaagtgcgcaactgggataacaccatcactacaatccccacctggtcgctggtctcggattcgtttaaaaactggagcgggatgtcggcctccggcggtcgtcgcattaagcgcagcctgaacatcgataccaccagcatccattttcttgacgagcaggagcagcagcggctgattcaggccaaattgctgaagccctatatggactcgcgccatcaggaaattaacgagtggaaccaacagcacgctaatgaaccgtcggtgcttaacctgcgcaaaatgaccaatatcggcaccttccgcgcctatctgcaggagtatctgcgtaaccatccgcggctacgtaaggatatgaccatgatggtgcgccagctggcgccggacgctaacggcctgccgattgagatctactgcttcaccaataccgtggtgtgggcggagtatgaaggcattcaggcggatatcttcgaccatatctttgcggtggttgacgagttcggcctgcgtattcaccagacgccaaccggcaacgacattcgttcactgtcgggcgcgctgtcgtcatag

SEQ ID NO: 102087 - DNA, 1428 bp, Enterobacter aerogenes
atgaattcgtctgctgtttcacccggccgcgccggcttactgctgttactgaccggccagatgctgccgttaattgatacctcgataaccaacgtggcgctggactcgatcacccactccctcgacgccagcgccactcaactggagcttatcgtcgcgctgtacggcgtggcctttgccgtctgcctggcgatgggcagcaaactgggcgataactatggacgccgccgcctgtttctgtggggggtggcggtattcggcatcgcctcgctgctatgcgggatggctaactccattaacgccctactcgccgcacgaacgctgcagggcgccggcgcggcgctgatcgtgccgcaaatcctcgccaccctgcacgtcaccctgaaaggcaccgctcacgcccgggcgatcagcctgtacggcggcatcggcggcatcgcgtttatcgtcggccagatgggcggcggctggctggtctccgccgatatcgccgggctcggctggcgcaacgccttctttatcaacgtgcctatctgcctgctggtgttggcctttagccgccgctatgtgccggaaacccgccgcgaaagccattccagcatcgactggcagggaactttcagcctggcgttaatcctttgcagcctgctgtttccgatggcgctggggccggaactgcactggccatgggagctacagctgcttttgctggccgtactccccctgctcggctggatgcgcctgagcgcgctgcgtaagcagcagcgcggcgagcaaccgctgctgccgccgcggctgttgaagctcaccagcatccgttttggtatggctatcgcgctgctgttcttcagcgcctggtccggctttatgttttgtatggcgctgaccatgcaggccgggctggggatggcgccgtggcagtccggcaacagttttatcgctctcggggtggcctattttatctccgcgctgtacgcgccaaagcttatcgctcgctacagcatgggacggattttgctgattggcctggcggtgcagattagcggcctgctgctgctaagcctcaccttttatcaacttggcctgcggaccacgacgctggcgctggtgcccgccaccgcgctgatcggctatggtcaggcgttaatcgtcaacagtttctatcgtatcgggatgcgggacattcgcgcctgcgacgccggagccggtagcgccatcctcagcaccttgcagcaggcgacgctggggctggggccggccattcttggctcgctgttcttgaccctggcccagcgcggcggcggtgactatacgcaggcgctgatcgtcttcctgctggtcgaggtggcaatgatgctgctgctgggcgctattgccctttggctgcgccatcacctgaacctgcagccggcggcgacggcgtcctga

SEQ ID NO: 102088 - DNA, 870 bp, Enterobacter aerogenes
atgacgctaatgctgcaacgtgaggcgctgaatctcgcgcccgatgatagccgtaaacagctgggagcatttctgcgcgcccgccgcgaaagccttgacccgcagcgtctcggcctgccgcgcgtcgggcggcggcggacgccggggctgcgccgggaagaggtggcgatgctggcggacgtcggcgtgacctggtacacctggcttgagcaggggcgggaagtgaatccgtcggcggcggtattaagcggcgtggccagcgcgctgcagtgcagcccgctggaaacccgccatctgttcgtactggccggcttaacgccgccggagaatacgcaggccacggtttgcgaggggatcagtcccggaacccgacgcatgcttgatagcctgatgccgcagcccgccagcattcagaaaccgaactttgatatcgtcgcctggaatgacagcttttgccgcctgatgggcgttgatttcgcgacgattgccgaagaagaccgcaattgcatctatctctatctcacctgcgaagcctggcgtagccgcattgaaaatcgcgatgtgttgccgacttttgtttcctattttcgcgcggcgatggctgagcatcgcggttctccagagtgggaagataagctggcgcgctttttcgccgcttcagcggagttcgaagcgctatggcaccagcgctatgaggtgcgcggcgtcgaaaaccaggtgaaaaattttaaccatccgcagctcgggcgctttagcctgcagcaaatgtactggtattccgcgccgcgcaacggttcgcgtctgctggtctatttaccgctggatgaaaccggagaacaggcgctggcctggttggatcaacagggctaa

SEQ ID NO: 102089 - DNA, 1038 bp, Enterobacter aerogenes; identical to SEQ ID NO: 92125

SEQ ID NO: 102090 - DNA, 654 bp, Enterobacter aerogenes; identical to SEQ ID NO: 95876

SEQ ID NO: 102091 - DNA, 369 bp, Enterobacter aerogenes
atggataacgaagcgctacaccatcacgcgcagcgtatcgcgctgacctacccttttaccgaacactgctggccgtttggcccggagtatgacgtgtttaaagtcggtgggcgtattttcatgttgaccatgacccttcgcgggcgtgccatagtcaacctgaaggccgatccgcaaaaatcgctgctcaatcagcaaatttaccgcagcatcgaaccgggctatcacatgaacaaaaagcactggatcaccgtggtcccgggcgaggatatcagcgaggatttacttgccgagcttattgacgactcgtggaatctggtggtggataagctggcgaaaaaagaccagcgtcggctgcgtcccggctga

SEQ ID NO: 102092 - DNA, 582 bp, Enterobacter aerogenes
gtggctcgtcctaagagtgaagataaaaaacaagcgttactggaagccgccacggccgctttcgcccagtccggcattgccgcttcaacatcggcgatagcccgcagcgcgggggttgccgagggaacgctgtttcgctatttcgccactaaagatgagttgctcaacgagttatacctcgccattaagatgcgcttagtacagacgatgatcgacgggctcaatcctgacgaaaaacgcccaaaagaaaacgcgcggaacatctggaacagttatatcgactgggggatgcgtaactctatggaataccgcgccattcgccgtatggcattgagcgaacgcattaccgatgaaacccgtagccaggtcaaagagagttttcccgagctgaacgagatgtgccagctgtcggtgaaagcggttttccttagcgacgcctatcgcgctttcggcgatgccctgttcctgtcgctggccgaaaccaccatcgaattcgccagccacgatccgcagcgcgcccgcgagatcattgccctcggttttgaggccatgtggaatgcgctgcatgagagtgagtcgtaa

SEQ ID NO: 102093 - DNA, 1173 bp, Enterobacter aerogenes
atgagtgcttactcactcataatcaagttatatcataaagtcccctggatggggcttttgtctggtcaggatatgaaccgtgtcacctttagcgtggtcgccattatgttattagcagcagcaacgacattgccgtttgttcttaatgccggttttggcaaagcgccgcagggtgcgcagctcagtcttgtcgaacagtcgccgaactaccgtgacggccagttccataaccaactgccgacgccgggattcaccggccagaaaaacatgctggccgcgtggtgggattttctggtcacgaagcgagaaaacgcgcgcccgcagcagccgttgccgctggtgaataccgatcttgccggtttgccgtctggtgaagacgtcatggtctggctcggtcactcatcgtggtatctgcagctggcgggtaaacgtatcctgatcgacccggtatttagcgattacgccgcgccgttctctttcatcaataaggctttccccggtgattacccgtggaacgcgcagcggatgccggagatcgatctgctgattatctcccacgatcactacgaccatctcgactacgccaccattaaggcgctgatgccgaaagttaaacgcgtggtgacgccgctcggcgtcggctcgcatctgcgctactggggaatggatgcggcgattattgatgaagtggactggaaccagacgataaaaatcagcgatgaactcaccgtacatgcgctgccggctcgccatttctccggccgtgggctgaaacgcaaccagaccttatgggccagcttcctgttcgtcactccgcaggaaaagatttattacagcggcgatagcggctatggcccgcattttaaggccattggcgaacagtttggccctatcgatctggcaatcatggaaaacggtcaatatgaccaggactggaagtacatccacatgatgccggaagaaacggcgcaggccgccgatgatttacgcgcccggtcggtattaccggggcacgccggacgctttgtgctggcaaaacacagctgggacgatccgtaccagcggctggcggcagccagcgaaggacgtgagtggcgtttagtcacgccaatgctgggcgaaccggtgtgggtcgctgataagacacaatcatttaacgcctggtggcgctaa

SEQ ID NO: 102094 - DNA, 342 bp, Enterobacter aerogenes
atgaatatatccgctcaggtgattgacactatcgtggaatggattgatgacaatctacatcagccactgcgaattgatgatattgcgcgccatgccggatactcgaaatggcatctgcaacggctgtttttgcagtataaaggggaaagtctcgggcgctacattcgcgagcgtaaactgctgctggcagcgcgcgacctgcgcgataccgatcagcgggtttatgatatctgcctgaaatacggctttgattcgcagcagacctttacccgtatttttacccgtaccttcaatcagccgccgggcgcgtatcgcaaagagaaccacagccgtgcgcactga

SEQ ID NO: 102095 - DNA, 249 bp, Enterobacter aerogenes
atgaaacacccgctggaaacgctgttatccgccgccggcattttgctgttagccctgatctcatgcttattgctgccggcgccctcgctcggcctgacgctggcgcaaaaactggtcacatccttccacctgatggatctcaaccagctctataccttgatcttctgcctgtggttcttagcgctgggggtagttgagtatctggtattgcgctggatatggcgccgctggttctcgctggcagattaa

SEQ ID NO: 102096 - DNA, 2724 bp, Enterobacter aerogenes; identical to SEQ ID NO: 95243

SEQ ID NO: 102097 - DNA, 729 bp, Enterobacter aerogenes
atgttattacgccgcctgctccctcttgcgcttcttcccttcaccgcctttacccatgctgcctgtacgctcaccgacccaacgctgaccttgcaaagctatacggttaatccgcagcaagagcgcatcgtgatgtactggcaaaagcaaaatggcaaagcctggggatcgctacgctcgctgcttgcggatatcaataaagacgaccgcgtccagatggcgatgaacggcgggatatacgataaggcctacgaaccgctgggcttgtatatcgaaaatggcgagcagataaagcccctcaaccgcgcctccggcggcggcaactttttcattcgccccggcggcgtattctggctgaagggccagcgggcgggaataacgcctatcaataaatttaagccatcgcctgagataacctacgccgtgcagtccgggccaatgctgattgaaaacggcgccatcaactggcggctgaagccctccgccagctcgcgcaaactgcgcaacggcgtcggcattgataagcagggacgggtggtatttatgcttagcgagcgcgaaaccaatttctacgatttcgcctgttacgcacagtccaaactccacgtgcgccagatgctctacctcgacggtacgatttcaaaaatgtatcaaaagggcggcagcataccgtggcaataccatccgttcgtcaccatgatcgcggtggaaacccaaaaacctggctaa

SEQ ID NO: 102098 - DNA, 1116 bp, Enterobacter aerogenes
atgacgctacccgattttcacgtttcagcgccttttacgcttggtattgagctggagttacaggtcgtcaacccgccgggatacgacctcagccaggatgcctccacgctgattgccgatgtgcaaagtgaactaacgacgggagaggctaaacacgacatcaccgaaagcatgctggagatagccaccggcatctgtcgcgatattagccacgccaccgcacagctcggcgccatccatcaggcggtacagcgcgccgctctccgtcaccatctgcagatctgcggaggcggatcgcaccctttccacgcctggcagcgccagcaaatcagcgataatccgcgctatgtgaaaaccgtcgagcacttcggctatctggcaaagcaggcgacggtatttggccagcacgttcacgtcggctgtcaaagcggcgatgacgccatctatttgcttcacgggctgtcacgctttgtaccgcactttattgccctcaacgccgcctcgccgtggttcgacagcaccgacagccgctttgcctgttcgcgtctgaatcgtttctcttcctatcctgataacgggccgatgccgtgggttgagaactggcaggcctttcagcgtttattccgccgcctgagctacaccagcatgatcgacagcatgaaggatctgcactgggatattcgcccgagcccggttttcggtaccgtcgaggtgcgggtgatggatacgccgctgacgataggccaggcggtgaatatcgccggatttatccagacgctagcctgttggctgttaagcgaacggccgtttaaacatcagccggaggattacctcctctaccctttcaaccgctatcaggcctgtcgttacggcctcgacggggtgataaccgatgtctggtccggcgaacaacaaagcatccgcgcgaacattctacagttagccgacagactggcgccctttgcccataaggtgcacgccagcgcggcgctggaatcggttgtgcgccaggccaggtccaccatcagcgaagcgcagcagatgcgcgaattcatcgccaacggcggttcgctgatcggcctggtacaaaagcattgcgagatttgggcggcataa

SEQ ID NO: 102099 - DNA, 582 bp, Enterobacter aerogenes
atggataatacctctggagattttccatgtaataagatggacacgcgtaagcagttaccgctaacaccaagtcaacaggggtttttattccattccttaaaggataagaaaaggagtaactaccatgagcattttacatgcattttttctcagcatgtagatagcgcccacttcaagtgggcgctggaaacgttatttcgaaagcatgagtgttttcgcactgattataactgggagattgatgagcgcccttgtcaggtggtgaagaccgatgtgttgccggatatatatgtgttagactgtgagcaagaggaaatacgttttctactagctaatgatgacattatcattcctgtcccgcaggatgacggtattgatgctataattcctcaactgctacaggctgatttaaaatacccattttccttgaaaacgatcccagtccgggcctaccttattcagtcaacgaaagaaagtgcttttatactatcataccatcatattgtgatggatggctggagcttatcccttttcaaaaacagttgctccaactctatggagcggctgtggtcagtggtgtga

SEQ ID NO: 102100 - DNA, 594 bp, Enterobacter aerogenes
atgaacggaaaatataccctgatttatgcggatccgccgtggacataccgcgataaagccaatgatgggaaacgcggcgccgggcataaataccagaccatgaccctactggatatctgccgtttgcgcgtcatatgccccattcccataactagcttgtcagtctgccggcttccgcacttattccaggtgaatcccttcatcgtcataagacggaagccccacgcctcgaccactttcagtgcctcgatcggcatcgttggtacccaccacatagccagcaggcagttttcggcggctagttcccacacgcgcgcaaacagcgaagattgcttgtttgctgtgaaggggaatcttccttcccggctggatgccgggatcatccagtctttcaccgcgccgcggctcgagcattctagaaaacccgactgcgtgcgcgaaatgctggtgcagctgctgggcgacgttccccgtattgagttattcgcgcggcagtcgtcgcacggttttgatgtttggggtaatcagtgtgaatcgcctgcggtggcattgctgcctggatttgcggaatatattgtgaatgcgtgcgtataa

SEQ ID NO: 102101 - DNA, 711 bp, Enterobacter aerogenes
atgccgagaaaaaacagattatttattccggggatgccgcatctggcgcagcttcgcgggcataatggcgaggagttattccgccacgaggaggattactctgccttcgaacggtgtatgcaagacgcggcgcaacgttacgccgtgtctattcatagttggtcacttgccgtcccacgtatcctgctgctggtcagcgctccggataaacaggcgctgagccgttttattcagcatatcggacgcagctatgtgccttattacaatcgtcgttaccaacggcatggcgcattgtgggacagccgctacttatgcagtcccctggaaccagaaacctatttcctggccgtgaagcgctttattgaatgtgacgaggacgggagcccggggtgccatagtcacggtaatcagccttcaggtttgatagtcccccatcctgtctggctcaagctcggtgagaatgagcaacagcgacaggcccacttccaggaattctgccggcaaccggtaaatcgggcgctggtgaccaggattcgccatgcgctggcgcaaaattgcctgctcgcctcgccagcgttgagccagcaacttgaagcccagatggaaaggccgctgcgggcacgacattgcggccgcccgcgtaaatatgaatcctctccatcagaacagtggacctggctggaacttcaggctgaacagtttctgcgctag

SEQ ID NO: 102102 - DNA, 1902 bp, Enterobacter aerogenes
atgggcatggctgacattgccgaagtcctgtggcgtgatttcctgaaccataacccgcagaacccgtcctgggccgatcgcgaccgcttcgtgctgtccaacggtcacggctccatgctgatttacagcctgctgcacctcaccggttatgatctgccgattgaagaactgaaaaacttccgtcagctgcactccaagactccgggccacccggaagtcggctacaccgcaggcgtggaaaccaccaccggcccgctgggccaggggatcgctaacgcagtcggtatggctatcgcggaaaaaacgctggcggcgcagtttaaccgtccaggacacgacatcgtcgatcacttcacctacgccttcatgggcgacggctgcatgatggaaggcatttctcacgaagtgtgctccctggccggtaccctgaaactgggtaaactggtggcgttctatgatgacaacggcatctccatcgatggtcacgttgaaggctggttcaccgacgataccgcgaaacgctttgaagcctacggctggcacgtggtgcgcggcgttgacggtcacgacgctgacgccatcaaacgcgcggtagaagaagcgcgcgcggtcaccgacaaaccgtccctgctgatgtgcaaaaccatcatcggcttcggttcgccgaacaaagcaggcactcatgattcccacggcgcgccgctgggcgacgcggaaatcgcgctgacccgcgaagcgctgggctggaaatacgctccgtttgaaatcccgtctgacatctatgcgcagtgggatgcgaaagaagccggccaggcgaaagaagccgcgtggaacgacaagtttgccgcctacgccaaagctttcccgcaggaagcggctgaattcacccgccgtatgaaaggcgaaatgccgtctgacttcgacgcgaaagctaacgagttcatcgctaagctgcaggcgaatccggcgaagatcgccagccgtaaagcatcgcagaacgccatcgaagcgtttggcccgctgctgccggaattcctcggcggttctgccgacctggcgccgtccaacctgaccctgtggtccggctctaagccgatcaacgaagacaccgccggtaactacatccattacggcgtacgtgaattcggtatgaccgcgattgccaacggtatttcgctgcacggcggtttcctgccgtacacctctaccttcctgatgttcgtggaatatgcgcgtaacgcggtacgtatggcggcgctgatgaaacagcgtcaggtgatggtctacacccacgactccatcggtctgggcgaagatggcccgactcaccagccggtagagcaggtcgcttccctgcgcgtcacgccgaacatgtccacctggcgtccgtgtgaccaggttgaatccgcgattgcgtggaaatatggcgtagagcgtcaggacggcccgaccgcgctgatcctctcccgtcagaacctggcgcagcaggagcgtaccgcagagcaactggcaaacgtggcccgcggcggttatgtgctgaaagattgcgccggccagccggaactgatcttcatcgccaccggttcagaagtggaactggcggttgccgcgtgggacaaactgaccgctgaaggcgtgaaggcgcgcgtggtctccatgccgtccaccgacgcgttcgacaagcaggatgcggcctatcgtgaatccgtactgccgaaagccgtttctgcccgcgtagcggtagaagccggtatcgcggactactggttcaaatacgttggcctgaacggcgctatcgttggcatgaccaccttcggtgagtctgcgccggcagagcagctgtttgaagagttcggcttcaccgttgacaacgttgtcgccaaagcgaaagcactgctgtaa

SEQ ID NO: 102103 - DNA, 603 bp, Enterobacter aerogenes
atgtcgaaccaccgcgagtttcccggaggcggcgcgttgcgccttctccgggctaacaaatcccacagcgctgtagatactgttatcgatttgcaactgttttggtccgggaaaaacagttgttttttattatttcagagcacattgcgatcccgaaatgtcttctgcgttatgtctatcatggcgcagggagcgcacaaagggcggccagtcgccgccgccctctgtactcccgggctctggccgccaaaatcgccacttcgtggtgccttcgacttatcccggcaggcttcgggtcgggccgaggcagcgtccgtgcaaaacacggccctcagcccgcatccatgcgggctgccccggccttccgggaacgtctcagcgattttgaggccaccaacaccggcagtttcagtcagcatggtgaataaattaaaggcaggccgcacgaaccgtaggtcggataagcgtagcgccatccgacaaaaaatcagtagcgcacgcacaccgatttggtttcgcaccagtcgtccagccagtccggaccaaaatcgcgcccggtaccggactgcttcattccgccgaacggcaggttggcatcgataa

SEQ ID NO: 102104 - DNA, 669 bp, Enterobacter aerogenes
atgaatgctgcattccaatcaatctgctacaacatttcccgtactacatccttaaaacgatctcatatccacgaggtcattgctgctctattgggctatgccagccatgcggcaatggttgaggatgacaagaacccacagcgtgaatatagtcttgcggatgcagaatatatcattctgaatgtaccccaaggcatggaaagagcgcagaagtttaacgtgtcagatgaaggttttggtgtctttatctcagagttaaagtccggattacctatgaaagtatctgaatcagtggatgatttttatgatgaccatattcgagaaattctggaagaagcgatataccaagatgcagcagagtctggggaaatggctgaaagtaatgctgactttcctgattatcccgatatggattatgaccttgtaaccagtggtaatctctggacttcagttgacgaatggtcaattgcagatactggtacgctctcaggtgaatacgatcctgagggggataggatgtacaacgggcatttgcttaacgttcaaggtaagttaacctttgcgaaggcagggcgtgcagggctacttttattggatgacatcacggagtgctctacctcacgtgactattcatggttggatgatgaaccattagatattgaggattaa

SEQ ID NO: 102105 - DNA, 222 bp, Enterobacter aerogenes
atgaatagaaaatttattggccttaccatgggaatgctggcgctactgccagccctggcgaatgccacacagattacgatgaccaatccacaggaggagcagacagagaacggaaaaacgctctgcatctatgaggacagcatttacctgtttacattggtgacacgctcacagacctgcccgtattcaaagacgttcgacacagaggataatgataagtaa

SEQ ID NO: 102106 - DNA, 2004 bp, Enterobacter aerogenes
atgaaaattaaaatatcgaagggtgattataaaagagtacttctcacggatattttaccatatgaagtccctatccttttttctaacgaaggtttctataagttaatttctgaaaataaagttttacccggaacattttcagaaggccttaagctggattcttataccatcccttactcctataaaataaaaaaggggctggcgagctctcgaagccttggcattatacatccttcaacgcagttaagaatctgtgatttttatgataagtatgaacatttgatggttcatatgtgtacaaaaagtccgttttcgctacgttatcctagcaaaatagggagctattattacgaaaaggacttcttaaaaagtagaataaatctaaaagatggtcttgtacaatttcataatcatggctttgattcccaggaaacttcctcatcttcccatttttcatataagaaatatcctttcatctataagttttatgagtcatatgaatttcatagattggaaaggaagtttagaaaacttttaaagcttgatattgctaagtgttttagtcatatatatacacacagcgtttcatgggctgtaaaatctaaagaattctctaaggttaatagaacttataacagctttgaaggttgtttggataagctttttcaagatgccaattatggtgaaacaaatggcataataattggacctgaattttcaaggatatttgcggagattatattacagcgcgttgacctgaatgttgagtctcatttgaattttgagccaggcatagttaaagataaaagctatgctataagacgttacgttgatgattattttatatttgcggatgatgatgaaacatttaagctaatagaatttgtactggcaaatgaactcgaaaaatataagctttatttgaatgaatctaaaaaggaatttatcgagaggccattcgtgactggagctacaatggctaaaaatgatattgcagaaatcattgaggatttatatggatcgttaatccatactgagaagttggatgagttaacagctatggttaatttaaatccagacgtcaaaattcagcctgaacatatgaatgaccttttcccattgaaaggtgtgtggaataaaaagctacacgcggacaaatttataaaaagaataaaaattgcggttaaaaaaaacaataccacatttgatcttgtcagctcatacttaataagtgcgattaagagtaagtttttcaaagtaattaggctgttgaggatgtttgatctgtcaggaaaagaagatataacttataaattcttctcaatattcaatgaggtgattttttttatttatgctatggattttcgagtccgacagacatacataattagccaagttattttggaaataaattcatttgctaataagcaagcttcagacattagtgaagttataaaaaagaatacttttgatgagcttcttatgtgcatgaaaagcatgggtaatattcatgagaggccagtggagttatctaatttacttatatgtatgaaaggtttgggggagcagtataaactcaatccagatgaatttaaggatttgttaggtattagtgagaatgagtgtttttacgatttagaatatttttctatatgcagcatgttacactatataggcgatgatgttctctatctaaaaatgaaagaagagattgtcctggctatacagagtttgataagtggtcggaacgacataaaaaaagacactgaaacatttatgctattccttgatatgatgacgtgcccatatcttacagttaagcataaaagaataatttatagaacatatgtcgaagcaaatacaggtcaaaaaagatttacgaatgcagtaattgattctgaaattgattctttaaaaaataatgtaatcttttttaactggtctggagatgctgatcttgagcacgttctttataaaaaagagttgcgaacagcatatgaatag

SEQ ID NO: 102107 - DNA, 1197 bp, Enterobacter aerogenes
atgttaaatcagtcattttccgtttcgaacttaattaagcttttaaaaaaaaccgatccaaaaagatacaaaattggtaggaattcagctgaatataaaaaatatatagctgataaagttaatggctcaattgaaacatactcatttggttcgatctcaaattcaagaattaacaacaaaaatgtgtatatatttaaagattttatggatgtacttgtcgccaggaaaataaatgataacattaagcgtgtgtatagtgttaaacaaaacaacagacatgacatcataaaaaaagtaaatacagtgttaagtgagcctgtaaattattatatttacaggttggatattaagagtttttatgaatcaatagataaaaacatcgttttccaaagaattaataataacccgattgtttctcataatactaaaaaatttatcaatggtctttttaaacataacgctttctctgcaaataacggacttccccgtggcatgggattaagtgcgactttatcagaaatatttatggaggaatttgatgctgagttggcgaggctgcctgaagtattttatgcatcaagatatgtggatgatatcatagttttttcattctataaaataccagattataaaaattatttttcaaggattttaccaaatggattacatttaaatgaaagaaagtgcagtgagtataccatagaggacacttcaactaaacattctgaaattgagtttttgggatattcatttattatacaccatggattaaaaaatcagcgtcgtcatgttgcgatcagaatctcggaggagaaaataaagaaaataaaaagaaggattgcacttgcggtaaaagattactcaaataattctgatgcagaactcttgaaaaaaagaataaagtatttaactggtaatatattagtaaactccaatagtaataaaactgatgctttatatagtggaatttattacaattatcagcatataactgataaaacacagctcaaggagcttgatatatttaagaataggatgctattttcttcaaagggcgaggtggggagaaaaattttagcagcaggtcacaacttattatctgcgcctaaaaaatactcatttttggctggttttgaaaaacggctactgtcttcttttaaacgggaagatattattaaaataaataaagtttggtga

SEQ ID NO: 102108 - DNA, 423 bp, Enterobacter aerogenes
gtgggtgagattaaaccgctagagctgctgaacgtactgcgtaaaattgataaacgtggtgcgttggagaaaatgcagaaagtgcgtcagcgttgctctgaagtgtttcgctacgcaattgcaacgggtagagcggagtacaatcctgcggcagatctttccagcgctctcgaagtacaccaatccaatcatttcccgttcctaaaagctgatgagatactcgaatttctgcgtgccttagagagttacaccgggagtaagcttgtccagatagcagcgaaattactgatgattacgggcgtgagaaccatcgaattacgcgcggcattatggcaagaatttgatctggataacgctatttgggaaattcctgctgaaaggatgaaaatgcgcagaccgcatcttgtgccattgtcgacctaa

SEQ ID NO: 102109 - DNA, 993 bp, Enterobacter aerogenes
atgtctaaagttgttacctttaaccgtaccggtggtccggaagtgctggaagtagttgatgtggaggtgcccgcaccagcagcgggtgaagttcagattcgcgtacacgctattgggcttaaccgtgcagaaatcatgtaccgcaacggtcagtatgtcattgagccggaatttccggcacgcctgggatacgaggcctcgggtgtagtgcaggccgttggtgagcatgttgaagggtttgttaacggagatcgggtcagcgttatcccttcgtttatgtttaatgaatacggcatgtatggcgaactggtcaatgctccggtaaatgctgtggtgaagcatcctgaaaatctttccttcgaggaagcagcggcaagctggatgatgtatgtcactgcatatggcgcgctggttgaatatggcaaccttcaggctggtcagaatgttgttatccgtgcagcatcaagcagtgtaggcctggctgccatacaggtagctaacatgctgggtgctaaacccattgcgcttacccggactgccgaaaaaagcgaaatgcttcttaaagcgggcgccgccaaagttatagctactgctgagcaggatatagttgcggaaatcaatcatgcgacagatggcatgggtgcgcatattgtttttgatcctgtcggtggtccggaggtggcaaagctgacccaggtgatggcaccgcaaggtatgttcttccagtacggcgcgctagacagccgcgacatgcttgtgcctgtctttgatattctcggtaagcatctcacgctccgtggatacgagctgtttgaaatcacgacggacccagaaaaaatggcacgcgcaaaatccttcgtcaccgaagggttacgttccggcaaactgaaacctgtcattgataaaacattcccgcttcaggatattgcagatgcacagcgctatatggaagcaaatggacaggttggcaaaatcgtcgtagtagttgggtaa

SEQ ID NO: 102110 - DNA, 876 bp, Enterobacter aerogenes
atgatttcacaacacaactggcaggcaccggccattaatcgaaaaaaagtgggcgatatgactgtgactatgcttagtgatggttatctggacgtatcttttgagttgttgtctggtattgatggctcccgggcggaggagttactccagaagcgtggtgcatctgcattgcctcgtattaatatcaacgtatatgttattcagacccctgagcgcactatcctggtagacagcggtgctggcggtatcaatgggtggggcggtcggcttcaggttgctctggccgctgccggtattgacccgctcgctatcgataccattttactgacacacgcacacccggatcatattggtggtcttgccgctcctctccagactccagtgttccgtaatgtccaacagctttttgtacatgaaaaggaactcgctttctggcgcgatgaaactatttcagccagcgcacctgatgcgttcaggccgttctttgaggtagctaaaaacgcttttaacgcgtacgacgacaaactggtacctttccgtgaggaagccatcctgccggggatccagaccgttgaactgtttggtcacacaccgggccacagcggatatctgctgggtgatgaaaaagaatctctgctcatctggggcgatatcgttcatttcccgcatgtccaggtcgctcagcctgatgtcactatcgccttcgacagcgatcctgtggccgctgctgccgtccgtggcagactgcttgagcgtgccgcgagtgataatctggccgttagcggaatgcattttaacctgccaaccactggtaagattgtacgagatggtagcagctttaaattgaactatgatctctggtcaccagtagtgtaa

SEQ ID NO: 102111 - DNA, 627 bp, Enterobacter aerogenes
atgtctttaacggccctgatggcttttgccctgattatgtctgccggtatcgttactcccggcccgaccgttctgcttgctctcaataatgcggtcagctttggtatcagacgggcaacatgggggattatgggcgcagcagcagcggatatcctgctggtagcgctggtcggtttgggacttggcgttgttctggctgcttcggaaacgctttttgttaccctgaagtgggtcggtgctgcatggcttgcttatatcggctttcggatgttgctctcttcgaacacttctttacctggtggcatggaggaaacggctccggcgcgccgttcgctttttctcaaaagcttctttgtcgccatgagcaatcctaaatactacatcttcatgaccgcattgctccctcagttcgtcaataccgcgcagccagccttgccgcagtatgccagcctggcggcggtaatagttttaatcgatgtggcggtgatgctgggctatgcgattttgggtaagaaatctgtcagcctgtggaaagccagcggcatcaaatggatgaaccgtatcagcggatcatttctcttaattctggcgggttcggttgctttgtatcgtaaaagcagcacctaa

SEQ ID NO: 102112 - DNA, 2328 bp, Enterobacter aerogenes
atgtctgagaaagcaggcgagatttattacgacatcgaggccgatgtttctggcttgctgaaggcgcagggaaaagccaataagtcactcgactcaatcggcagctctgctacgaacgcagccaaaaagatggatgagctgcagactaaaatcaaccgagtggcaggtgctattgcggcatcactcgttgttgactggggcaaggcgttcctcgttgccgctgacaatatgagtcagcttaacgctcgcattgaacgcctgacaggcagcgctgcggctgcatcacagacgatgcagaacctgatgcgtatcagttcgtcgacgggaggttcgctgcaggacaccaccaagttgtgggaaaccctcagcactgcactacgcgataccggcgcgacgaacggccagatcattcagctcacagaaacacttcagaaaatcgggcgcatcggcggatcctcatccgaagaaatggcgaatgctcttcgtcagttcggacagtcaatttcatccggcacagtccgggcggaggagttcaactccattctcgagcaaatgccggaactggcgcgtcagattgcagccgggatgggtgtaagcatcggagaacttcgccagttgatgctggacgggaagctttcggcagaagatgcactaaacgcgatccagaaacaaaccggttcagtgaatgctgagttcgagaaactcccgcgtacgctttctcaggctaacactgcactcaccaactcattcctgtcgatgatcgactccgttaaccaggcgacaggtgcaagctctggtatggtggctgtgattgattcattgacggctgcactcgataggttggcagggaaggcaatttctgcagatgctcagatcgctgatctaaacagcactgctgagatgtttacgcgccgggcccgcacctggtcatggcttgggctcgacggatgggaggcgcaaaacaaagcgctggctgggttaagcaataaagccgccatgctggttggcgatctggctgctgtaaccaaagcatcacagaccgccgccaataccaagcccattgaaataaagaccactgcaacgactactgggagcaaatcgaaaggcggagcgtcagcagctcagaaagaggcggagcaatacgctaaagcgcaggagactgttaaccaaaaactggatgagttgcggcagaaagcagagctgtcagccgggagtgttggtgagctatctcgagctcaggccgtgcttaatgcacagcaatcactcggtaacacagccacgcaggaacaacttctgctggccgggcaattggcaggtaaagcctgggacaatgccaacgcattgcgtgagcaggctaaggctgaacgggagcgtactgaggctgccaataagttcagtaccattcagggaaaaaccagcaaaactgctggcctggacagccaataccagaaagacatcgccgacatagatcaatatgcccaactttacccgcagaagataggtgaggcagaggcggcgcgtgcggctatcgaacagcaataccgggatcagcgtaatgcggcgatgtgggaagagtgggcgcagcagaatgcggcgacgcaagctgcagctgcggctttcgattctcttggctccgtcgccagtaacgcgctgaccggaattgtcaccggaagtatgtcggccaacgacgcaatgcgcagtatcggaatgacagtgttgaacagcgtgattaactcattcgtccaaatgggcattgagtgggttaagtctgccatcttaggacagtccgccactactgctgcagtagctgcatcaaccacagcacaggttgccggtattaccacgcagacagcagccagtacagcagcggcggccacgaccacggcggcatggacaccggcggccatcatgtcgtctatcgcgtcgtggggcgcggcagtggcaattggtgtcggggctatggctggggtcatggcgctggccggcaaacgcaagaacggcggccctgtatctgcaggtggaatgtatcaggtcggtgaaggtgggatgccggagatttaccaggccagcactggtaagcagtacatgatccctggcgataatggcagggtgatcagcaacaaggaaatgaatgcgggaggtggtggcggagtggtgataaatatccagaactactcgtcttcatctgtcgatgcgcaggctggtactgacgctaatggtggagtgacagtggatgtaatcgtcgctgacctgaataacggtgggcctatcagtaacgccataacaagcaacatgaacgtgaaacgtacgccaagagggcagggctga

SEQ ID NO: 102113 - DNA, 375 bp, Enterobacter aerogenes
gtgaaaaaattactgttgactttggtgattccactggttctgtctggctgtaagcctggcgaggaaaaggccatatctctggcgaaatctgaggttgcggcaaatcttaaagacccggccagcgcgcagttcaggaacgtaaaagtatcaaagatgactgatgccgaagatggtcatgtcatcgctgttgtctgtggtgagattaacggtaagaacggtttcggtgcctatgcggggtttcatccgttcttcgttgagctgaacatgaaatcgaaagggatcttctcgaaaggcgtcgattatacgcttggggagcatttcctcagttcgcgtgacactacgccaccgccagcctacgccgagcgatgccagtaa

SEQ ID NO: 102114 - DNA, 384 bp, Enterobacter aerogenes
atgacaccagccatgtacgagcgcgtgcgtaattattttgttgatgccgggcttgccactggcttcatcgtacagttgctggcttgggacgacacagcgaagttaaccgacgcattcatcgtgttccggccgaacggcggtaccgacattcgaaatgacctcggttctgaccactacgtgctggtggatgtcatttccgccaaggataaacgccgcgcagccgctgagaaggctcaggaaatcatcaattatgtcgaacagaacgacattacccacgaatgccttggcctgatccaaaacctcggcaatatgcctgcacctatcctgaccgaagaaggccgcctggtcttcagacttcagttcatgtgcgtttacggcgaataa

SEQ ID NO: 102115 - DNA, 369 bp, Enterobacter aerogenes
atgggcatcaaagtgcgcggcgttaagcagtcgaaaaccgggctcaaccgcatcattaacgacgtgaaaggacgaaagatcgtcagggcgctgcagtcagcaatgataatcggcagctcccaggccgcactttatacgccgatcgacacctcaacgctgcttaatagccagtatcgggagttgattaacaacggcgttcggctgacaggtcgggtgggatacaccgcgaactacgctgtgttcgttcacgatccgaatgttcctcaaaccttccgccgcgcaaccgcgcagaaagagttcctcaccaaaggatttgaggatacccgcagccagattgatgccgtaatgcgtaaggagctttcagtatga

SEQ ID NO: 102116 - DNA, 246 bp, Enterobacter aerogenes
atgaaaacgttaaaggtcgagaaaaccggctgctggggaatgattgatggcatcttccagcaacttcctgttggccacgaattcgttgcggcagatattcctgcagcttttgctggtcgtgtgtcggtggttggcgaagtggaagagcgcgtacttgaagtcgcctctcctggctctgatgctgaagagcagccggagcagccggagcagccggacaccaccgctaaatcgaaaaagggtaaataa

SEQ ID NO: 102117 - DNA, 204 bp, Enterobacter aerogenes
atgcaatataaagttattttccatgcctttattgaaggcaaaaaacaaaatctcgatgctgtcttcgaatcagataaagaaccaaagctcaccgataaagaagtaataaaagctgtgatgcatgccctctctgaagttgttgatgtagacgcgccaatattttcaattgagttccacatcgaagctattgttccgctaatttag

SEQ ID NO: 102118 - DNA, 225 bp, Enterobacter aerogenes
atgactgtacgtgcaaaattcgcctgtcactttattcagaagccagacgatgattcattccgtgtaattcatctgagtgcggtaacttccgactcagcagaaaacaaatcctggtcgaagtacacccctgcaggtgatatcaaattgcatgttagcaatccggatgcatttgaacagtttgaacagggtaaagaatactttatcgacatcagttcggctgagtaa

SEQ ID NO: 102119 - DNA, 273 bp, Enterobacter aerogenes
gtgagtaaccaggacatccgaacccacaccgaacgtcttgagaaggttatcgagcaaggcgttgagctgcgtgatgagatgcgcaggaaaatagcgaaccttgagaggatagtcggcgcccagagggttgaaatcctcaatgctactcgcgcaaaggagctatatcagcgccggctcatcaactacaagcgcactttggtagctgaacgggagaagcggcagaagttggaaggccagattatcaagcttaagcggagggttggcgatgcctaa

SEQ ID NO: 102120 - DNA, 273 bp, Enterobacter aerogenes
atgagcaagtcatacatcgtgattctgcaatacctttggtgcaacgaaactggcggaggtattgaatacacctctgactgcgtcaaatttgataagcgcgatgaggctatcaggcacggatttaagctgcgtgacagcgacgatttcaacatcggcgttatcgaggacggcaagttgatttcgtttgattggatggataagccggtcggtgaaagcgaagacacgctggcacagattgccgagctaattggtctggaggatagcgatgactga

SEQ ID NO: 102121 - DNA, 3450 bp, Enterobacter aerogenes
atgcatcgagctatcgatgcctttctcgcttataacgagcgtgagaaggcaattgtagaaccagtcgcacaatggctcaccaaccatagggtgcagacacatttctttgcgcgcgatacgcagtatggggagcctgtcgacgacaccggaaacctagacgatgccgcaacagtgattgcatttctcggtagcgagggctggggtaagaaccacctacggcttgtcgagcgggcgctaaaattgaacaaacccgttttccctgtcctcatcggcgatgccagtcccgatgaccacaacatggcgcaggggttgtttattaattttaaatggctcgacttgcgaatgggagatctagagccgcttgaaaagcttttgccatcgatactcgaggtgtcggaccagtatgatccggacatcaatacggagatcggcgtgctgatctccggccccgacaatcgcagacaggtggcgctcaataggcttattgatcgagccaagagcaagcgcgagccgatctcggccgggttacggaaagagctggcgcgtcgtggatccaacgggccaagattattgtctccaaatgagtcgccttccgactcggatgctgaagcacgcagctggctgcgtgtggccctaatccaatgtgatcccgagagtccgcagacgcgcgatatcgccctgcgtgacataatgccggatgccgagccagcagaattcgcaagattctggagtcttgcggcagcgcaacaagcgaatgcgtcgtatctccccgcccttgctgaaaaggctgcagtggatccgaccactagcgtcagttttgctggtgttgcgatgttgaatccgaattctcccaaagtgtcgccactttttagagccgcgttgcgcaatgatgatcattggacaactcgcggtgtgctgcgtgccttgcggattgtccacgttcccgaagtcatcagtgatgtctgcttactcgcggctgaccacaaccgggcggaagtgccgatgtacgatgtattctgtgcgctagccacccccagggctgctgccctcgcggcaccactacttgccgaaacgcccggaatcgatgtagtcgttgatcgaatcatcgaagctgcatacgatgcaaaccactcggtcgtgcgcaatttctcatggttcctcacaacgctcgatgcgacacgctcccatgctatcctgaacgagcgttccagaaacccccaagttcgcgcagtagcgcaacgcttgctggaaggcatggactctgtatccgccatggcagagaaaccctaccatcttccaggcttcgctgccgatacgatcgatgaacagcacgaccagctgggtatacagaccgaggtgcaaacgctcgccgcgatcatgatggcgcgagatgtaacgcccccgctcgcgataggtctgttcggtgaatggggctccggtaagagctttttcatgtcgcagatgcgcaagacagtgaagacgctcgctcaacgtccgcagcagcagggcgcgtcaccgtattgttctagtgtcgttcaaatcactttcaatgcgtggcattacgccgagaccaatttgtgggccagcctggtcagcgctattttcgaaaagcttgccatccacattttcggaggcacgcctactgaacgtcagcaggcccagctgatcgccgaacttgcaagtgctaaggcggttacagaagaggttcgtgcggaagagagacgcgccagcgagcagttgaaggaagaggaagcccggcttgacgagctgcgcaagaagagactggccgaggaacagaagctcgcgaagttcaacccgacctacttgatcgacttgctcgaggacagcactctgaaaaaacaggccgaacaggcatttgaacaactggggctgcctgtagtgctcgaccgagttgatgatttcaagcacgctgtggcggacgcaggcaagctatcaagccaaaccgttgcattgctcacggtgttgtcggccaagggacgcagtccgctgtatctggcgttgttcgtcgcggcgctggcggtgcccgccgctggttatgctttctataactggctctcgcccgacaacaagctgttcacgacgctcggaaccatgttcgcgggcatcgcgacgttcgcgaccgcgggcattgagatcgtccgacgcggcatgaaagaggttaacgtaatcttggaacccgtcatggaagcaaggaaaaaggctgacgcggaacttgagaagatccggaagaagcctgcggatgccgaactggcactcgcggccaacgtcgaggtattaaaggtgaaggagcaggatgcgcgacgccgcgtggccgacgctgctgcacgcgtggccgccaccgaagaacgcctgcgcgaactggaggaaagccgcgatctagcccgcttcattgccgaccgccacgattcggcagattatcgcaaacacttgggcctcgtgtccctcgtgcgtcaagatttcgaagcgctttcggagcggattcgggagcacggaacggcggctgatggcgggcgcaaagtcgaacgcatcgtcctgtacatcgacgatttggaccgctgcccggcctcgcaggttgtcaacgtactgcaggccgtgcacctgctgctcgcgtacccgctattcgtcgtcgtggtcggcgtcgattcgcgttggcttactaattcactctccatgcactacaaagaactcggcgcggcgttcaccgaagcgcctgaggcagctgctagcccccagcactatctcgaaaagattttccagattccgtattcgctacgtccgatgagtgcggagggctacggcaagctagtgagagagctcacagcgggcggccagcgcatgcctgtgacgcagctacttaccccgtccggtccggcagacgtgaagccgtctactcccgcatccgccgcgattggatccgcgctcacttctgacgcaaacgtgaccgcaccgcagtcggcactggcaccagaatcagcagcggtcgaggagcgcgcactggtcattcatagctgggaggaatctttcgccgcgagcctttacccgttgatcccctccccacgagctgctaagcgcttggtcaatgtctatcgcgtgctgaaggcgagcgtcggaggtgcccagctgcaggcgtttgagggcactgagacagagccaggccagttccagattccgttgcttttactagccatacagatctgtgatgcctcgacggcgacggcttggttcgctgaccttatggccgagcaggggcagcgtaattccccggaggaggccttcatacgtactgccactgcggacgcccgcaagcggctgatggagcgaatcaagtacatcttcatggaggccggattcccgaaggatgccaccttgctgacgaactggatcccgctagttagccgttttacgttcgagacgcgctctatagtctga

SEQ ID NO: 102122 - DNA, 1731 bp, Enterobacter aerogenes
atgaaactcgtcgttatgcactatctgcgctcgctacgcgagcgtgacgaacttgacgctattcttcctgatcttttggctgagaatggtttcgaagttttaactcgtcctcgtcgtggcacaaggcaagctggtgtcgacgtagcggcagtcggccctgatcgtgatcgtgatggtactcggagtctgttcctattcacgatcaagtccggggatttaacacgagagcattgggataccggccagcaggccgtgcgtccgtcgctgaatgaggttttggatgactatatcccgaaccgcatcccgccccattttgcggatctgcccatcattatatgcgtttgcatgggcggcgagatgcgtgaggatgtccgggcccagtggagcggttactgtcgagtgaacgagaaagccaacattcactttgccgaatggaacggggatcgtctctcagatctgatcctaagcggtatgttgcgtgctgagttaattgagagcgagaatcgagggctatttcataaagcgctagctatgcttgatcagcccgaggtcgcttatcggcatttccgtcacttactcaatgtcattttcactgagacgaagaatcagacagagcgtacgcgtcagctacgcaaggcctacctgtgcctttggatactttttgtctgggctcgcgatgcagataatcttgaggccgcatatcgagcatcagaactagtacttctacgtagttggccttactgtgatattgcccgtctgcgtaagggaacgacgcaacacgagcggctagctcattttgatcaagttttgaagctgcactttatcatcgctcaccttctacttgtcgagaagattggccctttcgccgataagctctatgcgctttcaatggccgtaaattcacgcaacgcagtagatattaacatctcgctattcgagatattagggagattgtcacttcatgggctttggctggacgctatgggtggcgggcaggaggagtcattcgcacaagcaatgaatgaaagggcggacaaggtgctcaacatagcgattggtatgctgaatgcgaatccggcgcttgccgttcccgttcgtgacgatttcacgatcgaactagctctttttatgcgtctcgcaactttgcgtggccgcctatctaatgtcgctgactatatccgcagcatgtccgaccatctctgttatgggttgagtgctcggtgtcattatccgactccgacgacagaatatcgtgatgtcctctcccatccgagggaccgcagcgatgcatacttcgaagagcatacgcgtgcggggattctttacaccttcgtgcttgcttggctggctatgataggcgatcaggagcgagcagagcatttgcgccgcacgttgttagagcacgctccacacatgactcaccaaatttggattccagacggacgaacggatgacgttttctgggggggggatcgggaccacggattgtcggtgcctggcttgccactcaacgattcgctagatgcagtttttagcctattgaaccgtgtgatgaaagagcatccgctggatgagcgaataagtgccgttcgaaatcacctgacgccaatttttcttatggcctgccgccactatcgcatgcctgtaccacctcatatatggcaaggtcagaagagtgcaccaccagacagcaccgcttccgatcaagcaacaccggatgctgagatatag

SEQ ID NO: 102123 - DNA, 1719 bp, Enterobacter aerogenes
atggcaacaaaggagataccgatagacaaagtaaaactggctacgcagctccgcactcgcggcttagttcagacagttgcggacggagggtatcggcgcttggatgagagccattctgcattgatcgagacgcttgcaactatattgaacgctactgatgcgccaccgattgaccttcatatcgaagaagcgctgtcggagttgaagggaccacgtttcttccttgtccagcattttctatgcgatctgataccccatttgaacctagatcaggatgttctccttgattttatcacgcgtctgcttgatgcaggtggtaatgatctggcggcaggggccccgagtactgcatttggggaatggacgaaaaagaatccaatcagatcttccaaggtctacgaagcggtacatgctggcgataacttagctctgcgtcaactattcacggttctcgtaatgaacgccgaaatagaaaaaggcatcatctttgcgcaggctcaggagcgggaggctaagcttgcagccctctcggctttgggggccatggaacttggtgaacgctacggtgaggtgctcgacatcctgctccaggcagcgtccagcgatgatgaagacatcgcactcaggtccttggaagcgggctatcgggctgctgcacagcgaaaaatagttgcaccggtcggttttgacgaacaacttgaccggatccttcagacgaggagtcccttctcgatccacttggcagtggacctgttgtggcttcaccgggttggtctcacagaaaatgctataaatctatgccttgatgccgctgcggatgttgactcagataatgtaggaacgatttcacatctcagccatgcagcatatcaactcgtgagtgatgggcatgctgaaaaagtgatttgtctgcttactgagttatttgaacgctcaggaggtcggattacgttagacgcgttcgagggcacctaccacgcgttgcaaaatgccggctctgaggtattggggaacgctgttgtgtactggctactgaacgggagcatgcatacccacaaatgcgtggctagcgaagtttgcggtgtcggaaatgacgatcctcccttctcaatctccgcgtcatcccttccaatggagccatcggagcaactatacctttgtcgcaaggccgtcgggtggttcttcattgatccagtggttgcagcggtcataccgttagcagtgcttcgcgacgggtcgtcagatatcaaaaatgatgtcctcgatctgatctatcatcccttgctcgtgagctatgggggcaagttgaaggactaccttgagtgttacgccgaaagcattccggaccttgctggattactcacacgaaagttagcatttcaggatgcgatggaaggtattgagcgtttagtcgagttgcaccctagtgaaatgcagcgtgagacggcacatatccaatggcacgagcagatggaacggggcattgagcaagggcgccggaaatctgtttttgaggacatcttccccaaacaatacatcctgtatggcagatcgtcattgacgccgatccacaccggacaggggggcacacatctcaccgagactgcgatgcattcattttcgatctcatcagagtaccccatactcgatattgttgacccagttggacttgagcatatgctcctccacttcaagcttgagcagcgaggaaagagatga

SEQ ID NO: 102124 - DNA, 420 bp, Enterobacter aerogenes
atgtccaggactcccgattcacggttacgcattgagggcttccgcaaagcagaggcttccctgaggcttgaaggaaaggaccccactggcacgccgctctacgagtccgttaaagcacgtattattttaggtgagctgacatatgagcaggggcgttcagagattcttgcatactacacaaaagcagataccgccgggcctgtgacagtgggagaaattctgacagaggaatttttaaaaccgctgaacatgtctggtgatgaattagcggaagctatgggtatttctcgacaagatgttaaagatattatctgcggtatgcgtcgtcttagcggtgatgaagcccgcgttcttgctgacatatttggtactgatgaggatttttggaacaatctgcagatattgcaagattcgaattaa

SEQ ID NO: 102125 - DNA, 174 bp, Enterobacter aerogenes
atgaaacataatcttctggttgtatttattttaatcagtttattggccctatgttcttgcgataaaaatgataaagattgtttatcaacgccaaataataaatttgatgaacataaatacgacaaatgtgctctacgtagtaataacaacccaagccccaaacgagaatggtaa

SEQ ID NO: 102126 - DNA, 1065 bp, Enterobacter aerogenes
gtgcctttgtttgcatctgccttcctcctgtttccaatcaggcctatacaatgccaagcattaccacttgctaaaacctattcattggctaaaatggttgacatgaaaattactatttgggaaggctgtgacctcacagttgcagctgcaattaaattatttgtagagcatagttctccgtactccatattttcacggaggtatccaatactgcgtctcatacaggaagttattgatccagcagtaactgcttatgtaaattccctgccaccaagtcataaagactacatttctggagcaaatctaggttttagtgaagtacttaaaaaagtgggtttaaacgtcgtagtacaggcacaaagacttcttttgcgtaatttcgttctgactttagatcaacaaacttctcttgataaatgctttaccgctacgattgagtctcttattgaattagtcagtgagtgcgcatccaagcggccgaagaaatcctctcctgcaaaaggagtaactataaattcacagcgtaaactcggtttttgcgagttctgcggtaaccagactgaatactctcactttattagtgaaatatcagaatatgctgctagcgatattgagtttaccgatcatgaaaaattggtccttagccatcgatattgctcgaaccataggcctagactgaccgatggtcaatggaatcccaagtacagacaaggaaagcgttcttccgaacagtttaataaagaactaataaggctgagacggcaatgcgctaaaccatgcaagactaacgccaattccggagatatgttaattgattactacttttctcattggatgcttagtcaaacttttaccccagcagatatttcagaaatccgtaatattgcacgacgtatgactgattctaagctctctgatattaagaaaaagatcctcgctttaaaacatcagggacttaatcaatctgaaattgcagatattctcacaaagattcatcgcatacctatgacacgccaagcagtatccaaggctttagtatctgttcgtgaagaattttatatttaa

SEQ ID NO: 102127 - DNA, 1383 bp, Enterobacter aerogenes
ttggcctctctgcgaccctctgcatataatcagcgcgaccgtgaagatggtggcccttttctaattattcagtctgctgagtcggaagagggggttgatgttttttttacagatgtacctccagaacaattctcctctgattctctgattgctctgttaatgaacatctgccctgataaaatgacaatttggccgattaatgttcgccaggacactgatgagtacctctctccaaaatatgacagacttgaacgcattgttatcacccgatctatagttgagccttatcctttacccgaatcagaggatgacgtagtcggccttctggaacagctacccgatggttttgcaaaagattatcgatttggcttaggccttctctgggaatatcggcacatttgtgatgctgtaacaagcagagatgatgtaagtgttctgattatacaggggggtgataaggctatcatagacccaccatttttcttgcttggcattaaacgttttaatcgtcttcgaagggaactcaactccattacttcccgataccagagagatgcgagaagtgaaaaaaaattccaaacttatcaatccattttacatgcggcagatcccgagcaatatcctgcattaataaagaagttacggtcaggtactatcgctgagaaaacaaatggtgggcgtgataatacagcactagggcctcaagatagacgtgccgttgttcaactggtgaaagataatgttaaggccttagctaaaactgaatctcgctctttgctagcactgagaagtgatattgagcttgtcactctcgaccagctgatagctcgttacagtgaaatgcttggttgtaagcttactgaaagtaaatggcaaaacttttttatggacaatccatttattctgagccttgcctttgctattccagtttttttggtccaaggacaagcatatgctggaggaaaaaagttgaatgggcgcgagggaaaatataccgattttgtttatgcgtcagctgcctcgggtaaccttgctctggtagaaattaaaagacctgaaacggagcttttgagtaagaaaccctatcgaggtggtgatgtctatgctgcttccggagagttgagtggagcacttactcaattactcgatcagcgatttaaactacagatgacacttcctgtcctgaaaatggatgctaacctgaataatatccatggctttgctatacgctgtataattatagctggcgcatcacccactgaaaatgagcataagaaatcatttgaattggttcggaacgcattttctgaagtcgtggtcattacttttgatgaacttcttcaacgcttaattgaaataagaaaggcgctttctccaagttaa

SEQ ID NO: 102128 - DNA, 660 bp, Enterobacter aerogenes
atgttgcgcgtaattgataccgaaacaaccagctttgaaggcggcattgtggaaatcgccagcgtcgacattgaaagcggagcgatctgcaacccgatgagcgattttgtccgccctcctgaagcgattggttttgaggccatggccattcaccacatcaccgaagacatggtggctgacgctccgttcatcagtgaggtaatcggccgctacctgggtgccagcgtttatgtggctcataacgccgcattcgacaagggaaagcttccacagattgatgccccatggatttgcacgctgaagctggcgcggaagctttatccggagtttgaaagccatggcaaccagtacctgcgttaccgccttgggcttaaaccgacccttccggaagggctctacgcgcaccgcgcgctgtatgactgctatgtcaccgcggagctgctgatgtacatgggacgcgaggcgcagtggacgatccgcgagatgcgagagatatcggcaagcccctcccttctctaccggatgcgtttcggtaagcacaagggaaaaacctttgaagaagttgctgcagaggataagggctatctccgctggcttctcgggactgatctggacgaagacatggaattcaccgttaaacactggctgaaaggagcctga

SEQ ID NO: 102129 - DNA, 225 bp, Enterobacter aerogenes
atggggctgggtatggatatggagcgagacgaactactggaagaccgcgcagcgttcatcgctggagaaattggcggggcagttgtggagctaattattgagggcgtggtgattgaccgagacagcatcgttgacaagctggaggctaagcggcgcagtgtaggcaatgtcattcacaaggggttgctgcgtgacgcagcggagttcgcgaggaaggggcattaa

SEQ ID NO: 102130 - DNA, 810 bp, Enterobacter aerogenes
atgacagtgtataactacagcatcataaggattaccccaaatccagttcgagcagaatctatcaatattggtctcgttgtagctacaccaggcggcccagacattcgtgtccttgaaacatcaacaaagataaaagcgataactaaaacgtttagcatggaaaatcttgaggatctaaaggcaagattagaattcctactaaccgaaaagttaacgcttgaagaagctgttagttttttccaaggaagcataagcctttctaatacaggtaatttttcagcaagcactgaatacgagtatgagcgcaacgttgaactcttgaacaaaacgtacataacacctgagagagctaacaaaaaggagccgatcacccagaagagaataatcaccgagctaaagaatcagttttctcactatgggattatggggaaaggatttgatgaccttaacgaccacaaggttgttcaggggtaccctctctctgctcagcagggtttgtatgccgagcttttactgaaaaatggtgtttatcatcttacagaaacgctagatctcaggactacaaatgcgaaacagaaaattggtgatagcgcattcaaagcgataacaatgagcacggccaagacgatgtggagcgggaaagtaaacacattccttgtttatgctgctgatatgtctcaagtacgtatgcactcgcaacaactagcacttgttgataattatgcagatagaatgtttaacttacttagtaatgaggaaatgtctgtttacttcgaacatatgcttacggcggccggaatggctgcataa

SEQ ID NO: 102131 - DNA, 828 bp, Enterobacter aerogenes
atgcaggacgatcatcagagtgaggggcagattactgaccaagataatctgtttggattagacgtagtaagtatgcgtcctgttctgggaaaaaggagcgctcatcttagacacactgtgattgcaacggatggatgggaatatgcagttaaatgctgtcaggatggagttgattctctagccaagattgcccacaatccaatgctagttccagcaagtgaatggctgtgtaccaagcttgccgacatgtgtggcatagcaactcctcactgcaaaataattcatgatcagagcactggcgttgattactttggttcgagatatgatttgtctgctgcttccaccccgatggacgagataacctttgcagaacatttgtgtacgtctacagctcttaagaatcaggtttgggctatttacgcatttgatcagtttatattcaatattgataggaacttatcgaactatctgtattccgtcggtcgtgatgggcatgtgatcgtccagccttttgatttcggtttttcctcactggtaatggggtggccaaatagaactggtgacgcgctgctaccatatgggtgcccgacaacggataagtgggtaagcattagaaagttgacaggagaacatccttcctgtagagaatcaggcctagctatacttgataagctttcaaggattcagccaggagcgattgagtccatatgtaatgctatgccagaatcctggctaaacccccttcaaaaatcggctttaacgtcatggtgggcgagcaacaacaggcaaacgcgaatagatgtcgttcggaaagaggtgttgagatga

SEQ ID NO: 102132 - DNA, 651 bp, Enterobacter aerogenes
atggaaagccagaaaaaattaaatacaatacttccttctgaatcaataacccaaaaattcactaatccagtaaaattcatagagtatggaattgatcgactagaataccttgcgagaaataagccaaatgatctttttcagataggtattgcagcgtgggatcgtttctgcaatgcaaatcctaaccaagataagtttatatttggaaaggaatgtcaaactagtaacccgttgttgtataaaaaagtatcaaggcatataaaagaaaatgttattaaagacattttatacgtgcatggagaagttcaggatccagaactggatgaaaaagagacggtagaactcatattagcacacacctaccctaatattttaatgatcgtcgatgtaatgcttgtcaatccatatgaacctgtaacccctcaaaaatatgacttccaggagtatcatggtctagggcttttcgccgagcttctggagaatgccatacagtattgtaagcaagaaggtattcaggaaatatatcttaccgctgctgacataccactcaaaaatcattttgaaaaatatggatttgttgttcatgatacatggatgggtaaagcagctctagaggtaggacaaggcatcccgatgagcatgtacctctaa

SEQ ID NO: 102133 - DNA, 1029 bp, Enterobacter aerogenes
atgattgaaccgtttagttgggaaaactggaaccaagtatacttacataagaaaaacaagaagcgagcttcccttgaacgatatggattgagaaatcttcactctgtcgccagtttggactttatcctatcaaaagtgcatgagctatatttaaaaaaccggcaagaagttgctgttaatgctgaatctgtttgggtagatggaactcctcaggctaaattcaagagtattgatggctctgccttgaactgtgagttagcggatcttctatttattattcatgaaatggataataaaaatgcaacaataaattttagagctatcttattacaagggaaatgttcagaaaaacataatttactcccaactggaccttcaacaaataaagaaagaaaactgctcgaatctctcgatcgcaatgagtatttgtacttatatccgggcacgagggcatacggagaaaaaataggaaaatataaattaggcggtgaggtcatcgggttagcggactgtgcgaaatatttaattatgcctaaatatgaaaggtgggcatacaaaactcctaattacgtaaccccatacgtaattggctggccaaacaaaacatcatccaattatttaaacaatactgtaaattacctagatacaatccttgaaaaaatgattttaacaaagaccatgggaaaagaaataattttaacggcgaaaaaccatatagacaagaaatgtgagtggtcaaaaatgatttatgatttattaaatagctacctaccgataaccatgaagggctatgactcccaacgaagagtattcaagtcaagtttatttgacgataatatttctgctacattggctttgatggataataatcactgtgatttcataaacaaccatgcttttaatgaattacctaaaggtaagggtaggtttttatatcagcgtacattaaaattaattggagactactctggccccattatttcaacaatatttatccaaatcaaacataaggaagggaagaatttatag

SEQ ID NO: 102134 - DNA, 777 bp, Enterobacter aerogenes
atgaaagaaataacagatcaagtcaaatatgttatcaaagaaagaatctccagcccgctatgggggtatatcttcgccacttggttaacatttaactggaagaatatctctatactttttatgagtaaaaaagatgtcgaatcaagaataacaaccattgtatcacaagattggttttactgccattatcttgcacttccaattatttttggagtaattatcgctgcattttcaccatatttttcacaatggctatttcttgctcataaaaaggcacaagacaaccaaagaattatggagaaaaatagaacaatagataaacttaatgatgaaatagctatagtagataaaaaagtggaagcagaaaatgctgaagcattagcaagagaaaatgaaaaaaccaaaaaggaactaatagaagccagaagacaaaaccgattggcaatcctatatgcaagacaagcaaagatcgacaaaaatactgaatctttagataaggcatataatgacgcccaagaaaaagtatttgagatgatgaacaaactttcctcattagaagaaaagctatcgctaaagcaacaacaatttagcaatatcgcaacaaaactaaatgaactttcagatatatatttcagatataataacatttcatctaaagaagaattcgatagtttccttaatgaaatcaaaactaaaaacattatcggaaatcaatatctaagtacaagttttgatttaatgacaacaaaggaactaacccccataaaaaacaaatga

SEQ ID NO: 102135 - DNA, 1677 bp, Enterobacter aerogenes
atggtacacagtatggcaaacaacatgtcacacaagctgtcacacactatgattcgtgggcgcacatactacacgaattttagactaaatgattcaactagttttgtacgtctgagtcttggtactgacagtcaaaaacaagctgaagtgatcatgaatcagatccgcccttatatccctctcgtgcagaatgggacgatgggcctcgaagagtttaaacgtaaaatgcaaggctaccgtgctgccactaaacaggactttgataactacctgctacgtgccctagaaagagatgtagctgaggtaaaaaggctcccagagctggggcagttgcataaaaaaatcaccccagattccccattatcagctacagataccgttgaggccgcgcgaggttactccgatgcccattttaaccggatggtagaaggtagcgagcaaacagcaaacgaggtgctcgcaagccttcatatgcagaagctggaactatctaaggctgatttacccctagctaatcaggttgcagcatcgcttgatatgagccgccaaacagtggcacaggcatatgaagcattttattcaaaagacatattgcgatatcgccaactaacggcatcacttcaggtgcaattagaagaggctaaggggaaacacaatgtctatcccaccgctttagaaaaagttgaaaccgtgtctccgggacctgcgagccaagcgatcaaactctcagaagcatgggcgatgtatattaaggaaaaaggtcaaaaatggagcaggagcatcactaacgagaatcaacgtttctatgatgttctgctttacgtggtaggcgataaaccgatagaccttgtgacaaagcaggagatacgagagagtctgaaggtgacagaaaacctccctacccgtatcaaattgccctacaagcgtttgtcgttaaaagaatgcattgattatgacgtgccagaggaagatttgatcagtagtcagcacgtcgaaaagcatttaaaaatatggcgatctttattcaaaacttacctggtagatacaaaagacatgctggaaaaatcccctactgatgggatttcctacgaggtaagaccaaaccggaggggtcattacagcacgggtgagttaacaaggctaaaacaatatttattgtcattgccagattctgactggcggaaatggtatttcctcgcacttatctacactggtgcacgacgtagtgaactctcagccgtcaagaagcgggacattaggcaagacgaggaaacaggccgctggtacatatttatagaggaaggtaaatcagaacacgcccagcgccaaatacctttgcacaaaacgctagaggatggattacttagtgtcacccgactcatggaagctgaagatctagtattcagtggattgccaaactacaccgccactactgatgaatggattagagtgatgcatatactagctattcctgattatgacgagtttggtctaaaacgccgtctgcatagctgccgtcacacatttatgagcgattgccttgcatcagggatatcagttccattgatgcagttcgttgttggacactccagaagtcagagccttggcgtaacgtctatttatacacatagaccaccactgaaagacttattatgtgtcgtagacttccagaaataa

SEQ ID NO: 102136 - DNA, 267 bp, Enterobacter aerogenes
atgcatcgcccaaccctcagtcgcgctcaggttcaggccaagggtaaacaccacacaccagagcgaatcgaagatgcgaccccaattaaattcgttgctcaggacgcagtatggcaacgccaggagtacaagcgtcagattgagcgcgcagcagtcgtctacagcaatgagtttggtcatcgtcctttagaaagcagcatgtgtctgccggaggtggcgatatacgctactgggcatcgtaaaactaagcaaattaccgcccgatga

SEQ ID NO: 102137 - DNA, 405 bp, Enterobacter aerogenes
atgaaaattgaactcattaacaaaaaagttgaaagcttggttatgaagccgctagaaggtgattcagcggcaaaaaaaaccatgagcgcaactgttaagctgaataatgaactttactctaatgtgaaggattccaaactatttagagtgagatattttgcttccgtaaccattgaaggtcggcttgagatggacatcacatacgactttgattttcaatcagaagatgatttttctaatgaaatggctaaatcacatgagataaggtccatagttccaacaatggcatatccctatatcaaaacatatgccgagcaaatcatcctcatgtcaaatcttggtaggttcaatttgccttactttgatttctttgccagccccatggaaacgaatagcaataaatga

SEQ ID NO: 102138 - DNA, 669 bp, Enterobacter aerogenes
atgaatcgaactagctggcgcatcattaaaaatagtgaagagcatgctgcagctatggagaggctcattgaacttgcgtctagtgatttacaacctgggactgaagattttgatgagcttgaactgttgggcttgcttatcgagcactatgagtcacgcgagttccctatggacaagcctgaccctatagaagccatcaaattccgcatggatcagcaaggcctctctcatgctgacatgaagcagtacattggatcagcatctaaagtatctgaggtcttaaaccgcaagcgtccattaagtctttcaatgatccgtcgactgcatgacgggcttggaattcctgcagatatcttaattcaagatatgagcgcaattgaatggagcctggttgacgcagaggaagaagaaacgaccatgactggtgtcattgttcagtgcgagtccgtcaccatatcctctgctccttatttcgctgcaaaggctacagaatcttacttttcaaaaatgttgtccagagctgtaaagggtaacgacaaatgcgaagaaaaacagaatgttatagttagtggtttttctttgataagtgacttgtcatcgagtttcacagcagctaacaacctgaacgacgcaatgacttctgacgggaattactcattagtatcatga

SEQ ID NO: 102139 - DNA, 714 bp, Enterobacter aerogenes
atgagcataaaaaagaaaccgttaactgccgatcaacttgaagacgcaaggcgacttaagctgatttatgagagcaagaagtcaacacttaagctctcgcaagagtccatcgccgatgcccttaatgtcggacaatcagccattgccgctctcctgaatggtgtaaatgcacttaacgccagcaatgccgccgctctagcaaaaatactacaggttagcgtaggtgaatttagcccttcgcttgccaaagaaattgaggagatgtacaaatcagtttcagccgttcctccttcaggtaatgattacgaatacccagttttttcacacgttcaagcagggatgttctctccggagtttcgtactttcacctcccgcgatgcggaacgatgggttagtacaaccaaaaaggccagtgattattcattctggttagaagttgatggtcattccatgacggctccaactggttcacgaccaagctttccagaaggaatgttgatattggttgaccccgaacagccggtggatccaggagatttttgtattgctagactgggaggtgatgaattcaccttcaaaaggttgatcaaggatagcgggcaagtgttcctgcaaccccttaatccacagttccctatgattccatgcaacgaacattgccgggttgtaggtaaggtagtcgcgagccaatggcctgatgagacgtttggataa

SEQ ID NO: 102140 - DNA, 180 bp, Enterobacter aerogenes
atgaacgataacagtgatatcgcgcttagatgtgatggctttgaaaatggcgctctggtaaacgccaagatcctgagcagctttagtctgaccaaagcgctgagcgtaatctttaagttttatgcgctgttccatactacctcctatgagcatgaaattgattatcaccgcaggaggtaa

SEQ ID NO: 102141 - DNA, 945 bp, Enterobacter aerogenes
atggataatcttgataaactgatgaagatagattggaaaaaattggtgatcactgaccattcctggattcagagccaattaattgagagagcgccatcagtagagagaaaaataacctctcgattattcaccataccatttagtggcgtaatacaagaagccaattcattcattgaatcattagctgactcaatagaacattatgtttttgataaaacggcgattgatattatgcgacaaaagggacaaataccatttagaaaagcggctcaatttttcggtgataccaaccccataaaagatgggaaatatggtgaattgcttctttatattctttcagaagctatcttaaacacccctatggtttctcataaaataacaacccttactaatttaaatgaccaagttaaaggtggtgatggtgttttttttggtaaatacagagataatatatccattcttattggcgaatcaaaaatatatcaaaacttcagcggcgctttagatagcgcatttaattctttagaccgtttctcaaaaaattactcaagcggagctctttcccatgaattgtttattgcaagaaaaaacataagtaataatttcgattttgaaacaatggaattaatctaccaagctttcactcctggctctgaaatatattcagaatgcatcaaaactcaccctgtattattaatatttgaagatagcgatataaaagaaatagagaacaacgctttaacaaaatcagaggctgaaaatttatttgaaaaatggttatctaacaaaaaagaagaaataaaaattgcgatcaaggataaactaactaagtatccggatgttaagccatgtttcttagatttctttcttattcctatgagtgacgttggtaattttaagaaatcattatatcgttctatccatggcattgattataagccgtaa

SEQ ID NO: 102142 - DNA, 1914 bp, Enterobacter aerogenes
atgagattactgcaagagcaaaaagattgttctcctttattagttttcttcgatgaaatacagaatattgaagatggtacacgaggaagcgtatatgagaatgtgatttatagaatgacaacaagctggaaggattcacaatttataatggctggcccttatatagagaatctccacctttccttgcgtgaggtaatagacatagatttacttgagcataaaacattagctacaccagtacttcaactcaagaccgtcctgacggtatttaaaaaatcacaaagtgttaagtataaaattatcacccccacgggaagcattgttcaggggaattacgatataggcaaagctttatatagtaaactatcaagttcaagagggcaggcattaaaatacttaacctcagtatttcatgaagatgaacaaaatataattttttctcccaaaaaaaacatggcagagggatgggctctatccgtagcaaacgatgatcaagataatcataaggttattgataatgaaaaaatcaaaaatctttgttcatttttagaaagtgaaatccatccattatactcactagttagatgcattaaaaaaggagtggcttttcatcatggcggattattagatgtggccagactggaaatagaagatttattttcatctggtgtaattaaaaacctcatttgcacttcaaccttgctacaaggggtgaatttacctgccgacagaattgttgttatctcacccaaaataggaaactacgaactctctcaatttgaatttttaaacctcataggtcgtgctggtcgcattaacacttctttgtatggtgagatattttgtatcgaacttagcgatgaggagtgggcagaagaacgcataaaaaatgaaaataaaaaggaaattgtatcttctgttttaaataaattgaatggaaatattgaatcagttattgactatataggattgagtggcgaggaaatactcaacagcgatggtaattataaactctacccgctggttttatatttaagaagccaatatcttgtcgataaaaatcattactcgaaaattataaaaaactcaaagttaaataagaaacaaactgaagacttagaaaataaactagacattttttctaaaaaaatatctatccctgaagatttattggcaaggaatccttttgttgatcccttactattaagtgagttctttgaactaataaaatctcagggagttggtgaatggatgatttcaaaatatcctggaggcaagagagaggctaaatcactggatgatgaattcaaaaacatgaactactacaatcaatataaaagcattatctctcgtatgaatgagatatttaatattgaacaagaggtgaattataaagatgatggaaaatctcggcgttataggtatttcgtaagcatcaacaaattagcctatgactctcataattggatgaaaggccataactataaattcttcattgataacatggttaaagataagttaacaaaaaaaggtttagaaataacaaataaaaatattgataaaataaccaattttgttaccgctcacatcaacactaatttgaactttatattagttaaatatttatcactttggactgatgttgttggacatttgatgtcagaagaagaaaaagaaaaaaacaaatttttcctgaacctaccttccatgctggaaatgggaagttatgatcctttagttcttgaaattatgagttttggcattaatagatctacagcaattgaattaacaaaaaaacagagaataaaagagggccaatcagtcgaattatatttgagaacttacaatatagccaagttgtcaagccttcataggaagtatttagaaaaagcaggatttggctcaattaaataa

SEQ ID NO: 102143 - DNA, 315 bp, Enterobacter aerogenes
atgttcaggtgcagggtggcaatcgtgattggtaaaagattaaagatttcaagagtcagggctgatctgacgcaagcggaactgggtgtactcgcagggctggatgaagaatctgcaagcgcgcgtatcagttcttatgaaaaggaagtccatgcacccgatttcaagcttgtctgtaagctggcggcagcgcttgatgtaccggaagcgtatttttatgctgtagacgatgagcttgcagaattgatccttcagtatcaccgttttaagaagaataatccgggccgtacattactgttttcaccaaatccttaa

SEQ ID NO: 102144 - DNA, 276 bp, Enterobacter aerogenes
atgaatttagcgttttcgtataatggtgaagattatgaagaacatgataagatttcaaacgaggttttttccaaagagactttgaaagcaaaaaatgaatttgacataataactagtcaaaacattaattttgaaaatatactatcccagcaagaatcaaaactaaaattaataaacgaaaatctgtcaaaagcatggaccaggaatacacaggcatatgtggatgaagcgtctcttaaaaatcacaaggaactgaacgtaaaagaagagagctaa

SEQ ID NO: 102145 - DNA, 468 bp, Enterobacter aerogenes
ttgtcacagaagaataaaactcaaggaagccagtttgatattatgttggcttataaaaatatagaaatatcggaagttaaactcaggatagcaacttcagaacgcaatgctttagaatatattttatcacatgctggtgacttcaatgatccaaaactcgtttctgaattaaatgccaccaataaaataacagatgacacaagatctaaattaattataaacaacaaagaaattattaaaataaaaaataatgttcaagatttgttgagtaaacgtcaaaaagaagatctcaatttttgggatttcgtcttttacagcattggaatatcaacaacaactacatttggtgatttagtagccaactcaagattaatcagaatgctagtttgcatacaactgttgttatctattttggtgctagccaacgtaactcaaaatttcttgtcaaaaaataaaaactccctatga

SEQ ID NO: 102146 - DNA, 1227 bp, Enterobacter aerogenes
atgtacgacagtgaattgaaagcatttgcgaaagagcaagagcaaaagttgatcaacgccttggcaaatactagagaacactttggtaccaattttgaagtaagaaatcgagatgactatcagcgcgattacgcacgaattctgtattcatcatcatttcgcagattacagggaaagatgcagcttttcgaagtcgatcctgaaaaattcaacagaaacagattaacgcacagtcttgaggtagcgcaaatcgccagaagtatcgcatcagacctcgaactggttcatcccgtggtggttgagctggcagctctcgcgcatgatatcggcaatcctccatttggtcattcaggtgaaaaacttcttaacgagctgtctgaggatattggaggttacgaaggtaacgcgcaggcgctacgcatcctgaggaagcttgaaaaaaaatatgcaggctgtagtggtttgaatctgacttaccgcagcttgctttcggttattaaataccccaatacccgttctactgctaacaaattcatttatgatgacgactttgatttttacaattacctgctttctgaaaggcagctcgatctgaaatctggagagaaaacgattgatgcgcagataatggatcttgcggatgaaattgcctatgcagcacatgatctagaagatgccctaagcagaaacatggtcacgatcgaagacattgagtatgaatttctgatttctgaaaaattccaatgcgcgttagaccagtttagggaacttgtcagtaagtcaaaagtaacagcctttcaggcaatttcacttaagacctcagaggagtttgcaatgattttccgtaaggaattgacctccaatattgtcaattgcctcgtcacggacatttctgtaataaagaacaaaaatggcttttatgagcttggattcggaaatctgaatgccttatcggaaggtctaaaaaagcttctttttaaagtcatcatgagaaaacgtaatatacttacctatgagttcagaggaaatgtgataatcaatgatttatacgttttctataataaggatgaaaattataagttcctctcccctgaacttaagttttccttgcccaaagaggacactgatgcctttgaggccaagaaaaagcgggcggtggttgactatatttccggtatgatggacacgtttgctataaaagaatgggaaacgcattgcctgaaataa

SEQ ID NO: 102147 - DNA, 123 bp, Enterobacter aerogenes
atgaaattacagcttgccctggacgagttaaccctgcctgaagcgctggtatttgttgataaggtggttgacgacgttgatattattgaagtgggaacccctttcttattcgggaaggcgtga

SEQ ID NO: 102148 - DNA, 183 bp, Enterobacter aerogenes
atgctacgcccgcaaaagctcgctaaagggcctttaaaggcctttaagggtaagggagggaagtgcgggatttgggggggaacgtttgaccatctgcattggctacgtcctcacgacggagcctattcaaaggcctctgtactgacgccccaatatggctttaccgccagcaccgattgttga

SEQ ID NO: 102149 - DNA, 741 bp, Enterobacter aerogenes
gtgtttaaagtttggaatgtttatttatgttttttcatggcatggttgttggtgattacgctcactttaataacaagaaccaccctattgtctataatttcaattttctacacaggcttaattccttttatttttgcaatcctttttatatcaaggacaatcattgaaaaaaaactagagagcataaagaagaaatggtactttgctgtatatctttcatgggttatatttatgtattctatttttgctcaaagatgggcttcagagacgttgaataatatatttcagattaatgcagtttaccttagcattacttacaaactactcgcattcctttttgctccgttcggcatcgtttatcaagcatatatactatctagagtttggttgttattcatactcattagtctcatcttatccactatcctgccattatttctaatatttaacattcgttttaaaattattgggaaagcacttggcgtatttttcctgatttttatattcatatcattctcagttccaatgctatcaactatgatgttgcatcaagagcaattgataatcaaatttgcactttgggctgattttaacagtaaaaacttatgtactgattcgtgggttaataatacagaaagtatcctttttttggatggaaacaaagtactagcctaccaccctaataatcctgagggctatcgtttcacagttgaaacatgcaattacaataaaactttttag

SEQ ID NO: 102150 - DNA, 273 bp, Enterobacter aerogenes; identical to SEQ ID NO: 92299

SEQ ID NO: 102151 - DNA, 159 bp, Enterobacter aerogenes
atgatgaatattcgattcgaaccagagttgtaccaacagctattagcagaggccaaacgaaccgggacgagtattccggcgcttgtctgccagcttctaaaaaccatcctaaacaatgaggaaaagaatgaacaaaacagaacagtttttaagcgttga

SEQ ID NO: 102152 - DNA, 426 bp, Enterobacter aerogenes
atgaacaaaacagaacagtttttaagcgttgattacaagattctaaaaataaatacaataacaaatcagggaaaagtatttaaattcactgatagcctcaaaaatacctattcctacctcgcgggttggaccacagcatttccaagttacaaccaaatcgcggatatttttggcatttctcgcgatgctgcaaaagaccgaatcaacaaactcattgaaatgggactgattgaaaaaaatgaacgttgggctggggataaacgaacctcaaatctctataccgttttgccgctcagagtcgagaatacagcaggacggacgtattcagaaaacaggggaaccaggcacgaggtcaaaggcgattttgagaatgagtcagaaatagtattaattgaagatgataatgatgatgatttaccgtggtga

SEQ ID NO: 102153 - DNA, 759 bp, Enterobacter aerogenes
ttgacaaagaaaaaaacttttgaggtatcgattaacaacttacccgccgcactaaaacgtttagacctaccagccgaacaagtaaaggttatcgaagactacaagaagcaatttcctttcttgattgaagatgaagaaaatgtattggttagcctcgatcagctttgggaagcactggatacaccgtattatacaccacccggaaagggggccgaaagttcggaccacttagccaagccccgaagtgaatctcaagaaaaggtatacagacgtaagcaacataaaaagtggcgtgatgaggttgcattaaaagagattgatggtgaaccttttagtcgaatggtgcccgttcgcggtggtaaacgaaaagagaccttcgttactatcgaagacgcaaaaacaattgcgatgttaacgcccggtgagcagggcaggaaaatcagacgctattttgtgactgtagaaaaggtctgcaaaatcctctggcaatacaacttccagcgtcaccagatagaaaacaaatctaacgaggtttacaaactcaggttagcacaaactggttataagggttttgatgtagcggctaaagataaagttagatttaacactttggttaaacagatagcaggagccagaaacgttaaagaaactgatttggacgaatattatcacgttcaatttatcgtttttgatggaatgaaacgtggaagaacagacagcgagatcctcgcatttcatctcggtgatgaagcagcataa

SEQ ID NO: 102154 - DNA, 444 bp, Enterobacter aerogenes
atggacacaaataaatttacacgccatgatttttctgaaactgcctttactctgatgcaaatcattggagataaccgtgaatatgaggctaaaaatagaaaagactattaccaatcagctactttctctctgaatcaacttaattctttaatggaaattgataaatcaaagaccatagagaataatcgaatagtgttcactcttgcagatagtttatcttttaaccttgaatttaaaaatcattttaacaaaacagctataacgttaagttacattgatcaagatgaatatggaaaagagtttttgagcaaagataatagttatacatttacaatagacgaaaatgggaagttaagcgatgttgacggtgccttaaatcgtagacattaccatgaacacttcgcacatatctttaccttgcttgtagagaaaatcatcaattaa

SEQ ID NO: 102155 - DNA, 210 bp, Enterobacter aerogenes
atggtaactatcacaaagggcgtcaaaacgtttgacgggaaaatccccgttacacttttggttgatgacgtcgaaacagccaatactttagtaaaaatggcaaaagatgccaacgtcactgttattgaacaggacgaagatatttcaaaatctacaatcaatccagtattcaaacatctggataagattgcatccagtactaataaataa

SEQ ID NO: 102156 - DNA, 1704 bp, Enterobacter aerogenes
ttgtccagattacggcaaggattaaaaaccagacaaacgcgcttcgcgctggcgctgaaagtggcgctgctcggtagcatggtggcattttcttctgtcgccaacgccgacgatattcttaaagaagggattactcccgcaaccgatgccagccagatcccggccagcgccaaactgcgtaaagacacggtggtggccggcatttccgaaccacaggggatctttaacccttacttcttcgtcaacggttgggatgaaaacgtcaccaacgttattttttcacgcctgattgactgggatagtcagggtaagctggtgccggggctggctgagagctggacggtgagcgcggataacaaagtctataccatcaaattacgcccaaacctgaccttcagcgacggatcgccactcaccgcggaggatgtcgcctttacgctgaccgttcttctcgacccgaaatatgacggcgataccgatattactctggccaatatcgccggcggcgcggaatataaagccggcaaagccgatagcgtgagcggcctgaaagttatcgatccgctgaccttacaggttactaccacccagccgggcgcgacaacgctggcgaaaatcggcggtccggtattatcgaaagcctggtacggcaaagggtatcaacgcggaaatctggattatctgcgctctctgcacggaaaaccgctgggtaacggtccttatgtctacgataaatatattcccggtcaggagattcgcttccacgccaacacgcatttttatcgcggtacgccgccaacgccgcgctttatctatcgcgtgaccaatccgtctaccaatttccagctattccagaccggcgaaaccgactacgacgccttcacctcgcgtccggatgatattgagcagcttaagatgctcggttttgccaatatcaacctgtacggctccagcgactacagccaggtggagttcaacgtccatcgcccggcgctgcaggataaaaaagtgcgtcaggcgctgatttacgggcttgaccgccagaagttaatcgacgtggtgtatcagggatacggcaaggtagccattgaaccgatcgcgcctatttcctgggccttcaatgcgcagggcgtcaacccctaccattacgatccggtgcaagcgaaaaaactgctcgatgaagcgggctggctgcctggcgccgatggcatccgcgtgaaagacggtaagcgactggaattgaccctgctggcgagcaaaaaagtcattaacgatgcgctgatcccgattgccaaagagaactggcggcagataggcgtgctgctgaaaccgcaggtggttgatttcaacgcgctgatggcgcagcgcaaagcgggtaattacgatttggcgtcgttcagcaccagcactctcaacgatccgcatgacggcgtgtgggacttctacagcagcgaggccaaagagtcgggctaccacaacgctgaagtcgataagcttatcaatgcgggcaacgcggtgctggatgtcgaacaacgcaagcctatctatcaccagctgtatcaggtgctggccgaggatccgccggttatcctgctgggataccgggagattctttccgccagcagcgcccgggtgaccggctttaagccggatatctataacggcctcaccggcagtttgccggatgtgaaaatcgtgaagtaa

SEQ ID NO: 102157 - DNA, 270 bp, Enterobacter aerogenes
  misc_feature (249)..(258): n is a, c, g, or t
gtggcacattatcgcgtcattgataaagcgagctggcctcgcctggatcactttacgttctaccgtacctttgccaatcccagcttcaatctgtgcgtaccggtcgaagcgcaacagttgtacacctgcgcgaaggaccggggcgtttccttctttcaactggcgttattcggcctgttgcgtgcggccaacgccgtaccgcagttgaaacagcgcctgcgcaacgacgatatcatcgaatatgacgcnnnnnnnnnnccatctcggtga

SEQ ID NO: 102158 - DNA, 3216 bp, Enterobacter aerogenes
atgtgtgcttcaccttcagcgccgctacggcgcgtggatggactggcgaaagtcaaaggaacggccgtttatggcgacgatattaccttaccgggcatgctgtatggcgtttgccgctttgcggatatacccgccgggaaaatcgaggcgatagatcttagcgaggcgctgaatgttgcaggcgtggtaaaaatcgccacctggcaagatattcccggtactccggtcgtggggattatcgtcaaagattatctgcctatcgtcaaagacgaggtggtcttccacggcgatgtcgtcgccgtggtggcggcaaccagttatgaagccgcctgtgaggcggcggataaaatacatgtgcgctatacgccctatgagccgctaacggacgtagaagccgcgctggcgccggatgcccggcgaattcacccggagcgcagcgataatatcgccgcccatcaccacaccgttaagggcgacatcgccataggttttgccgaagccagtcacgtgattgaacgtgaatatgaagtgggcttccaggaacacgcttacattgaaccggaagttgtactgacctggcttgaccccaccgatggtagcctgattatctccggctccattcagaacccgcaccgcgtacgcagcttcgtggctaagtttatgggctgcccgcagagccagattaacgtcaaacgcgcggtgatgggcggctcgttcggcggcaaagatgacatcatcgatcacctggcctgccgttccgcattgatgacgcgcctgaccggtcgtccggtgaaatttacctacacccgcgagcagtccattatcgaaagctgtaagcgccacccttataaaatgaagtatcgcgccggggtggacgacaacggacgcattctggcgatcaaaatcgatattcttgccgacagcggcggctatgcggcgtcttccccgttcgtcacctggcgttcttcggtgcaggcggcggggccgtacaatattgataacgtccatatcgacgtcaaagccgtctataccaacaacagctatacctcggcgatgcgtggtttcggttcaccacaggtggtttacgccaacgaatcctttatggatgaaattgccgaagtgctcaatctctcgccggtggcggtgcgtgaagtgaacgcgctgcgtcagggcgatacctcggtcaccgggcagcggtttgataaacacaccgtctcggcgactgaagtcctgagtaaggcggtgaatgcctcggaatttgcggcaaaacgccagcactatcgtgaattgaaccaaaaaggcggcgtttatcgctatggcattggcctggcgctgagctaccgtggttgttccatcggcgcggaaggggtagatacctcgacggcgctcattcaggtgaatgaggacggcagcgtcaatctggcgacatcggtttctgaaaacggtcagggtctgcaaaccgcgatgtcgctaatcgccgcggaagcctttggtattcctctatcggaactgcattttatggaaccgccgacctcggttatcggcgacggcggatcgacggcggcaacccgtgggactatggtcggcggtggggcgattcttgacgccgcggacaagataaaacgccgcattctcagcgtcgtcggcgacagcatcggcacccgcgagttggctgaaaccttgtggcaggatggctttatcatcaacgtccaggacagtgaacggcgtattgatttcaaaactgcggttaataaaaccaaatgggccagcgtcagcctgaccgagtacggctggtttgtgccgccgcccattcattgggatgaagaaaaaggctgcggcagcccgtactttacctgggtttacggctgccaggtggcggaggtacgggtgaataccagcaccggtaaaaccgatttgctgcatgttaccgccgcccatgacgtgggccgggtactcaacccggtggggtttgaaggtcaggtttacggtggggtggcgcagggttttggctacgcgctgctggaagacttcaacattgaaaatggccaggtcaaatcggaaaacttcgacagctacctgctgccgacgatgaaagatattccgccgatgacgattatcggcgtagaaaacccggatatcgccgggcctctgggggcgaaggggatcggcgaaccagccactgaactggcggcggcggctattaacaacgcggtgagttttgctctcgagacgcggtttaataaattaccgttgactcttgaacaggtgatcctcggctacaacttgaaaaagccggttcgccaaagcgaaatgatgctggaggcggaaaacaagaagcaggtgctgcgcctcactgatgtggaagtgacccgagcgaaaagcctgcaggaggcgttaaccctgctggcgcaagagggcgtgacggctatcgccggcggtaccgatgtaattgtgcaggggcgtctgcaaacccgcgcgctgcggttggttgatatttcccgtctgccggagttgacgcaggtgagcgaagatccggtcagccatgaggtcatcattggcggagcgatgacctttaaccgtattaccgatcatccgctgttgcgcgaacgttacccgctgctggtgcaggcctgtcataccgtcggttcgcaccagatccgcaaccgcgccaccatcggcggcaatatcgtcaacgccgcgccctgcggcgattccattccgcctgccatcctctatgacgcgcgcatcgagctgcgctcgctaaatggcgtacgcaccctcggtctggccgagttcttgctgtccggctacaacacccagcgccagccggatgaactgctgaccaaagtgatactgccgccgccggtgcgcccgcgggctaaaggtttctatcaccagttagggcgacgcaacgcgctcaacatcacccgtcagagcctgagcgcgctgctcgattttgctgatgatggcacggtgagctactgccgtctggtggacggcgcgctgttcagtaagccgcagcggttactggatattgaacgctgcctgctagggaaaccgttaaatagcgacacgattaacagcgcctgcgaggtgctggacaagcttatctatgcggccatcggtaagcgctggtcggcggcatataagcagccggtgttcgtcaatatgttccgcgacatgatggccgaggcgcaacgggcctcagggatttaa

SEQ ID NO: 102159 - DNA, 876 bp, Enterobacter aerogenes
atgctggatgccgatgacgcgctcggtcgtcacgaatggctaattgcgccgctgctactacagggcagttcggcgcccgatgcgcgaattttgctggcgctgccgctggatattgaccaactggtggcgcagcgtcctgagctgatacaacgctccgataccgtggagtgggatgaagcgcagggtactctaaaagcctggcggcgtagctgcattggccagctggtgataaaaactcagccgttggcgaaaccgtcggaagcggagctgcatcaggcaatgctcaacggtattcgcgataaggggctcgaggtattgaactggacgccggaggctgaacaactgcgcctgcggctgcactgcgccgcgcagtggctgccggaagcggactggcccgccgttgatgacgcatcgctgttagcttcgctggaggcgtggctgttgccgcagatgaccggggtgcattcgcttcgggcgctcaaggcggtggacctgcggcaggcgctgcaaaactggctgccgtggacgttacgccagaagctggatagcgagctgccgacccattacacggtgccgaccggcacccgtatcgctattcgttatcatgaagataacccgccggcgctggcggtacggatgcaggagatgttcggcgaggcggcgacgccgcgcattgccgaaggacgggttcccctggtgctggagttactctcgccggcgcagcgaccattacaaattacccgggatttaagcgccttctggcagggggcataccgcgaggtgcaaaaagagatgaaagggcgctatccgaaacatgtctggccggatgacccggcgaataccgcgccgacccggcggacgaaaaaatactcctga

SEQ ID NO: 102160 - DNA, 189 bp, Enterobacter aerogenes
atgcagtacccgattaacgagatgttccagaccttgcaaggcgagggttactttaccggcgtgcctgccatttttattcgtttgcagggatgcccggttggttgcgcctggtgcgataccaaacatacctgggataagctggccgatcgggaagtgtctctatttagtatcctcgctaaaaccaaatag

SEQ ID NO: 102161 - DNA, 204 bp, Enterobacter aerogenes
atgttgctattaacgaaccaggtgcaggaagtgcagatgtttttcgtactggtccagtatgtcattaatcagctgctcctggttccagcccatcacatcataattttgaccgccttctttgagatatacctcagcgcgataatatctatgttgttcagtctgctgctcattattatccatcgcggcgagcgcgaaggtcggtga

SEQ ID NO: 102162 - DNA, 453 bp, Enterobacter aerogenes
atgcagcttctgttcgtcagttctgagtccactttcacctattttgaagccacccggggctatctggagcgttacggtaagcctctggcgttctacagcgacaaggccagtgtcttcaggagcaacaacaagcaggccaatggcggagatggccagacgcagtttgaccgtgccatgaacgagctgaacatcactggtatctgtgccaataccagttctgccaagggccgttttgagcgggctcacctgacgttgcaggatcgcctcgtcaaggagctgcggcttcgcggtatcagtacacccgaggcagcaaacgcctttgccgaagagttcatggctgactacaaccgccggtttgcgaagcccccacccgatgatttcgatgttcaccgcccgctcgagaatgataaaaacctctatctgcctgaaggaaatgaagaaaatcgacgttga

SEQ ID NO: 102163 - DNA, 1368 bp, Enterobacter aerogenes
atgagcacgcaatttaaagaactttttggtaaagcccgaatggatgtcagcagtgatatgaaatcgggcaacttaagaaaatcgaatgtgtacgcagattcaaagcagaaagcgatttttgaaagtgtgaaagaagggatacgtaatgatagtgctgatgttttttcgaaaacaagccttgaaggctatgctgaagatgctatgccaaccatattccgggatgtaaaagctgagttacgtaaagttttttgtaaaaacactgaagttaatgaggctatcggctgccatcctgattttgacgatctccgggtaaacgatgagctccgtaacggctatgctgtgacgatgttttttgatatcgcagggtctaccaagctgggaaaaacgtatccacctgagatggtgtttaatataaagaacacaattatcagatatgtcattgaaataattcaggcttttgatggtcatgttcatcgtattatgggcgatgctgtaatggcatttttccgcagtgaaaataaggccatagaaggcaaaaaaattgacagcgcgattgatgccataaacgccggtgtatacatacttgaatttatggagcaggttatccggccagaactgggcgatcagggttcggaagatcgtataggcgtcaggctgggcatcgattacgctaaagatgatgaaatcgtatggggaaactacggtgtttcaggtgcatttgaagtaacggcaacttcatatcacgttgatgttgcggctaaacttcagcaagcggctgatacagataagatcatgattggtgaaaacctcaagtcactgcttggtttaggggcggagtatctgtccaccaaatggaaatgggcgaaaaatgaagatggtacagaattcaagcgttattatcggcatgtaaaacctaactatagagtcaaaggaacacaaataaattatttgcagtatgtttttgacaacgaagcatattttaaatttttgccatatggaatagaaagtagaaatacatccgttgtactgactgcaaccgcaaataatgttgaaaaaaaattttattgtccatgctcagaaagtcttgataaaggaatgtcgcttaacttccatgtaatatttagtgctccagcaggacaaccgtatactgtcaaggcggtaaagaggaatacgggccctgaagctgaaaaaaattctgcattgaaggaagttaaaaaagacagaatgatgagttactactcaggccagtggcatgctgacatttccgaaagtaccagttatcatggtttacatcatatggaaattaaaatttatgacagccatgacagagaggtcgatagcacaatattcagcattttcataagttga

SEQ ID NO: 102164 - DNA, 534 bp, Enterobacter aerogenes
atgcctctagatgaaaaagataagtttgatatcgacctggttcagaagatgattacccgcactgacggatttcataactatgccaataccaaatccactataattattacctttattacagccatactggcagctataggcactaacgccggaagtgcagtagcttacttggaagtaaaaggttgtcatgatctggctattattttcaagtcattaatgctcgtttccgtagtattacttttatccggatactttttcgttggtaaaactgttattccctacataaaaacgacttcaaagagaaatttttactcatttatagacaccgtgaaacaatttgattcggaaaaagaatttgaagaagtaataaagacaatgcctgttaatgaaataaccagcacaatgatttcgttgcagtataccctttctcaagggctggtcgaaaaataccgacttcatcgtcttgcaatctttttaattctttttgccgcaatacctttaattattaacactttaatcattttctttgtataa

SEQ ID NO: 102165 - DNA, 2211 bp, Enterobacter aerogenes
atgactcaactcaggatccggggcgtaagaagctacgcgcctgaccgggatatctgctttgatctcagcagtaaggtgacactcatctacggccagaacggctcggggaaatccacggtatcaggctatttttatgaccggcaggcggataaatatcggcactgtgcctttgagagcccgcacatcagccactttcaggtctttaatcaggaatatattgacagcaaatttgcccgtgcggactatcagcccgggatcttcactctcagtgaggccaatcaggaaagccaggataaaataaacagtaataataaagaaagaacaaaactgagtgcccgcctggagaaacttaatgaggagattgcagaaaaagaagggatgaaagaaacgatcgtcgaccactgtgccagggatattttcaaccggacagtcaatgacaggaaaatcctcagcgatttccttgagggtgccaaaattaaaagatcgttttacgaacgtatggttgcaacaccactttcagacgtgcgtaccacaacggagaaactgactgataaatggcgaatgttaagtcaaagcgaaggaacgcttgtcagcgaaattcatattccacgaacaactgtcttaacggaagaaacaataaaactgatgcaggaacctgttgtgcctgtaagtagcacgcaattctctgcactcatccagaaaatcggtaatgcagactgggtgcgccaggggcagcattatatacacgacgatgtttgccccttctgccagcagccctttgatgtcatggccttttcgcgcgaactcactcagatgttcgatgagtcttatcagacttctcttggagtgctgagccaggcagcagaagggctggctcaggactgtgatgccctggctgaatttgaacaccgcgttgcaacccattctttcgttgatgagggaagtcagattttatctctggtgaaagcggtaaataaaggctttcagattttgttacagcaactccttaataaaattaaagaaccgtctctgaaggtacagcctgagaaccttcaggaatccctgttcttactccagaatgaagtggacgcgttcaatacccgggtacgggaaaataaccgactggctgaaaactttacccatgaaaaaaagtccctgcacgctgatgtaatggcgcatctcagagggatttgcgaagagttctttaccgaacgtgacaggcagcttggtgagctacaaaatgaaattaacagtaggttgcgttatggcgggatcctcgaagcaaacaagaagcagctggatgacgagacgaatgccctgaccggacaactctcggacatacaacccactattgacagtatcaacgcgaatctcagactgctggggatcaccggctttgagatcatctgccatgatactgagatgaaactataccgtctgcgccggggaagcgagcctgagaaggctgaagtattcaaatccctcagtgagggtgagaaaacaatggtttctttcctttatttcatagaatcatgctccggcagtctcacccctgaaaccattcatccggagaataaacttattgttattgacgatccgatttccagcctgtcacataactatatttatgaagtcgcagctctcattaaacggaaaattataaagccaggtgcagcgagacatgtagtgatactgactcacaatatgtttttcttccaggaaatactgttaaacagcggccgcctgcaggataacagagaggcaccggtgaactggtctctgcttcgaattattaagtctgactacagttcctgcgagaagctctccatgcacgagatgctcaatgaatatcaggcgttatggcagaccctgaaagacgtcagggatggaaaaacccagcccgttgtgctgtttaacacaatgaggaatattcttgagtattatttcagctttgcctgcaagaatgaaaaacttaaagaggccctggagtctctggcaaccgaacacagcgatgccggagagtatgattcattttatcgggctattaaccggcactctcattctgatggccgaaatctcttttctacaggggtcatcgataaggaacgttatctaagtatgtttagaaaagtgtttactcagacagacgacgatgatcactatcttgccatgatgggggaatcagcagacctgcaggaaacagtggagtaa

SEQ ID NO: 102166 - DNA, 519 bp, Enterobacter aerogenes
gtggcacttaacagagaaagaatatcatgggattcaattcataaagcggaggcagtctattccttaaagcgcctgagatctctaaaagaagaatggggggggatatacccttcctttgaggaaacaattgaaatactgagaaatcttcctgataaatttagtggaacatctatgtcaaaaaacactatagacgcggtattacgtgaattatccattcaaaatactactgatccatgtgctattacagcaaacaaatttttagaaggagaatcaagagaacaggatgtcattaatgaaataatgctttgtctttatacagttggaattgtaggtttcaagattagtagcctgacaccttacaaatgggcattcagagacagtacaccaacaacaaaaaatgaaatcaaacgtgccagtctgatgaaaattcataagatgctccattcagctctagatataagaataattactggaaatcgctatgaacgcgatgatgaggaagatattgagtgttcttaa

SEQ ID NO: 102167 - DNA, 306 bp, Enterobacter aerogenes
atgggtagcaaaatcgcaggtgtggttttcttattcttcactgtctggggaatggcttcagtgattgaattgcagtactggcgtaacgctgatacctatcctgtctggctgacaaaacatctccggatctctcccgaaaataacgaaaagagcctgataaggataggaatggaaacctttgacaaggtatgtggtgataacaggggcctccttgccgtcacccaaaaacaaaacggtatgtttatgcgctgtgatgattcccccggatttttttcatggttcagcggcgtttacaaagtcagttaa

SEQ ID NO: 102168 - DNA, 252 bp, Enterobacter aerogenes
atgacaaatatcattctgtgtgatgtgactgccagcatcagcgaacttaaaaacgatccggtggccaccgccagtgccggcggcggctacccggtcgcgattattgaccgcaaccgccctgttttttattgtgtgcccgcggctctgtatgaacaaatgctcgatgcgctggacgaaaaagacctggtgcaattgataacagaacgtcaaaaccagccgctgcgtgaagtggatctcaatcagtatctgtga

SEQ ID NO: 102169 - DNA, 426 bp, Enterobacter aerogenes
atgaagttcattcctgcagtatcagaagccagcatagtaaaaattcctttgttcacagagcgatgccctgcgggttttccgtcaccggctgcggactacacggagtctgaactggatctgaatgagtactgcattcaccggcgccactccacctattttgtcagggcgattggcaactcaatgactgatattggcctctattccggcgatctgatggtcgtggataaagcagaacagccgcggcacggggatattgttatcgcggaaattgagggtgaattcaccgtaaaacgcctgcttctgacgccgcggccagccctgcaggcgatgaacccggacttcccttccctgtacccggatccggaaacgctgcaaattttcggcgtggtgacggccttcattcataaaacccggaaggcagactga

SEQ ID NO: 102170 - DNA, 231 bp, Enterobacter aerogenes
atgaatacgggtttaaggcaggttctgcgatatgcaggcgtcccggttgacgccgctgaaccggtgcgccggcaattcggtagccgcctgattttaatcgtgacggttgctcttcttccgctgttgattgttgacgtccctcagtggctatttgtgctctctcagattatctggggaagcggtatgtacattggtatctccgtggccagtgatcaaccagatcgccggtaa

SEQ ID NO: 102171 - DNA, 318 bp, Enterobacter aerogenes
gtgcgtatgtctctgatgtttgctgccgtgacgcttttaaccggtattaacctgttttttattccgtttcagcctgttccggctctgtggggggctatcctggccgttgcttttgttctgattaatgtcgtggcggataagctgcgcctctggagtggtattgcgtggattatcgttgccggcatcatcataacgctgatgctgaaggggaaagagccgggtgacgaatttcgtgttctgatcaccgttttcgctttcctggcttcaatctggtatagcgttgcgcagttcaggaaggaaaataagctccgttcctga

SEQ ID NO: 102172 - DNA, 993 bp, Enterobacter aerogenes
gtgaaaaccctgacgcttttcctgagtgccctgatgttgtgggggtacagcctcagtgcggctgctgatccctcctgtgagggccggtttgttaacccgatcaccgatgtgtgctggcgctgcatcttccccctgtcgctcggcagcgtgcaggttggtaaaggcgatctgcctgataccagcaatccgggtagtcccctgcagctgtgtccggcgccgccaccgatttttgttcgccccggcctggccatcgggtactgggagccgatggccatgacggacgtcagccgttcgcctggctgtatggtcaatctggggggcttcagtatcaatctcggcaagaccggtatggggaccgcgagaaaggacgacaagcaggtgaacggcgctttttatcacgttcactggtacaagtacccgctgacctactggctgaacatcatcacctccgcaggctgtctggaaggcggagacatggatatagcctatctgtccgagattgacccgacctgggtggacagcagcctcaccaccattctgaatccggaagccatcctgtttgccaaccccatcgcacagggggcgtgcgcggctgacgctatggccagcgcgtttcatatgccactcgatattctgttctggtgtgccggctctcagggttcgatgtacccgtttagcggctgggtaagcaacgagtccagtccgctgcagtcctcgttacttgtcagcgagcgcatggcgtacaagcttcaccggcagggacaaattatggagagcatcgggaaggacaaggcggtctgctatgagtatccgtccccgatcatccccaaagagcgctggcgctatcagatggtgaacatgtacccggacagcggccaatgccatcccgtggggcgcagcgtgatgcgctgggaggccggtaaaaatccacccaacacccgtaagaactatggctatctgatgtggcgtaaacgcaattgtgtctttctctga

SEQ ID NO: 102173 - DNA, 639 bp, Enterobacter aerogenes
atgaaattaatgaatctgtttatggtcatgcttttgctgaccggacgagcagtgttggctgaaacctcctctgttacagacagagaatggctgaagcagcaggagaacctcagcgaacagctgcgccagcatccggataaacagctgcagcaggagcttgaggcgcaaatcaaccgtaatcctctgcccaaatcagaccgccagtttatcgataatctggtcagccagcagaaagcggcgaatcaggaaaagccagcagaaggggcgctgtactttgtctccttctcgatacctgaagaggggctgaagcggatgctgcacgaaacccggcagtacggcattccggcgacactgcgtgggctcgtcaataacgacatgaagaccaccactgacgcggtgctgcagctggtgaaggatggcgtgaccgacggagtgcagatcgacccgacactatatacgcagtacagcatccggagtgtgccgtctctggtggtacggtgtcaggccgggtatgacgtggtacgcggtaacattcacgtcaaacaggcgctggagaaagtggcacaaaccggtgactgcgcacaggtggcccggcagatgcttgatgcgccctcgaatgccgccgggagccagccatga

SEQ ID NO: 102174 - DNA, 237 bp, Enterobacter aerogenes
atgaaaattaattttcacaaacagcctgccattgattttgccctgagattaacgctgacagtaatcattatttcaccggtgatttatttctcctgggatgccgtcaaagggacgtcgggtagtgattatgtcgagagtgtggtttttattgttgcggttggttttttctggttcgtgagctatctcttttttagttcgcttgccgcgttgttacggaaaaagacggaggaagaatga

SEQ ID NO: 102175 - DNA, 186 bp, Enterobacter aerogenes
atgaagacggtgcgcaggtttaataagtttaaagattggttcaggttagcaggggtaatccttattcctgttctgttgataattaacatggcaaagttattaacgagcgatgatgggttcgtaattgttagatctttattgtttatttttgttctcaatattatagccagacgattaatgccataa

SEQ ID NO: 102176 - DNA, 2310 bp, Enterobacter aerogenes
atgagttttaatgccaaagatatgacgcagggcggtcagatcgccaatatgcgctttcgcatgtttggtcagattgccaatattattttctacgtgctgtttattttattctgggtgctgtgcgggctgatgctgatgtaccggctcagctggcagacctttgcgaacggctgcgtatactggtggtgtacgacgctgggtccgatgcgcgatattattcgttcccagccggtatacaccattcagtattacggccagtcgctggaatatacctcagaacaaatcctggccgataaatatactgtctggtgcggtgagcagctgtggaccagtatcgtctttgctgccgtggtttctcttgttatctgtatcgtgacgttcttcatcgccagctgggtgctgggccgccaggggaaacagcagagtgaggatgagaataccggcgggcgccagctttccgataagcccaaagaagtggcccgtcagatgaagcgtgatggtatggcctccgatattaaaattggcgacctgcctattcttaaaaactccgaaatccagaacttttgcctccacggtaccgtaggttccggtaaatcagaagtgatccgccggctactgaattatgtccgtgcccggggcgatatggccatcatttacgatcgctcctgtgagttcgtcaaaagctattacgacccgtcactggataaaatcctcaacccgctggattcgcgctgcgcggcctgggatttgtggaaagagtgcctgacgctgccggacttcgacaacatctccaacacccttatcccgatgggtaccaaagaagacccgttctggcagggctccggtcgcactatctttgccgaaggcgcgtatctgatgcgcgaagacgacgatcgcagctacgagaagctggtcgataccatgctgtccattaaaatcgacaagctgcgcgcctatctgcagaacacgccggcagcgaatctggttgaagagaaaattgagaaaaccgccatctccattcgtgccgtgctgaccaactacgtcaaggctattcgctacctgcagggcatcgagaagaacggggaaccgttcactattcgggactggatgcgcggtgtccgtgaggacagacccaatggctggctgtttatctcctccaacgctgacacccatgcttccctgaagccggttatctcgatgtggctgtcaattgccatccgcggcctgctggcgatgggggagaaccgtaaccggcgcgtgtggatattcgccgacgagctccccacgctgcacaagctgcctgacctggtcgaaatcctccctgaggcgcgtaaatttggtggttgttatgtgttcggtattcagtcctatgcccagctggaagatatctatggcgttaagcctgccgccacgctctttgacgtaatgaatacccgggccttcttccgctccccgagtaaggagatcgcggagtttgctgccggtgaaattggcgagaaggaaatcctcaaagccagcgagcagtactcttacggtgctgacccggtgcgtgatggtgtatcgaccgggaaagaaaaagagcgggaaacgctggtcagttactccgatattcagacgctgccggacctgtcctgttacgtcacgctgcccggaccgtatccggccgtgaagctggccctcaaatacaagccgcgtccgaaaattgccgagggatttattcagcgccgactcgatacgcgtgttgacgcccgcctcagtgcgctgcttgaagcgcgtgaagctgaaggcagtcttgccaggacgctttttatgccggatgcgccggcatccgggcccgcggatacaaacagtcacgccggtgaacaacctgagccgatcagtcagcctgcgccagcagacatgacagtatctccggcaccggtaaaagcgccgccgacaacaaagagtccggcagcggaaccttccgtcagagcaacggagcctcccgtcctgcgggtcacgaccgtaccgttgatcaaaccaaaagcagccgcagcggccactgctgcctcaacagcatcctctgccggtgcccctgcagcagctgcaggcgggacagaacaggaactggcgcagcagtccgcagagcaggggcaggacatgcttccggccggcatgaacgaggacggtgtgattgaagatatgcaggcgtatgacgcctgggcagatgagcagacacagcgggatatgcagcggcgtgaagaggtcaatatcaaccacagccaccgccacgatgaacaggatgatgtcgagattggggggaacttctga

SEQ ID NO: 102177 - DNA, 1077 bp, Enterobacter aerogenes
atgagctggaaactctttctctatgactggggtggcctgaacatcgcgttgtttcaagccatcaacacaggcacgcccgccacgctgaaaccactggcatggttctttggcctcgtgggaagttactggacagcgccgctgatgctgttgggtctgtggtggtggtcgaaatcggctacaaacccggcgcgtggtacggccgttcggcatcgccttattggttttagcgcggccttcttgctggcgttattggtcgccaccgccttgaagctatggttcgactttccacgcccgcctgccgtccttggcgacctggcgcgcgtcatcggggacaaagagcttcactacagcctgcccagcgggcatgccacctatgccgcgatggtggtcggcgcgctctggcctttgatgggccgccgtggtcgtctcagtttaatgctgtacgccacattggtcggctggtcgcgcatcgcggccggaatgcactttccggccgatgtgttggcggggtggacgctgggatggagctgcacggcactcgccgggtggttgctgccgttggccgcccctgtgtggcaatcggcccgccgcacatcggcttgggtctggttcaccgtggccgccagtgctgtcatgaccgatcagctcacgaagttcgccatcatccgcacgtttgcctacggtgagcaagtcgaaatcaccccgtttttcaacctcgttcatgtcctgaatccgggtgcggcattcagctttttggcgaacgctggtggctggcaacgttactttttcatcacgctgggtctggctgtttctgcttggctggggcgcatgctgtgccagcaacggccacgtctcgaagcgatgggctacagcctgatcctcggcggtgcgctgggcaatgtcgcggatcgtgtgctgcgtggacaggttgttgatttccttgacttccattggcgacttgcgcactggcccgccttcaacctcgctgatgtggcgataactatcggagcgctctgcctgttcttgacggttgtaccgaaaagcagtaaaggcacagaggccgaggtgtccggttaa

SEQ ID NO: 102178 - DNA, 2406 bp, Enterobacter aerogenes
atgagcgaatgcgcttcaaaggggtgtggctgcacgactgagccgatcatccaacccacggcaccggccccgctggcaaccggatcggctcaagcggtgtaccgcatcgagaacatggattgcccgaccgaagaggcgctgatccgaagcaaactggccggtctggcgggggtggcgggtcttgaattcaacctgatgcaacgtaccttggccgtgcgacacgaattgccttcgttgtctcccgtcgagcaggcgctgaaggccatcggcatgcaagctgtgcgcatggatcaggcgtcggccgagcagacgaccaagctgtccattgccaagatggattgcccgaccgaagagacgttgatccgcaacaagctcggcaccgtggccggtgttgctgatctcgatttcaacctgatgcagcgcacgctgtcggtacgccatgcgaaccaggttctgccagacgtgctcgtggcactgcaagcgcttggattcgaggcgcaggtcgtggacacggcagaggtcgcatctccatccgccgcccctgtgaccacgccgaccaactggtggccgctgggcatctccttggtcactgcatcggcggccgaggcggtctactggctccacaacggcaatcactggtcggttgtcgttctggcgcttgtcgcggtcttcacgggtggcctctccacctacaagaaggggtggatcgcgctcaagaaccgtaatctcaacatgaacgccctcatgtcgattgcggtcacgggtgccatgttgatcggccactggcccgaagcggcaatggtgatggtactgttcgcgctggccgaggtaatcgaagccaaatcgctggatcgcgctcgtaacgctatccgtggcctgctcgacctgaccccggaacaggccacggtacagcaggctgacggcacatggcgcgaggtgggcgccaagcaaatcaccatcggcgcccgcgtccgggtcaaaccaggtgagcgcatcgcccttgatggtgaggtgctggaaggccgctctgccgtcaaccaagccccgatcacgggtgaaagcctcccggtcgaaaaatcccccggtgattcggtgttcgctggcacgatcaacgaatccggctcgttcgagtaccgcgtcaccgccttggccaacaactccactttggcccggatcattcacgcggtagaggctgcgcaaggtagtcgtgcgccgactcagcgttttgtcgatcagttcgcccgctggtacacccccgttgtattcggcgttgccatcgccgtcgcgttgttgccgccgctgttcatgggtgcggcatggctcgactggatctaccgtgcattggttctgctggtggtcgcctgcccgtgcgcactggtgatctctacaccggtcagcatcgtcagcggcctggccgccgccgcccgccacggcattctcatcaaaggtggcgtctatctggaagaaggccgcaagctgcgctggctggctctggacaagaccggcacgatcacgcacggcaagcccgcacagaccgactttgtcacatggggcaatgcactcgcctcggacagccgcagcatcgctgccagtctggcggcccgctcggaccatcctgtatccaaggcggtggcacaggccgcgcagacggacggggttgccttgctcgacgtggccgaattcaacgcgctgcccggtcggggtgtgcaaggccaaatcaacggtgcgacctaccatctgggcaaccaccggatgctcgaagagctggggcagtgcacaccagagctggagcagcgcatcgctgcgctggaaaccgctggcaagaccgtcgtgatgctggtgggcgcaaaaggggtacatggcttattcgccgttgcggacaccatcaaggacagcagcaagagagccatcgccgagctgcatgctctgggcatcaacaccgtgatgttgaccggcgataacccccacacggcacaggccatcgccgcacaagccggcattgaccgcgcgcaaggcaaccaactgcccgacgacaaactgcgcgaagtggagcaattgtccagaaacggcaaggttggcatggtcggtgatggcatcaacgacgcaccggccttggcgcgtgcggacattggctttgcaatgggagcggcgggcacagataccgctattgaaaccgccgacgtggccctgatggacgatgacctgcgcaagattccgaccttcgtgcgcctgtcgcgtgcgacagcacaggtgctgatgcaaaacattgtgctggcccttggcatcaaggcggtatttttggtgctcaccttcacgggtcacgcgaccatgtggatggctgtgttcgccgatatgggtgccagcttgcttgttgtcggcaacggcttgaggttgttgcgccgatga

SEQ ID NO: 102179 - DNA, 441 bp, Enterobacter aerogenes
atggaaatcagaattggcgacctcgccaagcgctctgggtgcgaggtcgtgaccatccgctactacgagaaggaagggctactgccaaagccagcgcgaagcggtggcaactttcggttgtacggtgaggcgcacattgagcgcttgcaattcatccgtcattgccgttcgctcgacatgacgttgagcgagattcgcgcattgctgggtctgcgagacaacccgatgcaggactgtggggaggtcatcacgctgctggaggcccatattcaacaggtggaaatgcgtgtgtccgcgctgttgcagttaaaacggcacttggttgatttgcgcgagaagtgttctggctctcgatctgtagaggcgtgcggcattttgcaagggttgggcaattgcaattgccatggtgaaagtgccacgaacagtcaaacatctgggtaa

SEQ ID NO: 102180 - DNA, 1224 bp, Enterobacter aerogenes
ttgttgctcgctggcttacccgcctggttaatcgccttattgtcggcattatttctcattgcgcttatctgcgcattgatattttgcaagtttacccagcgtgtcgatgttaaaggcgaagtcattaccctgcctcactcaattaacgtctttgcgccacagcaggggtttatcgtcaagcaattcgtaaaaattggtgacgtcgttaaaaaaaaccaaccgctatacgagattgatgtttcccgcagcaccaccagtggcaatgttagcgcggcacagatagaagttatcaatgaaaaaatcgccaactctgaagatattattaaaaaactggaagataataaaaaccagacgttaaatgcgctgaatgcgcagttgaaaactaccactgcctccctgaaggagaccaaccgtatgctggtcaacacccaggtaggcctgaagaaaatgcatgataacctttccagctacgataaataccttagcaacggcctgataacaaaagatcagtataactatcagcactctttatactttcagcagcagagtgcctaccagtctttagttagccaaaaaatgcaactcgaatcgcaaattacacaacttaatagcgatataatcactaaagctgctgattttgacaaccaaatttccagtcaatacaaccaggccaatgattataaaaatcagttagtggaatctaatgctaacggtaatattattatcaaatcgaccagcgatggcaggattgagtcactgtcggctacccaagggcaaaccgttgataatggaagtagcctggcccagataaaaccgaccggaaacgttgagtattatctcattctgtggctacccaacaataccattccgtatttaaaaacgggagataccatcaatattcgctatgatgccttcccatcggataaatttggtcaattcccagggaaaattatatccatatcatcaatgccagcgtcacggcaagaaatgtctgaatacaccaacgtcagtaacggtaccaatcagcaacaagaactggcgctgtataaagcgattgtcaaaattaaagataaacagttcgaatatgacgggaaaaagctaagcctctccaatgggcttaaagcacaggctgttgtcttccttgaagaacgccctctctacatgtggatgtttactccggtttataagattactcaaagcgtgagcggcccgattcatgactaa

SEQ ID NO: 102181 - DNA, 1017 bp, Enterobacter aerogenes
atgaagagaatgtttattctattaatgcttttagttatctgcggtgaggcgactgcaaaatgtagttactcaggcagcatccagcggcaagcatttactattagagcaaaaataccgacagacgactcaattccagtgggaagcatattatattcggctaaatacggcactggtaactataaaaacttctcatgtagccaaaaaactaacgatcagtatataactaccatcagtacaccagaagtagctggcgttacaggaatacagggaaagccagtatatgaaaccggaattgacggtattggattccagatatccgatcttctggaaagcaaaaatggcgcattagtgcctgctgtcgcgggctcagtgctagtaccatttgaaaatacgtcagataattactataaattcattaccgtgtggtttatcaaaaccaagcaggtcattgatacttcaggttcggactcaaacccatcaataagtttctctgtcggcaatcctaccaccaaccctggaactaatgacaaactattatatacaaccaatatcaagctaaaaaacaccaaatatcaggcaacctcatgtgacatatcaccatccagttcacaaataacgctcggccggattaaaaaaagcacgctaatgtcggtctcccgcggcggcgtcacgccagagcaaaagaatttcttattaaccattacctgccctgcaggttccatcgggaatactttaatgtactggtttaatccgataggcaccgcgagcacatctggcgatggtatcattgataatatgataaccgacgattctggcgccaaaaatgttggtatcattttcaaacaaactggcaccccgttagtcttttatgatatggatagctacagttttaatagtgccgcaacatcgcaggtgatcaatctcaccgctgattactatcgcaaaagcaatagtgttgacgacattacaaatggtagagttaaagcaatgttagaagtagttattcaggaacaataa

SEQ ID NO: 102182 - DNA, 213 bp, Enterobacter aerogenes
atgaaagtatacggcaatcaacactcatcagaggctttcttccgggaaacttccccatcctgttttgaaccaaaagcggaaaaggtgatcgcttttcatggaaaggatgccagttacgcctataacgtgctggccgatctgaaagccgcaggtgcttcatatacgcgccggaatatcatcgccgatatgttccgccgtctgggtgtgaaatga

SEQ ID NO: 102183 - DNA, 225 bp, Enterobacter aerogenes
atggaacacgtgaaaggaaaaatccagcagggggcagggaacgcctattttgcagggatgcagtggcgcggtattacacttggacacgccgatgctgcagcgcttaatcagtttgatatcgatatcagcaaagctcaggcacccgaagcacgcacctggttgcttcagaacaaagcagaattcatcgctctgatcctgggcattgaagtcgtaaaggtcgggtag

SEQ ID NO: 102184 - DNA, 138 bp, Enterobacter aerogenes
atgcattacaggttcggcaacgccaaagaacatcaggccgatccccatccctgccgaaaaaagcatcgcaaaccaggaatggtagctgaaatcaggctgcgcatggtccgggcccagcttgatatcaccgtagcgtga

SEQ ID NO: 102185 - DNA, 123 bp, Enterobacter aerogenes
atgctccaggaaattaaacagggccagcgccacatcctgctgaacagtattggcgaggtctgtggccccctggttcataatgagatagatcgcgctgttaccaaacactgtcatccacattag

SEQ ID NO: 102186 - DNA, 225 bp, Enterobacter aerogenes
atgctccaggaaattaaacagggccagcgcgacatcctgctgaacagtattggcgagatctgtggccccctggttcataatgagatggatcgcgctgttaccaaacaccgtcatccacatgagcgtaaaacctgcgggaacaaacagcacgccggtgacaaactcgcgaatggttcgtccgcgggagacccgtgcgatgaacatccccacaaacggcgaccatga

SEQ ID NO: 102187 - DNA, 204 bp, Enterobacter aerogenes
atgttgctattaacgaaccaggtgcaggaagtgcaggtgtttttcgtactggtccagtatgtcattaatcagctgttcctggttccagcccattacatcataattttgcccgccttctttgagataaacttcagcgcgataatatcgatgttgttcagtctgctgctcatcattatccatcgcggcgagcgcgaaggtcggtga

SEQ ID NO: 102188 - DNA, 1128 bp, Enterobacter aerogenes
atgtctttaaaacttaaaaagttgactctgcattttgcaatagcaggttgtttgagcgcggcattttatgcacaggcggatgtgaagattggcgtggccggcccatttaccgggccgaatgcgacctatggcgcccaatactggaaaggggcatcgcaggcggcggcggatattaatgccgccgggggaattaaaggcgaaaaaattgtgctggtgcagggcgatgatgcctgtgaacccaagcaggcagtggcggtggctaaccgcctggttgatgattccggcgtctcggcggtggtgggccatttctgctcttcctcgacgatgcccgcttccgaggtctatgacgaagccgggatcctgaccatcacgccgggctccaccaatccgcagatcaccgaacgcggaatgaaagatatgttccgcatgtgcgggcgcgatgaccagcaaggggtgattgctgccaactacatgctggatgtgctgaaggcgaagaagatcgccgtcattcacgataaagatacctacggtcagggcttagccgatgcgacgcgcgcggcgctcgcgaaacgcgggacgaaagaggtgttgtatgaaggcttatcccgcggggaaaaagattttaatgccctggtaaccaaaatcggcgccctgaaaccggatgtggtttattttggcggctgccatccggaagccggcccgctggtgcgccagatgcgcgagcagggcgtccaggctaagttcttctccggcgactgcgtggtgaccgaagagttggttaccgccgcgggcgggccgcagtttactaatggtgtgttaatgaccttcggtaaggatccgcgcaccattcctgaaggtaaagcggtgatcgacaaattccgcgccagcggttttgaaccggagggctataccctttacgcctatgcttccattcaggctatcgccgccgcctataacgccgccggtaccgataatgccaaagccagcgaatggctgaaaaaccacagcgtcgataccgtgatggggaaaaaggactgggatggcaaaggcgacctgaaagtatcggattacgtggtttatcaatgggatgataaaggcaatatcatcagctgtaacccgggattgtag

SEQ ID NO: 102189 - DNA, 231 bp, Enterobacter aerogenes
atggtaaaaaatcgtacagctgaaaaccttgagaaaaaagggttatggcgtagagccgctacttgctggctatcgattatggaccattgtcacaccgcagaagaacaggattgggtaagaagacggagaaactactgcctggcacatattaaacgtaccaaacattcatccggtcttgaccccgccaaagtacaccgttcagtatcaactatgataaacaatatcccttag

SEQ ID NO: 102190 - DNA, 438 bp, Enterobacter aerogenes
atgtggcgcaggctgatttaccacccggaagtcaactatgcactgcggcaaacgctggtgctgtgtctacctgtggccatcgggcttctgctcggccatctgcagcaagggctgctgttctctttagttcccgcctgttgcaatattgccggtctcgacaccccgcataaacgttttttcaaacgcctgatcgttggcggctgcctgtttgccggcagcagcctgattgtgcaattgcttctggcacgcgacatcccgttgccgcttatcctcagcgcgctggcgctgattctcggcgtgacggcggaaatcagctcgctacacgctcgcctgttgccggcatcgcttatcgccgccatttttaccttaagcctggctggcaatatgcccatctgggagccgctgcttatctatgcgctgggaaccttgtggtactga

SEQ ID NO: 102191 - DNA, 1434 bp, Enterobacter aerogenes
atgttagccgccaaccagcgtagcgatcataagcgactgctgcgcgcgttccaggttgggctggatctgcaggaacatatttcagtgagcctgcaccagccggaagaggtgcaaaaactggtggagcgcagccatgcggaagcggtcatccgctggaacgcgcagaccgtcgccgcgcgtctgcgggtgctggcggatgatattctctaccaccgctacccgcgtcgctttcagatggataagcaaatcggcgcgctggaaaaaatcgcctatcagcatcccgataacccggttggccagttctgcgcctggcacttcagtcgtatcgcccgcgtgctacgtactcagcgcccgctgtacgcacgtaacctgatggcggacaaagaacgacgcctgccgctgctaccggccctgaagaactacctgtcattgaaatccccggcgctgcgcaacgccgcgcgcatcagcgtaatgttgagcatcgccagcctgatgggcagcgccctgcacctgccgaagccttactggatcctgatgaccgtgctgttcgtgacgcaaaacggttacggcgccacccgcgtgcggattgtccaccgggcggcaggcaccctggcgggcctggtgatcgcctggctgaccttacacttccacgtaccggagagctatacgttaagcggtatgttgttcatcacgctgctgagctatctcatcattcgtaaacactacggctgggcgatggtgggctttaccgtcaccgcggtatataccctgcagttgctaacgcttaacggcgagcagttcatcgtcgcccgctttatcgataccatcattggctgtctgatcgcctttggcgggatggtctggctatggccgcaatggcagagcggcctgctgcgtaaaaacgcccacgatgctctggaggccgatcaggaggctattcggctgatacttagcgccgatccgcaagccccggcgttggcctaccagcgtatgcgcgtcaaccaggcgcacaacgccctgtataactcgcttaaccaggcgatgcaggaaccgggttttaactcgcactatctggaagatatgaagctgtgggtaacccatagccagtttatcgttgaacatatcaacgccatgaccacgctggcgcgcgagcatacgatgctaacgcctgacctggcgcagcggtatctggaatcttgtgaaattgcgctgcagcgctgtcagcagcgtctggattcagacgggccgggcagcgcgggcgatgtaaatattatggaatcccaggacggggaagtgttgcgtgggccgctcagcacccttgagcagcatctgcagcggatcctcggccatctgaacaccatgcacaccatttcgtcggtggcatggcgtcagcgtccgcatcacggcatctggctacgcacgactaggcgctaa

SEQ ID NO: 102192 - DNA, 231 bp, Enterobacter aerogenes
atgacattggagactttacctaattgcccggtttgcggagaaggaaggccgcgacagataggacaacatcgggccatttatacagcccacatgcaccttgaatgcactaagtgccattaccgcatcacacgagcctatatggctggctcagaaagaaaggcgcgggaagaactaagaaaagagtggatttctcaggcagataagaaaaatagcgagaagacaaatggctaa

SEQ ID NO: 102193 - DNA, 399 bp, Enterobacter aerogenes; identical to SEQ ID NO: 5182

SEQ ID NO: 102194 - DNA, 150 bp, Enterobacter aerogenes
atggaaaaccgccgcccgctgatgggtcgatggacgacattaccttcagagtgtgaatcggctctcttgacgccggggaaacgcaaagaaaaaagccatatcgataaagtggttatcaggcagatgcccgaagccgggcgcgatggataa

SEQ ID NO: 102195 - DNA, 1341 bp, Enterobacter aerogenes; identical to SEQ ID NO: 90344

SEQ ID NO: 102196 - DNA, 1140 bp, Enterobacter aerogenes; identical to SEQ ID NO: 90343

SEQ ID NO: 102197 - DNA, 198 bp, Enterobacter aerogenes
atggataagtgccaaggtattttcggcaaaatttttggtcattcattccgggtggcgataacaaaaggcgctcctgacttaaggctaagcgaatatcagggtgggcgaggcgttctgttagacattatggaaaaaactaggcgcgaaacctatcacggaatttactgtaagcgctgtgggaaggttattgatggctaa

SEQ ID NO: 102198 - DNA, 825 bp, Enterobacter aerogenes
atgaccaataaccagttaatagacgaacgtgttacctcggtaattgagcgcctggagcattacgcctgcaatctcaagtggacaaacgttcgtggagctcaagacctcctgactgctgctgatggtctgcgtgagctacaggaacgtcgcaaggccgcaatggacagtgagccggtggcagaaatcaccgaggatttggggcgtttgtttgtcaaaatccactctccaacaatattaagagctggcgacaagctctatcgccacgcgcagccagcacctgaacttgacgctattgttgagcgccttaacctcagcggatatgagtatgaaggcggagaggttacaccgcaaaatgcagcagccatagtcgatactctcctgcaacagctcgatgacgcagtacagggacgaaacgcgcagccagcgccggtagtgccggatggttacgtgatggtgccaattgagccgacaatgtcgcaggagctggcgggatataagacgctgaacgacacggggaggatgtcgcgcctgatgaagactagattgtcaaatatttaccgcgcgatgctcgctgccgccccgcagtttcacggcagtgacccagccatcgtgccggatacatggattccggtaagcgagcggatgccagaagatgagcaggaggtgctcaccataaacaggatgggccatcgctttgtatcattcttcgataagcactcagggttgtttttcgacaggcttgatgcgccatcagcatgctgcaaagagcacgtgctggtaacccactggatggaattgccagccgccccgcaggaggtgaagtga

SEQ ID NO: 102199 - DNA, 381 bp, Enterobacter aerogenes
atggcactgaccaaaaaacagcgcgcagagttgcgcatgaagtttggcggccgctgcgcttactgcggctgtgagcttggagataagtggcacgctgaccacgtcgaagcggtacgaagaaatatcagtaacggctacgcaatggacaggccagaaaacgatacggtcagcaacatggttccggcgtgcatcccctgcaacctgttcaaaatgtgcagcactgttgaggattttcgcaatcgtattgcaacccaggttgatgtgactcgccgggcatcgagaagctaccgtacagctgaatcattcggcctggttcgaccaactaacgcgccggtagtgttctggttcgaaaagtatcaggcagaaggagccaaccaatga

SEQ ID NO: 102200 - DNA, 201 bp, Enterobacter aerogenes
atgatgtggattttatttgtttggttgggcggaacctattccgtgagtttgtctgatgctgtacagcctacgctgacctcaatgaatcaggaattcaactctgaaagcgcatgccgagcagcctttgtgaaaattaaagaggttaacaacggtgagctcatgctgcgcggtgtgtgtgctccaaagggggagtctgagtga

SEQ ID NO: 102201 - DNA, 516 bp, Enterobacter aerogenes
atgactgatatcaccgaactggcgcagagcctgaaagcggcagcagagaaatctggtgtcgagaaatggcaggtgaaaaggagtggtcctggcgaatatgaagtgattgttaaggggagtctggttaaacgtaatggctggtcaacttaccgaccagtgactgaaggggtcgtcgataaaaagacggctgatttcatcgccctggctaaccctgccaacatcctcgcactggtagaggcgctggagaaggcgcagcagcaaaatataagcgactttgaaatcaaagcccgtctctgcaaagagagtaatagcctccacgacaggttgagagaagcagagaagcgcatcgccgagctggagtcccgcaccgtcaccgtgaagctgccgaagctcaaaatgctcgaagactatctcgctggggttgctgttgaagagcggaaagagattttgctcggtgtgcggatggagtttcatcgcctgcttaacgatgcgggcatcaaaacggaggtcgcatga

SEQ ID NO: 102202 - DNA, 228 bp, Enterobacter aerogenes
atgagcaactggcaaatgaaaatggaaatcgcgaagcagttaaatatcgcactcaagaacctcaatgccccagttgaattgctctgcatagtcggaagttacggggatacgcagacggattctgatgttcttgaggcgcttgagcagcacaacgagcgcggaacctgcatggaacagattatcgctcccgcattcatctggtcgccaaaggagagcaagcatgactga

SEQ ID NO: 102203 - DNA, 132 bp, Enterobacter aerogenes
atggatctgaataagttaagtcgtcgtcaggcgtggatactcggcatcggcgcatgcctggcagtatggggagtgattgtctcggtgatcgctattggcgtcatggttgtgcgcaacggggtgtgctcatga

SEQ ID NO: 102204 - DNA, 141 bp, Enterobacter aerogenes
atgtacgaactgtttggttttgaacttgccgacttcaaagagctcttctatgtcttttgcctggcagtgcttgtttaccgctacatcactgtcgggcgaaaatacccgctctttggaacccgaaacaaaacaagccactag

SEQ ID NO: 102205 - DNA, 306 bp, Enterobacter aerogenes
atggctaattttctgtattgggattacctagtatggttctcttatgccgctatgccggttgtgattttttttattattttgtttaagcataaaggaaaatctgcaaattcaaatccggaagaactgaaaagttcgagtctacggtcaaaaaatcacataaaaaatgaaaaatcagaaggacttgactctacaactattttccaaaacgagcgtattattgacgattttgacccaacagaccctttttcactagcaagtagaatgaatcagcatcttcacgaatatcctgagtcaaaatttgattaa

SEQ ID NO: 102206 - DNA, 414 bp, Enterobacter aerogenes
ttgaaattcaataacaatcaaaatgaaaaatgtctcaataaggtgttgagttatttttcagaaaaagatactaaccttattgtcgttataatagggccttcccggtcagggaaaacccttctggcgaagcgtgcattatttgatggtttatttatttcaccagatgagccgatagctggtgagaattttattcagagtttatcaaataaagatatcatcgttgatgatgttgtcctttttgatatgcggaatgtgttgaaatacgttcttcattcacttgcctcgggaaggaaagtgattttgaccgggcgtccggaagatgagtctttgtatcagaagcttctgttaaatttgcctaaggaaatttcaccattatttattaagctggcgggtgaaaattccttgtatctgtga

SEQ ID NO: 102207 - DNA, 534 bp, Enterobacter aerogenes
atgcccacgttgctgaaagaatactggaagccactggcgatcattttgctggtggcttttttattatggcgtgcctttagttttggcgtcgggacctctgacagtaactggcgtcagaaatggctacagcgtgatatttcagattcgacagcaattcttcatcgagaggttgcagaacgggccaaagaacagcgccgccagcaggccgcagacgaggagcagaaacgagcaaatgaagaactggcaaaagtacaagccaatgctgatgctgctcagcgtgctggcgacggcctgcaacagcagctcgccaaacttcgcagccagctcgcaggaagtgaaaccggccgcatttccgcagttgccgcagcaggcgcggcaaaagccgagaccgctcgagtgcttgccgagttgcttggagaatctgaccgcagagcgggaatctatgcaaaagaggctgacagcgcttatgtctccggcaacagctgcgagcgaacctatgacaaagtgacgggacataaccccactaagggataa

SEQ ID NO: 102208 - DNA, 792 bp, Enterobacter aerogenes
atgacgaccattattcgcaataaagacgtaatcatcgctaaccctcaacttaaaccgatttataccccgttcgtggctgagcccggcctgctggctgcatggcggtttggtgatggaatggatgacctgagcggcaatgccaataccctgacggcgattggctccccggcaaagggggagtattttattagcggtgacaaagataacgggtttattacctctgtacctgacggactgcagcgtacgttaatcgctgtatggcgtaatcattcaactaccgacgcatacgcctacccggtagggaatctgtcacagcagtcggctgcgtcaggtgtcggcattggtctgaaaagtaacagtagttcatcggctaacctggctcgctacagtggcaatgctggtgggttaacctactcaggaaatctgtacgccgttgcagatggaccggctgatagctacgcgaacagaacgaatttccactgggctgctttttctgttgatggtgctggcaacgttgccaatttatatcttccaaagcaaaacgctgcgttaattccggcaacaatcgcttcaggggctaatctggccactcgcgatattaccgaagggggagttagtagcctttaccgcttgattgctttccgttccccaacgaacccgccaaatctaccgggaactgatatcgatgtagctgaggtgcttgtttttgacaacgctctgaactttgcggcattgcaaaggacttatgctcgttcacaggcatacttggcttcgttcgggcaagctatttag

SEQ ID NO: 102209 - DNA, 357 bp, Enterobacter aerogenes
atgaaaattcacattgataaatataaaaatcatggtgtcaggtttgccatcgatgactttgggacaggatattctaatcttaatctggtaactgcgcttgatgtagatgaaataaaaatagacaaatcgctaactagtgctattggtactgaatctttacgatatgatcttcttcccggactgcatgagatgttccgctccattgcagataagattgtgtttgagggtgtagagactcaggagcaggtgaactatctgaagacgttctggccacagagttatgctcagggctggtattactccagagcgcttccgctggaagaagcgagaaaacttaccatccgggaattgaactga

SEQ ID NO: 102210 - DNA, 294 bp, Enterobacter aerogenes
gtggcgcacgtcttcggtgaacgcactctggccacactggagcgtcttctgagcctgctgtcggcctttgaggtcgtggtatggatgacggatggctggccgctgtatgaatcccgcctgaagggaaagctgcacgttaacagcaagcgttacactcagcgcattgagcgacataacctgaatctgcgacaacatctggcaaggctgggacggaagtcactgtcgttctcaaaatcggtggagctgcatgacaaggtcatcgggcattatctgaacataaaacactatcagtaa

SEQ ID NO: 102211 - DNA, 405 bp, Enterobacter aerogenes
atggcctatgacttcaaggaagccttcttctgcatctacgacgaacccgacaagcagagtgctcagaacgcctttgaggcttggaagaacagcctgccgccttatggcatggagcctttcaaaaaactggtaaaaacggtacacaaccattacgacgacatctttgcctactgggatgcgccgttctcactcaccaatggctataccgaagggctcaacggtttgatcaagatgtccaaccggttaggtcggggttatagctatgagatcatccgtgcaaagacgttgtactccaaagaagcccgcaaggttggcagtggtattcgagcaggacgaggcaaggtcgagtatggaccgcacattccgacattgttgaagcaggcagaaggtggagagttggattaa

SEQ ID NO: 102212 - DNA, 435 bp, Enterobacter aerogenes
atgaaaaagatccttgtatcatttgttgccattatggctgtcgcttcatccgccatggctgcagagacaatgaacatgcatgaccaggtaaataatgcccaggcacccgcccatcagatgcagtcaacctctgaaaaaagcgctgttcagggagacagtatgacaatgatggatatgagtggtcacgatcaggctgcaatgacccatgaaatgatgcaaaacggcaacgcttctgcccatcaggacatggctgaaatgcataaaaaaatgatgaaatccaagccagcagcttctaacgaaacagcaaaatcattttccgaaatgaacgagcatgagaaagccgctgttgtacacgagaaggcgaataatggtcagtcttcagtgattcatcagcagcaggctgaaaagcatcgcagccagatcacccagaattaa

SEQ ID NO: 102213 - DNA, 651 bp, Enterobacter aerogenes
gtgacggttcgccggtggatacagtcaaaagcgttccctgaaatatcaactaagccacccagacccgggttacttgaaccatggcaggaatggctggaagaacaacggataaacggtaaccataatgccgggcagctatggcgggagatggtaaatgctggcttcaccgggagcgaaacgacggtcagggatgctgtggctaagtggcgtaagcaggttaacagtcccgttatcgccccagttcgactcccctcagcatccagagtaagccgctggttaatgccctggcgaatgatcagaggagaagaaaactatgcatcccgcttcatcgaatcgatgtgccagaaagaaccgcaactgaaaatggcgcaacagctgtcgctcgacttctatcgaatgttgaaaacgaagaataaatcgcagttaaatcaatggttctctgacgtcagtcaaagtgggctcattgaccttcagcgtgttgcggccggtatggaagcggatgcaacagcaatacacgaagcgataagcagcagatggagtaatggcgttgtggaaggccatgtaaaccgcctgaagatgctgaaacggcagatgtacggtcgagctggcttcgagttactgcgacgacgagtcatgagccctctggcttaa

SEQ ID NO: 102214 - DNA, 816 bp, Enterobacter aerogenes
atgtataacaaaatggcctcacttaagagacttttacagctaccgcgcgggtggcaaacctgccgacagattactggtactgatggaataaccctccatctccgcgccacacgtaaaacggcatcatgtcctgagtgcctcacgcacagtcattctgttcatagttgccggcggaggcgagtacagcatcttccatgctcaggccaggccctctggttagtcttcgccatccggcactggtactgtcgtaacccttcctgttcacgtaaaatttttgctgaatcgcttgctccctttgcaggcccgcagcagcagtcttctgcattgctgaaaaatctgcagcatcagctggggcttatcgcaggtggtgaagcagggagacgagctgcagtagcttcaggaatacagatcagcgcggatactttactgcgcagagtggttcaagctccggaacaaacagagaaccggaccaggcatgttggtattgacgagtgggcatggcatcggggccacaggtacggcacactgatcgtaaatcttgatacccatcgccccctggtgttactgccaggccgggagcaacgcactctggcggcatggttcaaaaaatacccagaaatacaggtcgtctcacgcgatcgtggggggatctatgcgttagctgctcgcgatggtgcaccgcaggcaatacaggtggccgatcgctggcatctgctgaagaatattggtgatgcgctggagcgcatgatgtacagacacatgccattgatacgactggtggccaccgagttatccccccaaaaaacagaatgctga

SEQ ID NO: 102215 - DNA, 474 bp, Enterobacter aerogenes
gtgtttcaggcattctcccggatcatcaaagaggccaacgaccattttgtcattatagacactgcgcccaccgggcatacgctgctgttgctggatgcaaccggggcctatcaccgggaaatggtgcgccagatggggcaggctcacgatcacgtgataacgccaatgatgcagctgcaggatccggagaagaccagagtcattatcgtgacgcttgccgaaaccacgccggtactggaagcggccgggctgcagcaggacttacgccgggccgggattgaaccctgggcgtgggtcatcaataacagcctcgcggccgcgaagccgtcctccccgttcctggtcacccgtgcccgtcgcgaactgccgctgatcgacgacgttgccgggcattatgcacagcgcattgccctgacgccactgctgaaggacgacccggtaggcgtggacctgctggctgaaatggcgggctga

SEQ ID NO: 102216 - DNA, 558 bp, Enterobacter aerogenes; identical to SEQ ID NO: 25303

SEQ ID NO: 102217 - DNA, 729 bp, Enterobacter aerogenes
gtggcaaaatttttttttagcttaaagttacaggaagcaatctcttcaatatctgtcatgaagatgcttgttgagcaggcagaagcgaatatatcccgtgcactaattgatgctgataagccagaagcagttgagtcaggggaatttccggaggaacaacatcatgaagatggtcgaattacaacgtttccatgcacttactattcatgcggttcgtgctttggctatgatgaagatgaagttaggtctaaatacaaacatctgatcgcgcagttgacccgccgctccgtatttcttaccatttttggtctgttcgaacaccgtatggttgattgcctcgaacttatggacgacctttcgtgcaagactacagacaaaacacgcaaaaccgttgaagattgccacaagcgtctcaaacgcaacttcggcggtaaaagcatcaaggatgtcgatcacctggcagttatccgaaacatcatggctcatagcgatggtgttgcagaagattataagactctttcctgtaaaaaaacaaaaaaaactgaatatgaaaaacgtctcctgcgtgctattcctcgtacgatggctgagaacgccggtgtgtccattaacatgtttaatgacatacttatggatgatcggtttctgatgtatgccgtcggtgaatttgagcgctatgttaatgaactgaacactgcagttcgcacttatcaaagcagattgacctga

SEQ ID NO: 102218 - DNA, 186 bp, Enterobacter aerogenes
atgccgaaccggtgcgctaaccggctgaccttcagtggaatacatcacgccgatgaactcaaaacgtgggtgcgtggcgagcaatcgcctctgcccggactggattatcaacaacattgcacgctttggcggctgaacagggggcgggcgggagaccgcccggagacagaatggaaaaacgcatga

SEQ ID NO: 102219 - DNA, 603 bp, Enterobacter aerogenes
atgttagttatggttgcaatgatgggggaggtaatgaataaatgccaggaagaaacaaatcgggtgatgacgctgcgaaaaataccttctgatgtcgatgctgctattacagagcaggcccgactgacaggtaaatccaagaacgatcttgtgcttgagctactgacagccacattcggcgatctgttgggaaattttgtgcgtaccagcgaactggttgccttgatggacaaggaggttgcccgactgactgaacgggagatcacttctcagagctttgaaagcgatcttgtcccgatctataaccgggaatactgtcgtatcctcgaacttaataatgaagacgatctcaagcgtataatgatgaataatattccttatctcgagcttcgtgcacgacagcttcgttacggtatgatcccttttctgcctaaaggaatttcgatgataatggctctgttctgtgaagtggccggacgggacggactgaccatcgcccagttctatacttctctctggtttgttatcgggcaggaggagtattacaaggagattaatgagatcagaatcgcgaaatccctgttgccaataaccggactctga

SEQ ID NO: 102220 - DNA, 1029 bp, Enterobacter aerogenes
atgacagcacaacgctacataacgacagagaggctggatatatataaaaagaatctgaaggttaaaccctctcaggtcatggctgcatatcactggaataaggcgttggcaggggctctactccctgccatgcagtgccttgaagtcacgctccgtaatgcgttgaataccgctatacagtctttcccgcctgccggggcgaaaggcctgtgggacacaaacgcaaactgggttaccagtctccctaaatacatgggggatacccgtattaatccggctgaacgttaccagcgagccaggacgccaagagatcgccaggatgcggcaggctataaagtggacagatggggtaacaggctcctggcgcgaacattgtcagaagaaaaccaggtagccatggctaagtcccagattagtaaggaaggtaaaaaaccaacgccagaccggattatctcaggtcttacgtttgggttctggaccacgttgctgacagacatgtatgaagataaccagagcgatcgattactctggccggccctgacttcgcatgtgttcccgaacgcccccgcaggttttactcggacagatatttgtaaagcgttctttcaaataaaagaactgagaaaccggctgtcgcaccatgaagctgtgtggaaatttcaccaacgcgatcccgttaccgggaaaacggattactccaaaccagtatacggtacgcaagccagctgcagtcttctgaggaaacactatgatgacattctggaaatgataggctggatgagtcccgaccggaaggctaatttcctgagtcattcaggaaatctgcgtttctatgccctgtgctcggtggacggactgaacagctacatcgccccggaaaaaattaaggcgcagattaaggtttcacggggtggtaaaggtatcagcaggttaatcaggatcctcgaaaaaaatgagttcatccggattgtgaaggagggtcagacggtacttaccatcggcaatgataattccatcgccattctctag

SEQ ID NO: 102221 - DNA, 2805 bp, Enterobacter aerogenes
gtgaagctattcccgaatggctctgaatggcgtaaatgggatctgcatgttcataccccttcgtcatcacttgagaatcagtatcggaatgactgggaagcttatctttctgcaattgaagcgtttggcgacgaggtcgctgtcatgggggcgaccgactactgcactatctccgggtatgagaagctgctcgcataccgtgcacagggccggatagccaacattgaggccgtttttcctaatatagaatttcgcatcacacctgaaacgcaaaaagataagggtgtgaatattcatcttattgtcaatccggcggatgccggtcacgttgacaaaataaaacacgcgctgggccggcttcacttccgttactgcgggcagaactattcctgcagcgatcagcagctgactgaactggggattgcggtagcagggttgtcctctcccgagaaaaatctgcgcgacggcattaaccagttcaaaccttcttttgacgtctttgaggactggctgaggagtgaaacctggctgcggaacaacgttattgtcattgcatctaacagctcaggagacggaatctccgggctccgcgacaatggtcttcttgctgtccggcagaacatctatcacctggttgatgcgattttttctggtaacccgcaggattgtgagtactttcagggacgcggcagcgacagcagggctgacgtcatcagtaaatacggcaagctactcccctgccttcacggttcggatgcacatggactgactaaaatttttcgtcccgacggggatcgtttttgctggattaaagccgatcctacttttgcgggattaaaacaggtactgtacgatcacactcgcgtcaggatccagaaaacgtccccccatacaaaaacgccttatcaatatattaaacacgtctgctttacggatcgcagtggccatgcacttttttcagaccagcctgtaaacttcagtcccgacctgaatgcaatcataggcgggaagtcttcaggcaaatctctgctgctttaccacatggcatgcgccattaacgctgatgaggttagcgagaaaatcaggatctcaggacaagccgcctatgacgactttagcaatctcgatgttgaagtcacatggggaaacggtgaagttagttcattacatggtgacgactgtcggcctgtgacctacattccgcagctctatatcaatcaccttgccgaacgtagcggtcagcttcagctaaatcagctggtcgaggaaattctttatcagaataataatttcaaggctttcgcggttgagaataccgcacagcgggaagcgactattcgggtcataaaaaccaggattgattatcttaccgagctgcgcaaaaaatacagcgaatgcggtaaggaaatggagaagtacggcacggaaaaggcggtaagtgatgaaatccggcggcaggaggagaagatagctcaactgaggaagcaggcatcgtttacaccggatgaagaaaagcagtatatggcactcagactgcgcacggacaaccttcaatcccgtcggcgcgcgatagaagatcttactgatgccagcagaagccttaaagaaagcctttatcggcatgccggtagcacgatacaaagccttaccgaccaactcaggctggatattccgctctctgagaattcctcttttttggagaaaagccttcgtcagctggaggccagtctttcagctgctgtcagtgacttcattggtcgccacgaggcccgttttggctgcatccccgcaaggctgaggcggattgataccgaaagcgcagccaaaaaggaaacgctgcttcccctgtcagtaaaaattaccgatcaggaaacgctcaaagcatccatggctgcgcttgaaaaggaaagagaaaaactcagacagctacaacagctctctgaacgccgtcggtccattttacaggaaggtaatgatacaaaaaaccagctccagaccgagtatgcgcgccttactgacctttaccaggcttacgtggacgagctaagcaagcctgaataccaccctgaaggcgaaattagcgtaattgctcgcatatccttcaatgctgagaagtttgatcgcttcaccggctgctttgaccggcgagggaacataaacctcctgctcggcgatctggccagcccgaaaggcggctacacattttccgctgatagccatgcggatacgatcgcaggcatctatgaccgctacagaagcggcggggttgctcccgctcttcgtaagggcattgaggattccgatattctgagttatctctatgatgactgctacctgattgatttttctgtccgttaccgcaacgacgatatcgtgcagatgtcgccaggcaaacggggtctggtgctgcttaacctgatccttcacctgagcaattcgcgacaccctatccttattgatcagcctgaagacaatctcgataaccggacgatttattcccagctcaatgatttcgtcaggctgcgcaaggcggaccggcagatcattatggtgacgcacaatgccaacctcgtcgtgggaacggatgctgaatgcgtgatcgtatctaaccagagtgggcagcgctcgggcattgagaacagtgaattccggtttgaatattataccggctcactggaatgctcgttcacttcacaggacgattccggccgtctgcatacccggggtatcagagaacacgtttgtgaaattctggaaggcgggatccaggcctttaaggaaagggaacgcaagtacggcctttag

SEQ ID NO: 102222 - DNA, 195 bp, Enterobacter aerogenes
atgattattaccctgagtgaacaaatcatcctgacggcgaatcagccacgaagcggcacgcatcatttttctgccagagcgtccgtccagacctctgacagtgtggacgctgttgaaggccgctttgtaccaagagcagaccttataaacattaaggtacgatcgtctagggggcagtctatggtgggctattag

SEQ ID NO: 102223 - DNA, 1416 bp, Enterobacter aerogenes
atgagtgtggatgccgttttaaacgccagtaaaggcctgattgtagcgccagcgggatgtggcaaaacccacctgattactgaagcacttggttttgcgcaaagtaagccgtatctcgtgctgacgcacacaaccgcaggtgtaacggcactcaaaaagcgactgagccgttttgcaattcctccgcggaactatgttgtgacaacaatcgatggatgggctctgaaaatagctggctgctttccgggattgtgtccgctcggtgtgggtcctgaaaatccaaccgttttttacccttctcttcgccgtgccgtacgggatttggttgttaacggtaatattagcgaaatcatcacagctacttattcgcgtttgctggtcgatgaataccaggactgcaatagcgagcaacatgaactgacttgtgcgctttcatgtttgctaccaacggtagtctttggtgacccgatgcagtgtattttcaactttagcggccctatgccccactggaaccaaaccgttgaaacatttttccctactctggcaaccttacaaacgccgtggcgttggaacaatgcacaaacgccagatttgggacagtggctccttgagcaaagacatcgattacttctccgggagcgtatcgacttgaggtcctgtcctgactatgtacgttttcggcctcttttacgaaatcataatgacaatatccagcgccagcagcgcgaatattactcgctgctgcgacagtttcccaacgactcggttctagttataggtgattcacgaagagcgtcatccaggcatcaatttgcacaacgaatcaatggcattgatgttgtcgaaccggtagatctgagtgacgtgataaaaatggctgcatcccttgacgatgctaatgctgccaacgtgatgccaaggcttttacaggcagcagctgagctgatgacaaacgttggcgttagtacaaccttacgaagaattagttctattcaggctggacgaaacagaacagccccttcttcgcttgagaatgcattggtagcacttgctctggccccaacccgacaaaatattcgaacgacactccttttgctcgaagagaaggaagagacacgcgtattcagggccggagctctgcacgttctaaaagatgcgataaatctgtccatcagttcacctgacaaaagcattagagagtcagcatcagttattcgtgaacaacgtagataccaaggtgaaggacgcgtatcgcaccgttcaataggctcaactcttcttctaaaaggtctggaatgcgaccactcggtgatactagatgcgggaaatatgggggcaactgatttgtatgttgcgctctcaaggggagctaaatctgttacgatcttctcaggtcgtgatgagttcacaccctaa

SEQ ID NO: 102224 - DNA, 1728 bp, Enterobacter aerogenes
atggctgttatccgccacataagcattcagaattttcgctcaatacggcaggcagaatggtttccaggttcagggctgaattgtctgatagggcctggagattcagggaaatcgacctttattgatgctattgacctagtactcggagcgcgaagatcgtacacattcagtgatgcggatttttatctcatgaattccgctactccagtctgcatcagtgtaactctcggacagcttgatgacgggcttcggaaccttgagaactatgggcgttatcttcgtggtttcaatagcgaaacaaaggaaatccatgatgaacctctggcaggagatgaaaccgtactcacactgagaatggtcgttggtgcagatctcgaaccagactggtgcttattttcagaacgagcaacagtggaagggttagagaaaaggttactgtggaagcaccgggagcagttaagccctactcgccttggggcaacctcgcatcatcatctggcatggggcaaccgctcagtgctgaataaattatctgcagaagattttgatatcagttcaacgttggccgaactgtcccgacagacacgacacaactttgctgcccggcaactaccgcagttggataacattcttaccgaggttagaaccattgcaaatgagttaggcgttcaggttggagaacttaaagcgcttctggacgtgaatggtgtctccctgtctaacagtgcgatcagcctgcataacagtgataacacaccactgagaatgcttggtacaggatcaacccgattgctggtgagcgggttacaaaaagctgtcggggggccggggatcatactggttgatgaagcagagtacggactggagccttacaggatcagtcgactcttgaatcaactgggttctcgtgatgatgaacctacttcgcaggtattcatcaccacccattccccatatgttctcagggaactcaaggcaacccagctctgtgtgttgcggaaactagaacaaccgcccccagagccttcacacaatttcctgacactaagtggggacgataaggaacaagctaccttaagggcctgcgctgaagcctttttcagcaaagccgtaattgtgggcgaaggtggaactgaggttggttttatcagagggctggacttgtccagacaacgcaggggaagaacaggctttcaggatcagggggcctttgctacagatggcggcggcggggacaattatttcaaacgcgccgaggtttttgcacaactgggatatcgtactgccttattaaaagattcagatatcacgacacctgcacacaggcaacagacagaacattgccgggcaagcggcgttaccatttttgaatgggggaatggtttttcaacagaggctgccctgctagcttggtgtcctactgagactatccgtgacatcgttcttcttgctgcgggtctgaacagccaacaacaagtggatcagcacattcataactgctcccaaggggcttataactttgacacatgcacaggtgaaccgacagaagaaatgagaacgccagtggctcacgctgctggcaaatatggctggtttaaaacgatcgggaaggctgaggatctagcggagaatatcgtgggtccggtcatcaatcagttttcaagaccattcaaagcaattataagagatctgctggcgtgggcagcagaaaacggtgacccacgatga

SEQ ID NO: 102225 - DNA, 504 bp, Enterobacter aerogenes
atgaagatgatagcgttcaggctaagtgatgatgagttaaaatttgcagaacataacgctattttaagtggatttaccagtatcaatgcttttgctaagcataacgtgcttaatattgaaaccaagcctgttaacatcccagttaataatgaaccagcaaagctggtatcagtgcgtctttaccctcatgaaatagaacttgttaaacgtaatgctgctcttcacggcatgagcatgagcagagaaattgctattcgtgtgcgtcagtctttgttaaagagtgaagtctgtctttaccctgatgaagttaaggaacttaaaaaactatcaactgctgtagatcgtgttggtcgcaacattcattttatcataaaaggtgaaagattctgtacggttaacgatccagatttcagaaaagacgttattgaagtgattgaactgtgtaagcaaattgattcaaaacttgaaacgttaaccaagagtgttgttaacagatttgggtga

SEQ ID NO: 102226 - DNA, 1230 bp, Enterobacter aerogenes
atgggtgtgtatgtagaacaggaataccgtattaaacgcgctaaagggactgggcgtgatccgaaatctcctaagttatcgggaaaacatatacatgccagtaaatcggcttttaatcataaagtcagacatggtgcggacaagaaagcatatacctggacacctacaaaagaagtcacttttaaaatcactggctcaggtaaaacagccgcaggtatcaaaaacggtattgattacattacccgtaatggtgaacttgaggcttactgttatgatggaaaaggttcagagcaaacagggaaaggagaagactttaacagggagtttacttcaactttatctaaaggaaatgattactccaggacatatcgtggagaaaacatcgatcatgtgaaaaacatggtcttttcaccaccaccagaagctggagtaagcagggaagacgctctgaaagctacggtagaatttcttaaagagacttatccaaaccatgctttcgttgccgtataccatgatgataaagaagatcatcctcatgtacatgttaatattaaacttcgtgatgaagaaacaggaagaagattaagacttaccaaatctgaaaccaggaagttcagaaacggttttcatagaaaactgaaaggtatgggatatgatgttactgctacctggaaaaaagatcccgaacgtaaacgggagattgagcgattacaggctgaaaatccgaaaagactccggaatgtttacaaggttgtggattttggggagacttcatatcagaataaggcaggggaaaaacgaacacctttcctcacttatgaaactttaaaaggtggaaaacaggttacgatttggggtaaagacctgaaaaatcatttcgagtctgaaaagctccagccaggaacgcttatcaaagttaaaaaactggctcccacgcttgtacgtagcccgatgtttaatgatgatggaactgttgcaggctacagggaaacgcatcgcaataactggcagattgaaaatattgcccttgagcggaacagagaacgtcaggttcatgagcgtgaaaccaggcaaccggaagagagcgacgttaaaaaacagctatccagaaaacatgagcaaggtcacaatatcggttttgctcttgaatacgggtttacaaaggattcagaagaacataaaaaactaagaatacagcaagagaggaactggaaaggcctgggattttaa

SEQ ID NO: 102227 - DNA, 294 bp, Enterobacter aerogenes; identical to SEQ ID NO: 82469

SEQ ID NO: 102228 - DNA, 216 bp, Enterobacter aerogenes; identical to SEQ ID NO: 12971

SEQ ID NO: 102229 - DNA, 177 bp, Enterobacter aerogenes
atgaaggagaaatcagataagtcatcggaaaaaggggtttatgtcacgataaaactcgatcccaggttgaatgcatttatcgaagagaaaacgaaaacatctttgcttagtaagaggaagcaaattatttacttattaatgcagagtatgcgtattgatggatatatggagcgttag

SEQ ID NO: 102230 - DNA, 621 bp, Enterobacter aerogenes
atggcgtctttattcccagccttgttgctgtgtgcggcgtcagttcatccggatacgataaatgatattgcacgggtcgagagtggcttcaatccttatgctgtggctgaaattattcctgaaagggaacgcggtagctatggcaaaagtgttatcagtcatatgcccaaaagtaaggaggaagctctaacagttatcagagaaattgaaaacagaaaaagacgttattctgtcggattgatgcagattaccagcagtaatttttctttttattccacgtccgcagaaaaactccttgattcgtgtgaaaacttgtctgttttcgaaaagattatcgtggattgttataaacgagggaggagcctggagaatgcgcttagttgttactatacaggaaattttagtaacggtaagcgaaaagaaaaagaatttaataatacaagttatgttgagcgaattggttatacagggaacgaaaaaaaatatgttgtaccaggtacaagaagcaacgggggagaacagcgaaaaaatcgttcacacaatgcgtcagttatctggcccgaaaccattctgaaatctgcttttgttgataactcacatccaacaaaagttattaattaa

SEQ ID NO: 102231 - DNA, 327 bp, Enterobacter aerogenes
atgtcatttaagaaatcagtatgtaatcgtatcagttcatctgtcactgctgtaatgcagcgtaaaaataaggtagttatggcagtcgccggggcaacagttgcatcaccggcctttgcggatggattttcaaaagcggaaacactgctggaaaaggttaaaacagggcttagtggcctttcactggtcacggtgactattgcctgtctgtgggtcggctacaaggttctgtttggtggaagcacgattcgtgaatgctcacctatcatcatcggggcaattgttatcgccagtgcggctgaagttgcatcaatgatggttaactaa

SEQ ID NO: 102232 - DNA, 2748 bp, Enterobacter aerogenes
atgtctacactttataaagcgatgacacgccctgctatgtatgtgggtgttcctgtcgtccctcttactgtggttgcaggggcgttatttctggcgggggtttatatcagcaagctgatctggctggctattcctgtcgcggtttttgttctcagaatgatcactaaacaggacgaccacatttttaacctttactttcttaagctgaaaatgctcggaaactcagtgtgtaatcgtttttttggcgcacgagcgttcctctccggacaatatgaagctgttgaaattgatgagtttgttaatgccatgaaactgaatgagcgaatcactactggtaaatatatcccatattcaagccacgttgataaaaacatcgtcaaaacaaaaaacggtgattatgtagcgacatggcaactgatggggattaactttgagtcaatctctgcggagatgttagaaactattgactcacaggttgccactcttgttcgttcattttccggactgcccgtttcattttataaccattcatgcagggcgagtttttatgatgcctttaccacaaaatcaggtaataaatatgctgatataatatcagactgttattatggttcgatgaagaaaaataaattcaaggggaacactctttactttacgctgatctacagaccagacgggcgtgtagaaaaactggaaaaacgcaaaaaaagtattaaagaaaagaaagatgatattaacattcatgtgaagagaatgaatgaaatgattaatacattctctggcgctcttgataaatttacttgtaaacttcttggtatgtatgaggagaacggaaaggtattttcttctcaactgtcattctataattatcttttgacagggaagttgcaaaaaatcagagtcactgattctccggtgtataacgttcttggtggagtggatgtattttttaatcatgataccggacagatatgccgcattgatggaaataaattctttcgttctattgaaattaaagatttctgtagtgagactgcatccggtgtttttgatgtgctccagtattctgatgctgactatattattacgcattcatatacatccatgagcaaatcagaagcattgagtaccattaaacgtgcggaaaaacagttaaagagtacagaagatgatgcggttactcaattgcaggaactggaaaaggcaaaaaatgatattgtgtccggtgatatatcctttggttactaccatttcacgctaatggtaatggcggacagtatcagggagcttgacgaatctgtaagtaaaattacggcagactttactgacctgggcattattccggcattgtcaaccatgtcattgccagcagcatattttgcccagcttccggcggtttttcatttaagaccgcgtttatctccggtatcgaatgtaaattttgtcgaactggcatcattccataatttctaccaggggaaacgcgataaaaactgctggacagaagcggttgctattctcaaaacaccaagcaaacaggcgtattatctgaatttacataactcagtactgtttaaagatgaaacaggtgaaaagaatcttgctaatactaaagttataggatcgtcgggttcaggtaagacaatttttctgtcatatcttgcctgttcattacagaaatacaataaccctgaaacttttgctgattctgcaaaaaataagaagttaacgtgtgtctttcttgataaggacagaggggctgaattatgtatcagaatgcttggtggggaatattacaccgtaaaaagcggtgagccgacaggatggaatccttttgctctggaggcaacaaaacgtaatcgtatttttgtcaagcaactgatggagattctgtgtaccagaaatggtgaaagattatcgacaagagaaagattgcttattagcgaaagtgttgatgctgtgatggattttcctcctggcgaaatgcgggaatatggtattacccgaatgcttgagcatcttatgcagagagatgatcgggatgagcaggagaacgggattatccttcggttgtcccaatgggctaatggtcaggctcatggctgggtttttgataatgctaaagacacattcaatattcagcatgtcaataattttggcattgatggcaccgagtttcttgatgatccgatggtatgtgcaccaattactttctatctgctgtatcgcattacgcagcttcttgacggtcggcgtcttgttatcttcctggatgagttctggaaatggctacaggatgaagcattcagcgactttgtctataacaagctgaaaacaattcgtaagctgaacgggctggttattccggcaactcagtctccggatgaaatactgaagaataagatttcacgggctgtggttgaagtatgcagcaccagtatttatctggctaaccctgatgccgattacaatgattatgtggaagggcttaagctgacaccagaagaatttaatattgttaaaaatcttgatccaatgtcgagacagttcctgattaaaaaaagcagtcttaaaaagggggatggtaaatcattttcagcacttgcgacactcgatttatcgggacttggtggatatctgaaaatattgtctgccagtgcagataatctggaaatttttgaaagtatttatcatgaaggaatggagcctgatgactgggttcctgaatatctcgaacgggcaatctga

SEQ ID NO: 102233 - DNA, 717 bp, Enterobacter aerogenes
atgaaacgtgtaaaaacattgatgctgatatcattattgacggcttcattttatagtagcgcaggaattccggttgctattgatgccagtccggaatgggctgttgaagccgcaagatggacagaacgactcaaacaatggtccgaaactgcgcaacattatcagagtcagattcaggcatataaagaccagttagccacggcaacaggtataaggaatattgcggcattcacaaatgaactaagtaatctacaatcagaactgacaaatatttataagcaggggaacagttatatttctgattttaccagtaatcccgaaggtgcattgagcagccaggctaaaaatctgttcagcaagtatggagccttcgatatgtgtaatacgggctatgaacgtaatgataatctctgtaaagcacggattgtgtcaacggctgccagtattgaacagggaaatgagatcaataagcagttatcaagtgcaatgtctcagattcagagtttaagtagccgaattgaggcttcaaaggatatcaaagaatcccaggatttggctaacgcattacaggcgcagtcgttaaaaatgcaggcgataaaaatgcagtatgatgtctggaataataaaaataaagcagatcatgagatgttggtcacacaagaacaagaggcctttattaaacagcagaaagaagctgaaccattaacttttgattaa

SEQ ID NO: 102234 - DNA, 1095 bp, Enterobacter aerogenes; identical to SEQ ID NO: 82471

SEQ ID NO: 102235 - DNA, 180 bp, Enterobacter aerogenes
atgaaaataatgaaacgttttttttatgtgatgtccctgaactggatactggtgttcgttgataaacatatcacctccggatggagcaggaagagaaagctaataacccagcttgttattttaatcacgggaattaccttatttaaggtcttaggtggaatcagtcagagctggttgtga

SEQ ID NO: 102236 - DNA, 129 bp, Enterobacter aerogenes
atgcgatgtgtgattcttttgtttttcctgtttcagatttccggatgtaccacaaggaataaccttccttctgatgtttccggcgaactggaacccattaaccacagccaggtaatcagttatgagtga

SEQ ID NO: 102237 - DNA, 687 bp, Enterobacter aerogenes
atgagtgaaaaaatcgaaaagaagattgagacagctaaatccttcgaaagacaactctatgcagaaaatgaacggtctaagaaaaatgcatggcgtgttgcagtggcagcatcattactgtccttatgtcttggggctgcaatttgtgttcttgtgccattaaaagaaaaagagcttgctattgtggctgttggcgaaaaaacaggccgtacagaactgattactcaggttaaacaggaaaagatcctgcaatctgaagcacttgggcggtattttgtaaacacgtatattactttacgtgaaggttataattatccgtctcttcagtatgattatgagactgtacagctatatagctcgaatacagtaaaggacgattatcttcgtctgtataacagcgatatggctcctgataaaatttatcataataacggttcttacgttgcggttgaggtcatctccaatattatttctgacgcaaccgcgccagataaactggcctctgtgcgctttaaaaaaacgacgagaaacttcacgaccggacaggtttcagtttcatactggacggctcgtgtgacatatcgttttgaaccagaaaagtcggttaaaagttccagtcgtgagcttaatcctctcggttttactgtaaccagttaccagacagatcgggaagtcaggggggaatga

SEQ ID NO: 102238 - DNA, 807 bp, Enterobacter aerogenes
gtgagttataacggtgcgaatacgaccgttatccggtcaaagacaggatttctcacatcagttgtttttgatgaaggtgaggctgttatcagtgcaaaggctggttttcctgccggatgggaaatcacaaccgatgataatgttgtttacatcaatccgcgtcccgttgttcaggaacaggaaggcgatgaaggcgaaaaactgaaaaaggttttccagccaacagaaaaggaatgggatacgaatctttttgtcagaacaacaaagcggatttacagtctggatctaatccttctgtcagaagaaaaacaagcgcaacctgcttatgttgtacaattccgctatccatcagaaatagcgaaaaagaatgcagaagaagtaaggctggcaaaagaaaaacaggaaaaactcagacagaagaaactgatttctgaaagttttgaaaaagccgatgcgcctaaaaactggaattatttcatgcgagtcaatgaaaaatatgacagtcgtcgtatcgcccctgattttgcttatgataatggcatatttacctttttaggttttaactcagggaaagtattcccagctccatttgctgtaagagatggtcaggaacagacacttgcttttaatgtggaaacaaaaggcaagtataaaattatggttatccacaacgttaatgacaaatttgttttacgctatggaaacagcgttgttggtgttgtgaataaatctttcggaaaagtattaaccgaccagaggaatacatcttctcctgcggtagaacgtgttgaggtgaataatgactga

SEQ ID NO: 102239 - DNA, 1029 bp, Enterobacter aerogenes
atgagtggcgttattcctgtcagcattagcaataaatcgctcgatttttataaaaatcaagtattccagtcttttcttgatattgaagggctaacagaaattgctgtcaaccgtcctggtgaaatctggacggaaattaatggtgactggacattccataataatgacagtgtgacctttgatttttgtaaacgtttttctcatacgctggcatcatttcggggagatgaaatcggcgataccaagccattactttcagcaacactggaatcaggagaacgtgtacaggtcgtttttcctcctgcatgtgagagaaatactatttcaatcactatacgtaaaccatcgacacggcagataacacataaagaatatgtggcgaacggtttttatgattatgtccagtcaggaaaaaaacacaggacatacgatgatgagcttcttgatttattcagagcgagaaatatcgctgcttttatggagcttgccgtagcagcagggaaaaccattgtatttgccggagcaacgggttccggtaaaacaacttatatgaagagtcttatcgatttcataccattgaatacacggctgattacgattgaagatgcagaggaaatcaaattttttatccataaaaattatgtgcatcttttttacccttcggaatccggcagtgattccggctctatcataacagcagcgaaattaatcaaatcctgtttgaggatgaaacctgacagaattttactggcggaaattaaaggtggcgatgcctgggattttgtgaaagttgctggttctggtcacagtggaagcatgacgtccattcacgcggcctcggcaaaagatgccatcattcagatggtgacaaaatgttatcagaacagagaatgtcagaatcttccttttgatgttcttcgtaaaatcattatggacagtattgatattgttgttcatgtaggcagggatggtgttgtcaggcatatgagcgacatctattacaaaggggctgaatgtgaaaacttttaa

SEQ ID NO: 102240 - DNA, 1614 bp, Enterobacter aerogenes
gtgtctcttatcatccctgttgcggcgttgataaaactgaacgagaagaaagaaaatattttcggtgatgcgcgatttgcaacaattaatgatattcgtgagtctaacagtttcacgcttgacggtgacgaaaaagacgggattatcgttggtataaaagacaagaaaatcatacgctatgtgggagcagcattcagtgctatgggagccggaacaagggctggtaaaggtgctggtatagtcatcactaatcttatgaagtactggtggagtgttattattctcgatccaaaaagggagtgttttaatatcaccagtcttatcaggaaggtgattttaggtcatgaggtttataaatttgatccctttagtccggtaacgcaccgctttaaccctttgtattatgtcagcatgggaacgagtgaaggttttaatcagcttgaaaatctttcgttgattatttacccctataagacagatggtgcggatgctggtagctatcttaataagacggcgggtggtgtttttaaatcttatgctgtcgctttatggtttatgattaagaatgataaggctggactaaaaacgcttgatattgagcctgtcttctcaatgtctaaaattaatcagctttttgagcgtgcagaacccgaacatcttctttcattcatgaatgatattcgttcagaattaagggggaaagacaaaacgcttgctgatattggtgtcgctggccttaaggcattcattgagatggaggataaaacaaaagcacaactcaaaagcaactttcttaatggattatcaccgtttgctaaccccaatgtggcaaatgctactgatggaaatgattttgatttgcggcaggtgcggaaaaagcggatgacaatttatttctgtatttctggtgataatgccaggttggctgaaaaaataacaaatattttctttcagcttgctatacaggtgaatcttgaaaagatgccaacggatgatccggaaataaagcatgactgcctttttctactggatgaattcccgtcaattggtgctgtagattacatcaagagtaaatctggtctcattgctggttacaagctgaaattgttgattgtttaccaggtcggctctcagcttgaggaaatctacagttatgcaggcagtaaaacattactggcaagtgcaccctgcaaaattgtttattccgcttctgatgttaaagatgcgcgggagttatcagaagcgatggggacacgaacagtaactatcggttcgaaaagcaaaagtcgtagtcgtggaggaacatcgagatctgaatcagaaagccttattgagcgtccactggtaacaacaaatgaactacttacactgaaatttagtgaagaaatcctggcaatgaagggagaaaacccgattcgttgtgaaaaggcattctactatctcaatgagtatttctttggtgactttgtgaaggttgctccggaacttgcaaacattttccccaggaagaaaggaaagctggttatgcctccacagaaagtatttgaaaatgaaatcgtcgcaaaagggtatctggtagtaaaagatgttcctgatctcgataaagcggcataa

SEQ ID NO: 102241 - DNA, 420 bp, Enterobacter aerogenes
atgaagaagttagtgtttttattgatttccattcttgctggttgttcatcaccgccagagccaacacccgtgcagtttgaaaaggcaaatgaagtgatcaatccctcattgccatatgtccccgattttcacggtgtcataaagtcagacgttagcggtaaaggatgggtttatgagatcacttccttatccggagtacaggccagaacgccgacgttttattacgctctggctcatgcggacaggattgtagtgacaacacatgatgctgggctgtggtttcgaatcagagatctgttgaagatggaaggggcaacagcagtcgtggaatggcgaaacgagaaaagttttttacctgaacagataaaaatagttttcattaaagcacaaaatgaggtgaaaaatgactggaaaaaatag

SEQ ID NO: 102242 - DNA, 306 bp, Enterobacter aerogenes; identical to SEQ ID NO: 80397

SEQ ID NO: 102243 - DNA, 255 bp, Enterobacter aerogenes; identical to SEQ ID NO: 80398

SEQ ID NO: 102244 - DNA, 309 bp, Enterobacter aerogenes; identical to SEQ ID NO: 12954

SEQ ID NO: 102245 - DNA, 495 bp, Enterobacter aerogenes
atgagacattttcttaaggctctttcctttgttgtttccctgttaccagctacattgtgtgcggctgaaatccaggggaaagttattcgcgttctcgatggcgacaccatagaagttaaaacactacccgcaaaaattgttgtgtatgaagttccgattcgagtccgattgataaatattgatgcccctgaaaagaaacaaccttttggacgctggtcaacaaatcaacttaaaaccctgctcgcaggccaatccgttaccgtctcttatacgcagacagaccgctacggacgcattatcggtcgtgtgttcacgacgaacggcacggatgccagccgctttatggttcagtctggcgctgcatgggtatatgaacgttacaacgaggatgagtcattaccggctctgcaacgggaagcgcaggaacaaaaacgcggtttgtgggccgacgcaaatccggttccaccgtgggagtggcgatacaaacataactaa

SEQ ID NO: 102246 - DNA, 405 bp, Enterobacter aerogenes
atggctttatcccccaaagaaaagaaagagttacaacaacgcttcgaaaagcaattactacctgaccttgatctgtcatttgaactaaatggcgaagtatataaatttaattttgataaaaatgagtcaggtgactatatcgacagttttacacaagcagtatggggaggttatcaggatgccgaggaatgggaaaaatatggtaaacatcaggagatagaattacctgaatgccctggaccagtcgagggttggtgcgactgtgataaatgtaagtcgatgttttttcataaagagaaaaatatttatgtttgcctctcctgccataaacaaacagagccatttcttccaattgactggaactcaaacgattacgattggctaccttatgaagatgaatactaa

SEQ ID NO: 102247 - DNA, 576 bp, Enterobacter aerogenes
atgcaatatgcattagttgatgcgctggaacgaaaatttttgctggatgctcttgaatttggtgttctgaaggactggaaagaaaatccggtaaaagaacttcctgatattgatgaatctgttcaccccttccatgtctgctatggtggatatttattaaatcctggtgtttcagattcagatattagcagaaaaataaaagaccagacaggattctggctggcagctattgatgatacccgcatggattgtcattcaatagcttattatgatattcacaccctccctttgattttgtgtggacatcaaaagatagttccttttgccgcattaataaaagctgatgaatgcatcatttcaaaaattgcttcatattctggttttgctgtaacagcttttttgagaattaaagaccaggatatcgcaacgaatatacttaaccgtgagggaatttttgcctttaatggctgtgagcgcagattcagacaacctgtaagtgaagataactggcaacaggcagtatcagaagaacgcgctattcgttgtgcaaacagattaattcaatgtaaaggataa

SEQ ID NO: 102248 - DNA, 2154 bp, Enterobacter aerogenes
atgagactttttatcgcagaaaaacccgcagtagcaaatgatattgttaaggcacttggtggcaattttacccgccatgatggctggtttgaaagtgataacgccattgtgactaactgttttggtcatattatcgaatcacaaccgccggaaaactataatcctgaatacaaagcctggaaggttgaaacgcttcctttacgtctttatcccgtgaagtatcagcctgttgaaagtgcagcaaaacaggttaaaacgattctcgaacttatcagacgtggagacgtgactgaaattgttcacgctggcgatcctgatgatgagggacagctacttgttgatgaagtgctggaatatgcaggaaacacaaaacccgtaaagcgcgttctgattaacgacaacacgcttccggcagtgaaaaaggcactggcaaatcttaaagataatcgtgatttcaaagggctttaccttaaggcgctggcgcgttcagttgctgatgccgtctatggcttctccatgacgcgtgcttacaccattcctgcaaaagccagaggatatcagggcgttctgtctgtcgggcgcgtccagactcccgttcttggcctgattgtgaatcgtacccgtgctaaccagaaccataaatccagtttttactacaccatgaccggagtctttcagcgtggtgctgatgttataagggcgaactggaagccaggggaatttgctccgctgacagaccgtaaattacttgataaagcgtgggcagacggaacggctgcatcccttgcaggaaaaccggctacagttgaagcagcagcaactgatgataaaaaaacggctgcaccgttgccctttaacctggtacgactccagcaatacatgaacaaaaagttcaaaatgacggcacaaaaaacgctggatattacgcaacaattacgtgaaaaatataaagcgattacttataaccgctctgattgctcatatttatctgatgaacaattcagcgaagcgccgcaggttatcgatgccctgaaatcagtctttcctcagtcgctggatattgattcttcacgtaaaagcaaagcgtttaacagtgcaaaggtgactgcgcatactgctataatcccgaccgccagtgtgcctgatgttaacgcactcagcaccgacgagcgcaatgtttacctggcgatcgcacaacactatcttgttcagttcatgcctgaaaaagcataccaggaagtatcggttgccattcagtgtggtgatgagtcgttctatgcccgtgccagaaaaacaactgacagcggatttgaggcgtttcttggcgcggaaaccacagacgaaggtgaatcagaagataatgatgattccgcttttgaactgctctgtaaaattcgcacaggagaaacactgacgacaaaagaagttattgttaatgagaagaaaacaacaccgccgccgttattcaccgaagcctccttgcttgctgcgcttgttcgtgtcgcggattttgtcactgacccaacgattaaaaaattgttgaaggataaggataaagacaaaaaagatgaacatggtggcattggtacgccagctacccgcgcagccattctggaaacgctgaagaaaagaaactatatcacgctggaaaaagggaaacttattcctactgataccggatatgcgcttattgatgccctgcctggtatagcggttaatcctgatatgacagcattatggtctgaaaagcaggctgccatagaaaatggcgatctgacggttgaacagtttattaatgatctgtacggtgaactgacaggcatgatttctgatgttgacttgggcgagatgaagattgaacccgctgcgccagcagggcagtttcaacgcctggactctccctgcccttcctgtggtaaacatattgttatcaggccgaaaggttatttctgtaccggatgtgaatttaaaatctggagtgagttttatggtaagaaaatcacccaggcacaggccgaaaaactggttaaatcagggaaaaccgatttgattaagggatttaaaaagaaaagtggtggaacgtatgatacagttcttgtccttgaggataagaaaacagggaaactgggttttccggcaagggctaagaagtga

SEQ ID NO: 102249 - DNA, 465 bp, Enterobacter aerogenes
atgagcgaactgactaaagaagatgaatacggcattatcagccgtactatgatgaatattcgttcattgcgtgtttttgcccgtgaagttgattttgagcaattgctcgaaatgcaggaaaaactgaacgttgttgttgaagaacgtcgtgaagaggctgaacgtgaagcggctgaacgccaggaacttgaagccaaacgtcagcaggccattgaatacatcatatctttaggtcttgatcccgaatcactccttgctcctgtaacagcagatacagtaaaaaccaggcggaaagccaaaggcggagtaagaaaggctaaataccgctttaaggatgaaaatggcgagatcagagaatggtctggtaatggcaagcgtccgcttgctttacagaagctgcttgatgagggccatttcatggaagatttcctcattgacaaactgcaacctgggcaggttgaataa

SEQ ID NO: 102250 - DNA, 654 bp, Enterobacter aerogenes
atgatcaaatcaaaaaaagtagtggttatttttgttgctttgagttcattcttgctggcagggtgtgattcaccaaaagatgctaataagcaaaactttgaaaaagctattaatactcgactagagaaggaatgcattactattagtccgctgggaatgtttgatagtaagccttatccggttcaggtagctgtggctcaggctaatcgatatacatctcaggaacgggcagatgaaataaattctcgacagttttctgcgctggatgtactggtcaaagccgatttattaacagtaaaagataccctggttgatgacgttattggttttactaagacgggtaagaaagtgccaggccgtgaatatgctctgacagatgaggggaaaaaatatctgaagtctccggaacggcctgatttttgcgttggtcattataaggtggatgagatagttgattttaccgaacctggtgatgctatgggaatgaagatcacgcaggtgaattacacattcagtcccaccagtatcgctgaatgggcgaaacgcgatgatgttcggacagcatttttaggacttgagtctgatttgaaagagaaacaaacaaaacgtattacactggttttgaaaaatgatggatggtctgctgaacggtag

SEQ ID NO: 102251 - DNA, 660 bp, Enterobacter aerogenes
atgggaaaaatcattacagttgcagggcataaaggcggcataggcaaaagcaccgtgctttgttccttatgtgtctgtgccatcaggaaagggaaaacagcctgtttcctggaaacagactcgcagggaagcatcaaggacttcattgaggaacgtaaaaccaacgagcggctgtctgaaataccgtatttcgagtgctacacagatattccggcgatggcacgaaaactggctgcccgctttgattatgtgtttgttgatacgccaggaatgaaatctccggccttcgttaaggcactgagttgtgctgacattctgttcacattcattgagccaggagcaggcatcgagatcaacacgctgggacggctggttttcgacattaaaacagcacaggccggagtcaatccatcaatgaaagcatggattgtcctgaataagtgttcaactaatccgtcagacagtgaagcgtcagaactgcgccgacaactcaatgatgatcctgactggcttccggttccccgccagcgtatctatatgcgtactgcgcataaaaaagcctataacagtggtatgggcgtacacgaatacgatgataaacggggaaacaaagcccgtggagagattgaattactgttaaaagaaacggatgttctgtaa

SEQ ID NO: 102252 - DNA, 303 bp, Enterobacter aerogenes
atggcaaagctcccaaagaaaattgatcaggaaattaaaccgctggatttacgccagtttgtaagttctgctgcacaaaaaccagcatcggcatccgcagtaacgcgtataaatctgaccatgacagatgatgatctggatacagcgcaggtgttccagaacaagtacggcgcaagccgtgctgaagttatcagagcagcactggcagcgttacgtctggtatcagcagaagaacgccggaggctgtttgatgatataaggaaaaacagcccgaaagcaggaagaccaaccgtgaataaatag

SEQ ID NO: 102253 - DNA, 252 bp, Enterobacter aerogenes
atgcttatgaaggccattaaatctgtattcaatttttacatgctctatttgcagccttttattggagtggttcttgcgggttatggtgtatggaaattttcaggtgacagtatctcagcattactggaaccagcatcgtactttgtcattggaactgttgttttgtttgtatggtatatagcatggcaaaaagaacgttctaaagaagaagagtttaaatcaagtataaaaccagaagattttgtgaagtga

SEQ ID NO: 102254 - DNA, 216 bp, Enterobacter aerogenes
atggaacactgcatcgttgatttaggcattataaactatcatcctgtcattacatggacagtacctgttgcatttttctttttagtagtgctggctggtatagtattcaatattggcaggaaaagtaatctaatcgttttcatcctggcaatgttgctcccagtaacaacggttttcatttttatgttactgggcggtaagatcgatatgtgctga

SEQ ID NO: 102255 - DNA, 528 bp, Enterobacter aerogenes
atgatatttaaccgtaataaaaaacgagatgaacaacataattctgctgttgttttgccatcagctgaaaatgtattctctgattttattaagaacaatccagctttgacaaccaatgcttttacagccattggggaggttgattgttttactaaagtacccttactctcaaataatgaatcagagtttttaggcattctttcacgtaatattatacctgattattccgtttttcccaaaatacggctcattgaatttgttcgtcctcatggtagcgaggaagctgtaaaagatttaatccgtgaagtgcagaatataacctgtgattttgtcctgaaatcatatgatgaaacagtcctggctgttatccagtttggtgaaaccgcaaccgtcagacagcaaaagaaaaaactgattatccagcgcgtgtgtgctatgacaggaatttcttttttcgaatttaaaaacactgtcgatatgatggggagcgaagatttttgtcagttcctgcgggatgatgaagagtaa

SEQ ID NO: 102256 - DNA, 405 bp, Enterobacter aerogenes; identical to SEQ ID NO: 12977

SEQ ID NO: 102257 - DNA, 873 bp, Enterobacter aerogenes
atgagaatgacgacaaataagacttccctttctcgcttaacaaaagtgagacatcgaaatgaattgaattcaacgctgtcaacattgcctatggctgctaaaaaagtcttatttttagccatgtgccagataaactctaaaaatgaattcgatgatgatcacatattttatgtgacagttgccgattacattaaatgggttcaggttaagcctgatgcggcttatcttgctttgagggatggctctaatatattagatacgacgcttcttaagctgaaacatgatgaaatattagaactgagtagtgatttgggatttaagttcactaaaagtaatgtacctgattcaatgaatttgagtctgactgttttttctacttattacaggaatgaaggtagagtggggatcaagtttacgaaagaagcgaaaagatttttatgtaaacttattggtgaagaaaaacgttatacaacgcaagttttattatctgttgttcgactgacaagtgttaatgctgcatcactatatcaactcattcgtaaaatatatagtaataattctcgcgcgaatagttttgaaatgacaatagatgaacttaaagatgaattgaatctttatacaataggggcggggggggtgaaggattataagtatccagattatcctgcttttaaaagagatgttcttaataaatcagtaaaagaaatcatgaaacatacggaagtaaagaacttaagtttcgtagtttcagaaaaaattgggagaaaagtttataaattaaagttctcttatacaattggttatgagggcgataccagggaagactcagagtttactaatatgtttgataaaatgtacccacctgaaaattga

SEQ ID NO: 102258 - DNA, 516 bp, Enterobacter aerogenes; identical to SEQ ID NO: 12409

SEQ ID NO: 102259 - DNA, 543 bp, Enterobacter aerogenes
atgaactctttttttgaacaatatcaccctgtctttgaagttgtctgccgtatcctggggaacggctggcgcgtgaacaaacttgatgattgttcgtctcgtataaaactgacgtcaccgcagtttaaaaattactctgtgcatattcggatggaaaaagaccgcttttctgtggtggggagtgtggatagtcgttcctggcgtagtccgcatcatgtttgcacgttatccagaaaacggaatcccgttgatattgcagccgatatcgagcgaaaaattctggtaaatgcttcgcaggaggtgttgcaggagattgagtatgagaaacgccaggttgcaaaaaaggacgaaattctgatcctgaaaggtatgttatcgcaacttgtccagcttgaaagctggtatggggcattgacaggctttaaagctgcaaacggattgaacggtaaagtcaccgaacagggcgacagttatgatttgcagattcggggcttgagtatagatcaacttgttaaaattacagggtatttgaaacagttatga

SEQ ID NO: 102260 - DNA, 252 bp, Enterobacter aerogenes
atgagaaaaaataaaggtgatgtgacttattttcttgaaaaagaaggtgacaattacaggcttacaaaaaggataaaagccagaacaaatgttaaaatcgggaacaaaactacgaaaattacattgtatgatgccgtactgaatgagaatgaattacaacatattgattttacgtgttccggattaagggaagacgatgagatgcctgttaagaatttaattaaggagtttatgttaaatgaaacccgataa

SEQ ID NO: 102261 - DNA, 228 bp, Enterobacter aerogenes
atgaaacccgataatacacctgaaaatgtaaaaaaattacgtttaaaagcaggattaacacaaaaggaatgcagtcatatttatggtgttgggctaagaacatggcagaaaaaagaggaagttaatactcaaaacagtcaaagtctgtcactgattgagtttgagtttcttttgttacttgcaggagaacatcctgaatacgtgctctgcaaaagggagtcaaaataa

SEQ ID NO: 102262 - DNA, 351 bp, Enterobacter aerogenes
atgaaaacgttaaaacaagccgcaatgcagtttgcatctgatctgcgtaataatcgctgttttaaagctgcttataatgatgctctgttagagcttgatcgggaagatttaaacgccattgtacaatgcacatttctttttgagccaaaacgaacattagccgaacttgataaattaattaaaaagatagaagtagaagaagattatgagttttgtgtatcccttgataaaggtaaaggattacacgaagtcagaacatttaaaagtgagcgtgaggcgttggatgcttatcgcattttgactctttacggatacacagtaactatagaaaagaaggagggtaatgactga

SEQ ID NO: 102263 - DNA, 138 bp, Enterobacter aerogenes
atgtcaacgcggcagatcgtacagcttgctgattcccttgtcaaaggctgggaaaccagaattccggcaatgaaatttagcgaatgggatcaattccggtggtggttaaactacttgcaagggtatgaaatgttttaa

SEQ ID NO: 102264 - DNA, 249 bp, Enterobacter aerogenes
atggggaaaacagataagctactggcaaagtttttaaacagtaaaaaaacgtttgaatgggatgaactggtcgttttgttttcctctttgggatatgtcaaaaaggaaatgcaggggtcaagagtgcggtttttcaatgctgaaatcaatcacaccatattaatgcatcgtccacatccggaaagttatatcaaaggtggtacgctgaaagcaattaaacagaatctgaaagaggctggattattatga

SEQ ID NO: 102265 - DNA, 348 bp, Enterobacter aerogenes
atgaaacatttaaaatataaaggatatttaggcacggttgaacccgattttgaaaataatgtcctgtatggaaaactagcgtttattcgggacctggtaacttatgaggcttctacattagctgaactggaacaggagtttaaaacatctgttgatctgtatttacagtcttgtgtggaggatggaaaggaacctgataccccgtttaaaggcgtgtttaacgtcaggcttgatccagaactgcatcgtcgggtagcagaaatggcgatggaagaagatttatcgttgaatgcctttgttaataaggctctggaaaaagaagtcagcaatcatcgcgcaggggcttaa

SEQ ID NO: 102266 - DNA, 141 bp, Enterobacter aerogenes; identical to SEQ ID NO: 36145

SEQ ID NO: 102267 - DNA, 435 bp, Enterobacter aerogenes
atgcaaaaagataaaacaggcagtatcgaaccaacaaccttgggtgctggggggcatttccgcatcaaagatatgtttcggttaaagatgccctgtgctaactgccctttcaggaaagaaggggccatccatctgagccctggtcgtctatcgtccattatcgataccctggtaaaagatgatcacacaaccttttactgccataaaattgtacattctattgctggcgggcaatttgaagatggcttgtacaccccttcaacgaaagatgctatgtgtgcaggtgcagcggcgtatctcatgaaagcgggcagacctacaataggtatgaggattgcgtacctgacgggagcagtgaccccaagtgagtgggacaaagctgcggatatggtaattgatcctccctttgataaaaacagcaaaaagcttggataa

SEQ ID NO: 102268 - DNA, 1485 bp, Enterobacter aerogenes; identical to SEQ ID NO: 95322

SEQ ID NO: 102269 - DNA, 858 bp, Enterobacter aerogenes
gtgaagctcgatcagaccaacaatcgtatatcgcttcctaagttgggctggatacgctatcgcaatagccgtgaagtcatcggcgaagttaaaaacgtcacggtcatccagtcatgcggcaaatggtacgttagcatccagacggaatacgaagtgcctgaacaggttcataaggcagcgtcaatggtcggtttggacgccggagtcacgaaacttgccacgctttctgatggcaccgtataccagccagtcaacagcttcaaagcaagccagcgtaagctggctatgcttcaacggcagttaagccgcaaagttaaattcagtgccagttggcagaaacagaagaaaaaaatccagcgtctgcactcacacattgccaatatccggcgcgactaccttcacaaagtcaccagtgaaatcagcaaaaaccacgcgatgatcgtcattgaggacttgaaggtcagtaacatgtcgaaatcggcaaaaggtacggcagagcggcccggacgaaacatcagagccaaatcaggcttaaaccgttcgatactggatcagggctggtacgaaatgcgcagacagcttgagtacaagcagctctggcgtggtggtcaggtactggcgatacctccggcatacacaagccagcgttgtgcctgctgtggtcatacggcgaaagaaaaccgtcaaacgcaaagtaaattcgtgtgtcaggtatgcggctataccgagaacgccgatatcaacggagcacgtaacattttagcggcaggacatgccgtgcttgcctgtggagggatgatacagtcgggccgcccgctgaagcaggaacccaccgaggcgagtcaggctccggtctga

SEQ ID NO: 102270 - DNA, 285 bp, Enterobacter aerogenes
atgcggcgcttcgctggggcttgtcgcttcgtctttaaccgtgcgctggcgcttcaaaacgaaaaccatgaagcggggaacaaatatgtttcctacaccaaaatggcttcatggctcattgagtggaaatcacaccctgatacccagtggctaaaagacacgccatcactgccgttgcagcagtcgctcaaagatctggagcgcggctacaagaatttcttccagaagcgtgcagcattccctcgtttcaagaaacgcggccaaaacgatgcccgcaaggcgtga

SEQ ID NO: 102271 - DNA, 1608 bp, Enterobacter aerogenes
atgcggacacgctttagtctacggttatctccctttacttcatttcctttctcacaggccagaaaacataactggcctgaatattctctctgggaccacggtcccacctgcatcgtcggtcaggttatctgcctgggaccacggtctcacctgcgtcatcggtcaggttatctgcctgggaccacggtcccacctgcgtcgtcggtcaggttatctgtctgggaccacggtcccacctgcgtcatctgtcaggtaatctgtctgggaccacggtcccacctgcgtcatcggtcaggttatctgactgggaccacgggcccacctgcgtcgtcggtcaggttatctgcctgggaccacggtcccacctgcgtcatcggtcagcttatctgtctgggaccacggtctcacctgcgtcatcggtcagcttatctgtctgggaccacggtcccacctgcgtcgtcggtcaggttatctgtctgggaccacggtcccacctgcgtcatctgtcaggtaatctgtctgggaccacggtcccacctgcgtcatctgtcaggtaatctgtctgggaccacggtcccacctgcgtcatcggtcaggttatctgtctgggaccacggtcccacctgcgtcatctgtcaggtaatctgtctgggaccacggtcccacctgcgtcatctgtcaggtaatctgtctgggaccacggtcccacctgcgtcatcggtcaggttatctgactgggaccacgggcccacctgcgtcgtcggtcaggttatctgcctgggaccacggtcccacctgcgtcatcggtcagcttatctgtctgggaccacggtctcacctgcgtcatcggtcagcttatctgtctgggaccacggtcccacctgcgtcgtcggtcaggttatctgtctgggaccacggtcccacctgcgtcatctgtcaggtaatctgtctgggaccacggtcccacctgcgtcatcggtcaggttatctgactgggaccacgggcccacctgcgtcgtcggtcaggttatctgcctgggaccacggtcccacctgcgtcatcggtcagcttatctgtctgggaccacggtctcacctgcgtcatcggtcagcttatctgtctgggaccacggtcccacctgcgtcgtcggtcaggttatctgtctgggaccacggtcccacctgcgtcatcggtcaggtaatctgcctgggaccacggtcccacctgtatcgccggtcaggttatctccctgggaccacggtcccacctgcgtcatcggtcaggttatctgcctgggaccatggtcccacctgcgtcgtcggtcagcttatctgcctgggaccacggtcccacctgcgtcatctgtcagcttatctgcctgggaccacggtcccacctgcatcgtcggcacattattagttagggataacggttcaatcaatgcctgtcacgaacaggtattggcttgtcgccagcaacccgatgagcggagtaatcacgcagcagggcggctattacaggcgatggtgaaagctctattgggatctgaacgaagcatgttgagtgaaatttgcaaaatttcgcagagtatgcagcttaatctttaa

SEQ ID NO: 102272 - DNA, 948 bp, Enterobacter aerogenes
atgacaaaccataaagaagagaacaggttattatcattatattctatggggatccttgatacaaaatatgaagaacgatttgacagattgacgaggattgccaccaaactctttgatgtaccaatagcacttgtttcattaattgatagagacaggcaatggtttaagtcatgttatgggctgaagataaaagagacagatagaagtgattcattttgtacaatagcagtagatcttagtgaaccattaatagtgcccgatgcaagccttgatccaagattcaaagaaaataaattagttaaaaatgatccttatatccggttttatgcagggcatcccgtaagactgccagatggtgagatagctggaacaatatgtattattgatacagaaccaagagtattaaccagagatgacttcttattgcttaaagatttagcagaaatcgtagaggatgagtttagaataataaacgaagcaactactgatcctttgacaggtatatgtaaccggcgttctttcgccctaatgacggatgaatcgttaagaaaagccaaaaaaaagaaaaaaacattctgtgttctgatcatagatctcgataattttaaaccaatcaatgataacttcggtcattcagaaggtaatgaagtactttgcaattttgcagatatgctggaagatcttagtagttcaaaaagcgttgttgcaagattaggaggtgatgaatttggtgttctattacccgagtcaacctataaagaagcagaagaattccttcataaattgagggccgggattaccagctacaatcttaattctcaaaaaaaatacaacatagatttttctgcagggattattgaatatgatgagaaaattcatactgaatgctctgctatcatgcaggatgcagacgaaagaatgtatgaaattaaaaagggaaaacgatag

SEQ ID NO: 102273 - DNA, 372 bp, Enterobacter aerogenes
atgactctgatgactctgacggtactgatgactctgacggctctgatgactctgacggctctgatgactctgacggctctgatgactctgatgactctgatgactctgatgactctgatgactctgatgactctgatgactctgatgactctgatgactctgatgactctgacggctctgacggctctgatgactctgacggctctgatggctctgatggctctgatggctctgatggctctgatggctctgatggctctgatggctctgatggctctgatggctctgatggctctgatggctctgatgaccctgacggctctgacggttctgatggctctgatgactctgacgtctctgatggttctgtaa

SEQ ID NO: 102274 - DNA, 183 bp, Enterobacter aerogenes
atgaataacgataaagtaaaccaccctaaacacttccaatacttgggccgcatggtcactgtttaccctacatacatcattattgacggtatcaagatcagccgttcccgtctttcctttgcattccaattggaattggcaaaagcacttcgactgcatgaagaaagcgtatgcagaaaatag

SEQ ID NO: 102275 - DNA, 378 bp, Enterobacter aerogenes
gtgattggccccccgggaggtggatcattcagcttcccacttgatgccagcggcggcacgctcagcctcgctttgttcccaaaaccactagtgaagcgccataagctcttcatcgagcggagcatatttgcggtcgaaatatgcctgtgcgtctttctccgcttcatcaggcaattcgccaggcccaaagagcgtgttataaatccaagccagcccgtttttagtatcgccagtggcctgccattcgatgattgcagcttgcataaccaggatatttttcccgatcagcagatccagttgctgatagcgcttacggatatattcgttttgcgcttcaagttctgcgttgcgctgctgcgccttctccagcgcctctag

SEQ ID NO: 102276 - DNA, 726 bp, Enterobacter aerogenes
gtgctcgaagctacccgggaccgggaccgggcgcggcaggcagaagagcgtgcacagcagttcgcagagcaggctgcaaaggccgagcagcttgaaaagcaacttaatgacctgaagcaacgcgctgtagatgccggcgtggatgcatccatcctggatggctcgggccttaactccgatcagttgcaagagctgatggaggaatacccggcgttaggccggtatctccagtcactgacacagcaaatcagcgcgctaaccgcaaacgcagcagcgccagcacataccagtgctgcgccagcggctgcgaatatggttgatgtcgctcttgtgcaggttcctgagctggacggctggcgcaccgccgacgctgaccgctgggatatggcactggcgatagatgcgcgccttcagaatgaccccgctttcgcagataaaaccctggttgcgcgcttccaggaagtcgagcggcgggtaaaggcagcgtttggtgataaccctacgcagcaggctcaggcagcagttgcagcacaggcggccgaaaaagtcgctgcagccgcaactgccttgcctggctccccttcagatgtaggttcgacagctgcagcgcagccgacgagtaaagccgcgcaaatcgcggcccagtcaggaaatgcattgctccattcaatgaatggtatgagcgacgctgaaatcgatgcattgctgtcgaccctcgattattaa

SEQ ID NO: 102277 - DNA, 276 bp, Enterobacter aerogenes
atgagctttgaaattatcgcgggactggtggtcgtcatcctgggtgctattgctggcgcgttcggcattggtcatgctcgcggggccagtaaggcgaaagccaaagctgatcagcaacgtaccgaagagaacgccgctgctactgtcgccgcggcagaacgccgtgctgaagtcacgaaaggggccagcgatgtacaggaagacgttaagcgtatgggcgatgacgatgttgatcgggagttgcgcgaaaagtttacccgccccggtagtcgttga

SEQ ID NO: 102278 - DNA, 840 bp, Enterobacter aerogenes
ttgcttaacgtgagttttcgttccactgagcgtcagaccccgataagcaccgtcagcgcccccgtttgcccgccagcgttgaggataagcaccttcagcgcccccgtttgcccgccagcgttgaggataagcaccgtcagcggtcacgtttacccgccagcgttgaggataagcaccgtcagcggtcacgtttacccgccagcgttgaggataagcaccgtcagcggtcacgtttacccgccagcgttgaggataagcaccgtcagcggtcacgtttacccgccagcgttgaggataagcaccgtcagcggtcacgtttacccgccagcgttgaggatgagcgccgtcagtggatccgtttacccgccagcgttgaggataagcactggcagcggccctgtttacccgccagcgttgaggatgagcaccggcagcggccctttttgcccgccagcgttgaagatgagcaccggtagcggatccgtttacccgccagcgttgaggataagcactggcagcggccctgtttacccgccagcgttgaggatgagcaccggcagcggccctttttgcccgccagcgttgaagatgagcaccggtagcggatccgtttacccgccagcgttgaggataagcactggcagcggccctgtttacccgccagcgttgaggatgagcaccggcagcggccctttttgcccgccagcgttgaggatgagcaccggtagcggatccgtttacccgccagctttgacactaccagcgactacagtcgacattaaaatcgccgtgacctgctgcagcgtgatatacgcccggctggcatcaaaagaatcttaa

SEQ ID NO: 102279 - DNA, 369 bp, Enterobacter aerogenes
atgaaagcgcgcgtcggcttgaaaaaaggcgatgcgccgaccgttgccagacgggaaaaaagggagaaaaaagaccgccagtctgatccgcgttttccgcgagccggtcatccctggcaggaagacgaaaaaaccttactgagtgatgcgctcgattcggtaccggacgaagaaattggcagtcatcttttctggctttccgagaaactgggcagaacgcctttcagtgttgctttccagatcgcggcaatcaaggagctgcaggacggctgggaggagcagttcagggagatttcggataacattcgcttgtccggtctgagcatcagtgattatctgaagcagaacggcacggacctgaacgcctga

SEQ ID NO: 102280 - DNA, 300 bp, Enterobacter aerogenes
atgaaaacagcggtatgggtagtggtgtatttcgtgctgttgttgctgagacatctgttcggcggctaccgccatctcatgacgctgcacgactcagttgcccactcaagcgtcgcgatagctttcgctaatcgcatgtactggtgcaatatttgccgctaccagcgactgcgatcaggaaagtctttttcattgagtttgttcttttatgtgaattgttcgcacatcactccccgcatacactttgcaggtatgacggtttggccgtggttccgattctgcaatgccgccgttggctaa

SEQ ID NO: 102281 - DNA, 351 bp, Enterobacter aerogenes
ttgaccatcattaacaatttcctttgtgctaatggcaagattatgaaaaagactttactgatagccgccatagtggcggcaggtattacgttcgcaatggccgacgatggccagcccgctggtcgactgtacaaaattggcgagcacaccgtagaaatagatgcggattgcatgatcctctcggttgacggctcccccgctacgctaaacgcgtccgtatccgggcatatggattttaatttagccaacggcggcattgcagaatcggaaccacggccaaaccgtcatacctgcaaagtgtatgcggggagtgatgtgcgaacaattcacataaaagaacaaactcaatga

SEQ ID NO: 102282 - DNA, 549 bp, Enterobacter aerogenes
atgagtttttttcttaaatcattagccgcaggtgtttttacgatagccagcttcagtgttggggctacaactgctcctgttttagacacaacgccacagatggcctatgaggatatctctcgctccttaactgaattgcagccgattacgtttcagtctggagtggaaaaatataaaatattagtttttgtagataatcaatgtgtttattgcagctatgttgtaaaaaacatcaagaaatacactgatgcagggctgactatgtcatttctgacggtggttccatcatccatcaaagactcagtcattgaagatatgggacgagtatggtgtgcatcagatcgtcagaaaagttttcaaaatgcgatggccggttttttgccagacaatgatagctcagaaaaatgtaaaaatctggtgattaaacaatctgaacttgctgatagactgggcgttacagtaactcctgctatggtagtgctggagccgtctgtgcatactttcctgggtagtgtttctccagataaaattctctctgaactccagtaa

SEQ ID NO: 102283 - DNA, 435 bp, Enterobacter aerogenes
atgaatttaagagcgttctcagcccccatactcaccctggtgctacttataacagcctgttcaaaccatactcaaaaaacaaacgtcagggtaatgcccggcaacgataaatcagcggaagttgatgatcttttaggtaacctagggtctccaacatttcccccggagcattcaaaaatagtcgtatatgcagcacaaatacggaatgccattgttgccgaaatgtacgaacccgatgcgtataaaggaaaaacctgctctattcgtatctatcttcagcctgatggttcagtgaacagtgcgacagcaaaagagggtgatgcaaaattgtgtaaagcagccatttcagcgattacacgagcgaaaatacccgccgcaccagataacgaaacatatcagagggtcaaaaatgccgctcttgatttcagactatag

SEQ ID NO: 102284 - DNA, 216 bp, Enterobacter aerogenes; identical to SEQ ID NO: 101641

SEQ ID NO: 102285 - DNA, 213 bp, Enterobacter aerogenes
atgctaaaaaattatattgatgtctatgaatcacacaatttaaacaatgggttatgtcgctatcgtacgttttcgttccattggccctcaaaccccacaaccgccttggcggttattggggatgataaaagcacaaatgtgaaccccacagccatcgcagggggagtcgtcacatgcttcgatctttatgggcgggagatctggacgagatag

SEQ ID NO: 102286 - DNA, 477 bp, Enterobacter aerogenes
atggagaacattcctgaagatggacagaccatgatgccagatgaggtcaatggccgacctgttctacatacgcccagaggcccggtactgacgccttgtgctcccggaagtgtattagcccgactgggagacaagtggacaattttggttatttcgttcttatctctctatcccgatacaccgatgcgtttcggggtgcttcgacggggcatcccggacatctcgcaacgcatgctgacgttaacgttgcgtaaccttgaacgggatggtctagtttcgcgccactactaccctgaactgccgcctcgtgtcgaatacgagttgactgaacgagggtgctccatgctggagccacttgctggttttacccgttggattcgcgacacatggcaggatatagaagcttcacgacgcgcctatgatgaagctgaacacagatctaacgaagttgaagggaaaacattcagacaggaataa

SEQ ID NO: 102287 - DNA, 960 bp, Enterobacter aerogenes
atgatagttcaaaatgagaaccttcaaaagttactatggggtactgagatgcaacagtctttggaatttctggtttttggtgctaccgggcagcagggtggtgctgtagcaagagcgttgaaggccagagggaaaacggtacgagccttcgtcagggatgcccagagcgataaagcaagagctcttgccgggctgggtatcaaactggttgttggcgatctgttcgaccgggcctcgattgatcgggcgatgcagggtgtcaaccgcgtgttcagtgtgcagaccagttcgccatccggcctggtgtcagacgaacaggaagtgatgcagggcaaggcaattgccgatagtgcggtcgcagcaaacgttgaatttctggtgtactcttcgggcggggcagcgggaaaaggtctgaccggtatgggacatttcgacagcaagtcacggatagaggagtacattcgcagcctgccaatcgcagcaacaatcacgcgaccagccagctttatggagatgatgctgctgcctggtatgggtctgaatacgggtgtattcaccttcttcatgcatcgggatcagccgatgcagatgattgcgcttgacgatcttggcagaattaatgccgagatcctgtgccacccggagcgttacgcgggtcaggcgctggagctttccgggcagagtattaccggcgaagagttagagtgcgctttttcgctggcagcaggccgcccaatccgctatcagcggttttcagaagagttactggcaaacaacttgttcctgaaaaaactgacggaattagtggataacggcgtggttgcaggcattgcagatatcccagccttagagcgagagttcggtccgatgctgacattgaaagaatggcttaagggggcgggaaaagctccttttgacgctgcactgaatatggcaactgctgatattgcattgcgataa

SEQ ID NO: 102288 - DNA, 561 bp, Enterobacter aerogenes
atgcgactttttggttacgcacgggtatcaaccagtcagcagtcccttgatattcagatccgggcactcaaagatgcaggcgtgaaaactaaccgtatctttaccgataaggcatccggcagttccgtcgatcggccggggcttgatctgctgcgcatgaaggtggaggaaggcgatgccattctggttaagaaactggaccgcctgggccgtgacactgccgatatgatccagctgataaaggaatttgacgcccagggggtggccatccggtttattgatgacgggataagcactgacggggaaatgggaaaaatggtagttactatcctgtctgcggtagcccaggccgaacggcgcagaatactggagcgcaccagtgaaggccgggacgaagcaaagctgaaaggcattcgctttggccgcaggcgttccatagatcggaacgccgtgcttgcgcttcatcatgaaggtgctggcgcaacggagattgcccgtcattttagtattgcgcgatccacagtctataaaattctggaggacgagaaggtcacacaatag

SEQ ID NO: 102289 - DNA, 141 bp, Enterobacter aerogenes
atgcccgtcgattttctgaccactgagcaggaactgaattatggtcgctatgttgcagaacccaatgacgtgcagctggcgcgctatttggcactgttgcaaatagtcggtggtgataaactggcactgttgcaaagttag

SEQ ID NO: 102290 - DNA, 993 bp, Enterobacter aerogenes
atgcctgttcaagacgttattcccccctatgagcagatgtacctgctaaatcagcagctgatctgcaacgctgatcagttcaaacatgccgttatcacagttggcggtcaggctgtgcaatactggatatcctattatcatgcacaatacggcgacagattgcctgatgagcgcctcaccacatctgttgactgcgactacagcgcccggaaagatgatattgcggctatagcaaaaacgctcaacgttaagacgtgggagaacaaagacggtcagcccccatcccttgcgcagtttatgcttatcgatcaggatacacacgatatcaaacgggatgatggacgcttatttgccgtaccggatgcgcctgacgagccaaatgtggtggatattatcgaccgccccggaggctttgaccgttctgattttcaggggaaaaagctttacctgtataccgccccgttttatgtagaagcaactggccccggcatgcctgaaatgaatgaaaaggtaagggtattgaaccctgtcgcctgtatgcgctcgcgctttagcaatctgattgccttgcgccgtgatgctgaaattgaaattgcgcgtattaacgcgctcaagatcccgtgttatttctttctcatcgaacagtttgatgaacagccgttcaaagttgcacgaggaatctttatggatttatggaggctcgcgaatgacgaaagctgtctgcgccatcaggccttctggcatagctggcaggggccgcttcttgaagggcaacaaagtaacaacatcactctgattgatgtgttggaaggcgtacatgtatacctggaagggcatcttgatgactttgaaataccggaagcctttgtcaccaaagaagtaccgctaaagctcgcacagctgcgtgaacgctgggagcgttacgtggtactcaatgctgaatgggcagcaagagggcgcaggggatttgaacgtaatccccgtgatgattag

SEQ ID NO: 102291 - DNA, 156 bp, Enterobacter aerogenes
atgtctcccgtacaagctaaacaaaagcagcatgaacgctacgaagccgtagcggtgcaggttttgcgtggtcgtgccggttacaaacctgccgtgaaaagccgcttcagtaagtcagctagtagcaaattcgctcatactatcgcttttgcctga

SEQ ID NO: 102292 - DNA, 219 bp, Enterobacter aerogenes
atggcacgcgaagggttcaccgatctcattgcactcatcacagtagctcaaaccgggagtttcacacgtgcagcagcccagcttggcgtcacacagcccgcattaagctacagcatcaaagggctggaagaacggctgggggtaaggcttttaatgagaagtacccgtaatgtcacactggatttgcccctatatttccagacacctgttatcacttaa

SEQ ID NO: 102293 - DNA, 1023 bp, Enterobacter aerogenes
atgtcattattcaaaacgtcactgctttgtgcatcgatactgatctctaattcagtttttgctgatagcaccaaccctaaaacggtcgctgaaggtataaatgtcattggctctcagaaagtatcattccagaatggtacagtcagaatggccgctaacctttatatgcctcctgactttgacaattcaaaaaaataccctgcaattgtggtttcacatccctggggcggtgtgaaagagcagacatcaggtctatatgctcaacagctggctaaacatggttttatcacgctggcttatgacgcatctcattatggcgaaagtggtggtgttccacgtgacctggaaaatccagccgatcgtgttcaggatatccgtagtgccgttggctatctgagcagccttcctcaggttgatgcctcgcgcatcggtactttaggtgtgtgtgcaggtggcggatatacgctgaacgaagcccaaactgatttacgagtaaaagccgtagccggtgttgttagctatgacatcggtgatgctacgcgtaatgggatcaccggaatgccagttactgcagcagatcgtcagaagctattacagagtgtggatgaacagttaaacaaagaagccgctggcgcacctcttcttgtgcagcagttgcttccttcccgcaataccgtaaacgccagcacacctaattttgtgcgagaagcaactgagtattatctgacgccaagaggtgctcatcctaacgcagcaaaccgttatgtagtgacaagtccaggtctgcatatggcctactatccgctggaacacatggagcttatctcgccacgacctgttcttcttatcgctggctcaaaagctgaaacattaagatttagtcagcaggcctatgataaagcacagcagccgaaagagttaatgattatcccaggtgcttcacactttgacttatatgataaacctcagtttgttaatccagcactggataaactggccgaattcttcggcaagaatctttaa

SEQ ID NO: 102294 - DNA, 765 bp, Enterobacter aerogenes
atgaatttctcttttgaaaataaagtggcgctagtcacaggtgccgcttctggtattggatatgcaacagctgaagccttcgctaaaggaggggcctcagttgtcctgtctgatattaacgctgatgctgtgaacgcagcaactgacagactgaaagcaaaagggttccaggcaactgcggttgtgtgtaatgcagctaacctcgatgaggttgaagcgatggtaaagacgacggtcgaaacatacggccgtctggacatcgcgttcaacaatgcggggattcagaataaattagctgaaatcgccgatgccacagcagaagactttgatcgcgtaaattcggttaacctgcgcggtgtctggggatgtatgaagtacgaattgcagcagatgcgtaagcagggtagcggcgttatcgttaactgttcctcactggggggacttgttggcggcgcagagcgggcaaactatcatgctgcgaaacatggtgtgctgggattaaccaaaagtgcagctctcgaatatgcgacccgtaatatccgcgtaaacgcagtgtgtccgggactcatctggacgccaatggctgaaagcatggtcgcttccggccaaaaggaggctctcgatgcgatggtacaaagcgtacctatgcatcgtcacggtcgtgctgatgaaattgctgacgttgtactttggctttcaagtgacacatcgtcatatgttacaggccagtctatttcagtcgatggtgggctgattatgcgataa

SEQ ID NO: 102295 - DNA, 1023 bp, Enterobacter aerogenes; identical to SEQ ID NO: 78996

SEQ ID NO: 102296 - DNA, 381 bp, Enterobacter aerogenes
gtgaggcgaatgactactcgtccggcattaggtccatgcgtaagttttaaacttgatgaagatacgcatctgaaattggtaaacgccaaagagagaagcggacgtagtaaggctggggaggttgtgcttagggttaaggatcaccttttacgctatccagatttttatccaactgtaacttataagagtgtgagttttggtcctgttgttatggcccgctttgatgaggatacaaacaaaaaactgattgcagctaaaaataaaagtaacagaagcaagtcgcatgaagtttatcttcgtctcaaagcgcatctgttcgaatttcctgatttttatagctctgaagtcgaagtgataaggaggtctgtatctgaaacataa

SEQ ID NO: 102297 - DNA, 1020 bp, Enterobacter aerogenes
atgacttccgctctgcgccagctggttgagggtggcgttatccagctcacgctgcgtcaccgacgcaaagaccgttgccgtctcgctaaccgacctgccgggactttccacccagccgtggccgattttaataccgtcaaacacgcccgcgcccacggccagggtctgcgtggttttctgccccggccgctgtaccgtcagctgcccttcctccactttcatcaccgtgatgctttccccgcccttcaggcgtgtgtccggtatcttcccgagcaccgccagacgttccccctctgccaccggcagtgtatctgcccggaacagcgtccactggctgtcgaccgcggaaaccttcagatccagacggaccccatcccggtctttcagggtcagcatattgctgctcgcggtcacccggtcaatgacaaagcgatcgtgcgtccggttctccggatcccagcgttccatcaccatcccctcccggtaataatcccgcacgccccggcttttgctgtccagccacaccggcgtcagggctgtaatggtcgtgtctttctcacccagcaccccctcatgtctgagggagtcacggataaggccgttgagtacgctctgttcacgcgtcccgctgatttgggccacgctttcctgcccttcacgtacgctgacggcaaactcctgtgccagccggctgtagcgtgctcctttatccggttcactgatgatgtcggctgtggtctgatggcccccctgccagcgatacgtattcacgccgctgtccttcagcaccgtcagcgcactgccggtcccgctgcgcttcccgccgtcggagagcaggacctgcacgttatggcgcatcgcgccatcgagcagggaaatcgtttccttcaggctcagcttctccgcctgatccacgatgagtgttccgcccggaataaacgccgtcccgtcctgcagggcggatttaccggtcaccgtttccccggccagacgcacatcaccggcgagaaaatcacgtga

SEQ ID NO: 102298 - DNA, 573 bp, Enterobacter aerogenes
atgcgtcggcgccagaccgatgacgcgcggacgggtctcttccggcagcagactgatggcactcatgactgcccggaactgggtggttttccccaccccggcatacccctgaaccaccgtgaagcggtccgtgctttccagaatcatccgggtcgccgcccgctgtccggcggtcaggtccgtcatcagactggccggcacgcggtccatcaggggggccaccgcgtctttaccttccagcacgtgggtcaggatgcttttttcggcgtcccaggtctgacgggaaatcagcaggtcattgccgtagccgtgcgccaccggtacattcagcaactgccccgacctgatttgtgcctggatggtcgtgtcgatgtccgccatcgaaaccttcccgcccccggtttccattgccgtcgccagcagctggggccgggagaaggtcaggtcctggctctcaagcagcgggatggccaggtgaatggcctgttctgccggggtatgcagcccggccttctgctgcgcaatggccgcatccaggtccgtctcgccggatcgggacttcagctgctctga

SEQ ID NO: 102299 - DNA, 474 bp, Enterobacter aerogenes
atgttattagtaacagtgtcactactttccggtttaatgatttatattatcattatgaacagagcagaactcaatagttcactatctgcaaggtttgtaaaggctttgaaaaatgaagccctgtcgctggtctatcaacctatttacagaattgaagacggacagatctgcggatttgaggccttgctcagatggaaagatgaaagactcgggaatattagccctgaagtatttataccgctttctgaaagggaagggttgcaggaggatgtgactttattcgtcattaaccatgctatccgagaatttatccatactgctattcagaatgaaatatttttgagcgtaaacattaatccaagcgatcttgattcagaaaaattcagggataaactactaggattaatttctgaatataacatcccatataaaacaatccttcttgaaattacggagcgtcaaggaggggattag

SEQ ID NO: 102300 - DNA, 294 bp, Enterobacter aerogenes
gtggcgcacgtcttcggtgaacgcactctggccacactggagcgtcttctgagcctgctgtcggcctttgaggtcgtggtatggatgacggatggctggccgctgtatgaatcccgcctgaagggaaagctgcacgttatcagcaagcgttacactcagcgcattgagcgacataacctgaatctgcgacaacatctggcaaggctgggacggaagtcactgtcgttctcaaaatcggtggagctgtatgacaaggtcatcgggcattatctgaacataaaacactatcagtaa

SEQ ID NO: 102301 - DNA, 1086 bp, Enterobacter aerogenes
gtgagcatcatccagcacgttggcgaacgggttaaacttgagggtatcgccatcgaggtatacgccccccatgttttcacacagggacttatagccatcgcccatgtcgaacacccaggcaaacccgccggagtcgagcacactgcgaatgaggggctgaatcagaccggttttacccgccccggacgtcccgcagactgccatgttgaaattggtattgttcattccctcgtagaacaggtcgatgaacgccagctgatttcggtaggtgggcgccaggagtcccgccggcgccagcgggctgtcagcgacgatcggcaggaggttagccacctggaacgtctccgcccgcttcaccacgcctgccgcctgcagctctttaaacaggccctcaccacacttgaacggcatcatggccagaaagttacgcaggtgatggtagcgggccgggatcagctggaaaccgcctttacggtagctgttgagcacctgctgttcagcggcgagagaggcctctgtgctgtctgcggtgtacgtggtgatattaaagaagtaggacaccagggaggtctggttggtcgccagtcgctggcggatatcgccccactcctgcatttcctttatcacgttcggaaaaaacttcgcgtaggaggttttgcttttcttctccacgtccatgaatttcatgttggcttcattctgggtcttcacctggtcctccaccatcagcgtcagcgtgatgacaaaggggcaggagatggagagctccgggttaagcaggttggcgtagttatccgcggaggtccagaggaaggccatttccggatcactctccagatggtagctcgtcacccgggttacgcactctttcccgtcgcgccccaggcggccaattttcagatgaccggcggtgacctgcatatcaaagctgtcatcgacacactgatagttcagatcctgataggggtccagcttatacggtacgcggtacatctcgtgcgggtccgggtttatcagctcgcgcatcagttcgaccagcccggcagcatcaaggatacgcgtcggaatataggcaccgcccagtga

SEQ ID NO: 102302 - DNA, 1854 bp, Enterobacter aerogenes
atggtcgagcaatatggacgggttaagcgctttctgccagcgatgctgcgtgatttacattttcagtctgcccctgccggcgaaaatacgctatcggccatacattacctggccgaactgagtggttcgaaaaaacgcctcctggagaatgcgcctgagcagatcattacaggtccctggaaacgtctggtgtacgactccgaaggccggatacagcgtgcaggatactcattgtgcctgctggaacgccttcaggattcgctgcgtcgccgcgatatctggctggagaacagcgatcgctggggcgatccgcgtcagaagtttcttcaggggaaagaatggcaggctcagcggatcgccgtatgccgggcgcttggacaccccaccgatggtggaaatgccgttaaacagctggcaaccgaactggacgaaacctggaaaacggtggcctcacgctttgagctgaatgctgccgtgagcatctgtcatcagggtaaatatccgtccctgaccatcagcagtctggaaaaactggaagaaccgcagccgctgattcttctgaacagccgcgtcaggcagctggtcccccctgttgatctgacagagctgctacttgaaattgacgcccggactggttttacccgcgaattcactcatgtgagtgagtctgaagcccgtgctcaggatcttaacatcagcctgtgtgccgtactgctcgctgaagcctgcaatatcggacatgaaccgctgatcaaacacagtattccggcactgacccgccaccgtctgagctgggtaaaacaaaactacattcgggctgaaacgctggtcagcgctaatgcccggttggtcgattttcagtccacgctggaactgtctgagcgctggggcggcggagaagtggcttctgcagatgggatgcgctttgtcactcctgtaaaaacgctgaactctggccctaacagaaaatactttggctcagggcgtgggatcacctggtacaattttgtttctgaccagtattccggctttcacggcatcgttatccccggtacgttgcgtgactctatctttgtgctggaagggcttctggagcagctgacggggctgaatccggtggagattatgacggacactggagggtccagcgacattatctttggcctgttctggctgctgggctaccagttttcgccccgcctggcagatgccggtgaggcggtattttggcgtgcagataaaaatgcgaactacggggtactggatgagctggcgcggggatgcgttgaactgtcaaagatagaaacccaatgggatgaaatgatgagggtttccggttctctgaagctgggtacagtccacgcctcagaacttgtgggctcgcttttaaaaagttcccgtccgtcagggctggcgcaggcgattatggaggtgggacgggtcaacaagacgctgtacctcctcaactacattgatgatgaagaatatcgtcgcaggatactgactcagcttaaccggggagaaggccgtcacgccgtggcaagggcgatctgttacggccaacgtggtgagattagaaaacgttaccgtgaggggcaggaggatcaactgggtgcgctggggcttgtcactaacgcagttgtattgtggaacacgctttatatgcaggaagcgctatcacatttgcgcagcgctggtgagatcccggaagacgagcatatctcacgcctgtcgccactgatgtacggtcatatcaacatgctgggacattatacgttcacgctgccggaaaatattctgaagggagagttgaggccattaaatttcaattcaaacaatgaattattgccttaa

SEQ ID NO: 102303 - DNA, 474 bp, Enterobacter aerogenes
  misc_feature (429)..(438): n is a, c, g, or t
atggaattgatgccattcaattttgacagattgcctaatggacaggtgtttataagcaacctcgctggttttcatcacttcattgatgagcaagagctgcttgatctttctgatgagcaaatcaatgcggaacaatcaaacgcactcgaaagcaagctatttatagctaacgaaagctcatcggctataactccctatgctttaagttctgcttttgcaaaacgattgatgaatgaactggcggtcaggccaattttcatgattgtgcccacattacgttgcgaccatacctgcaagtattgtcaggtcagtagagcttcagtgaacgcctctggttatgatctagatcccgatctcatccctgatatcatttcgactatcaaaaaactatcgacaccaccttacaagatagagatacagggtggagannnnnnnnnnactcttgcggttcgatttaattcagtctatctatga

SEQ ID NO: 102304 - DNA, 198 bp, Enterobacter aerogenes
atggatggaagcaatgccggagagttgattgcagaattcaatgcgactaaagcgcttcgcccggatcttgctaaacccgtctggcacaattcgcttcgcttgccgaaaaacgaagagctgacagatgctcagtggtcagaaattgctgatgattacatgtcccgaatgggcttctctgaaacgcacctcaatgcataa

SEQ ID NO: 102305 - DNA, 291 bp, Enterobacter aerogenes
atggatgaattattcaaatggctgcttgctctggcttctttatttttagtatatctctttctctttacttccagtaatgaccctgtaccagaggcgctcgcgcaccactggactcatgactgccggttgcttgagactaatattgataaagggtttttctctcctgcgcaaaatcgacttcagtgtggtgatgttattgaaaatgtcagcaaggctgattatgacagagcgataagtggcgataagcaaacaactctcgcagagacaatgaaagaaatattcattcgttaa

SEQ ID NO: 102306 - DNA, 570 bp, Enterobacter aerogenes
atgaaggaattaatgctgttaattcctctgggcagcgctttgctcttaaccgggtgtgcgggcacagagaccgaatttcaatgtaatgccacgacgtcggatacctgtatgacgatggaacaggcaaatgaaaaagctaagctgaaagaggaacgcagtgacgcaaagccggctgcggccggattgccacgactggctgacggaaatttcagaacgacgtcgccaaactcatatccgctgccgccacagccagtaattaatccagggcgtaatacagcgccatctgtgacggtgagtaataaacccgggttcctgaatacggtaccggtcaattatgatgacgtcctgagaacacggactgctccggtatatatcaggccagttagtcttagtacttatacttctccggcgacaattccgggtaattatccccgaccattaagaaacggggaggagacaacgtcattgtggatagcgccgtatgtggatgcagatgatgtatatcaccagccggcaacggttctttttgtcgtaaaaccatcggcgtggggacaacctcgccttaattga

SEQ ID NO: 102307 - DNA, 294 bp, Enterobacter aerogenes
atgatgtgcatcagcctgcggtgccggctccgcctcctgattctgagcctgctgttgcccgttcttttccgcttccagctcttcgatggttttcagctgaaatccatcctggaacacgacagtcacttcgttaccggcaccaatcggaatgaccgggtgatactgctcagcccttttgatgtagtactcgctcagcgtctgcgcagctttagatgcaccaccgccgacacccattttcagaacatcaccggcgccaacagatgcggttgcccccaggccaactgccggctgtga

SEQ ID NO: 102308 - DNA, 1692 bp, Enterobacter aerogenes
atgaaaaatataaatgtgacagcaaaagatacaggtgttaaatacaccgttgatggcaatcaagttaacttaaacacgcagtcggtggtggtattacatattaagcgagaggatattagttcctacgccaggcaaggtaatgatcttgttctgaaaataaatgacggtagcacccttacgctaaaaaacttttttgttaatgatgctaatgggcatcatagtgatttagtgctacaggatgatgacactggcgcattgtggtggcttgacggggctggaaccagcgatgcacattattctctcatcagtgatatttcaggacttctagccgcaggaagctctggcggcagtatcgcgccatgggtaatggcgggtgcggctttgcttggtgtaggggcgatgattgcgggatcttccgataaagatcactcctcgcattcttcgaacgatgatactgactctgatgccgacagtgactcggactctgacagtgactccgatcttggcggccacgaaagtgatgctgatgcggactccgacagcgattccgattctgacagtgactccgactctgacagcgactcggattcggacagcgactccgactccgactctgacagtgattccgactctgacagcgactcggactctgacagtgattctgactctgacagcgattcggactccgacagtgactccgactctgacagcgactcggattccgacagcgattcggactccgacagtgattcggactccgacagcgattcggattctgacagtgactccgattctgacagtgattccgactctgacagcgactcggactctgacagcgactccgactccgacagcgactcggactccgacagcgattcggattccgacagcgactcggattcggacagcgattcggactccgacagtgactcggattccgacagcgactcggactctgacagcgactcggattccgacagcgattccgactccgacagtgactccgactctgacagcgactcggactccgacagcgactccgattctgacagcgactcggattcggacagcgattcggattcggacagcgattcggattcggacagcgattccgactccgacagcgattcggatagtgacagcgattcggactccgacagcgattcggattccgacagtgactccgattcggactctgacagcgactccgactctgacagtgattcggactctgacagcgactcggattccgacagcgattccgactctgacagtgattcggatagtgacagcgactcggactctgacagcgactcggactctgacagcgactcggactctgacagcgactcggattccgacagtgactccgattcggacagcgactcggactctgacagtgattcagactctgacagcgattcggattcggacagcgattcggactccgacagtgattccgattccgacagcgactccgattctgacagcgattcggactctgacagcgactctgattccgacagcgactccgattctgacagcgattcggactccgacagcgactccgattctgacagcgattccgactctgacagcgattcggactccgacagcgattccgattccgacagcgattcggattccgacagcgattccgactccgacagtgactctagactggccccctga

SEQ ID NO: 102309 - DNA, 258 bp, Enterobacter aerogenes
atgaatatgatatttgaactgattggattgttacttgtagtcggatgcgcattcttcaccacttttttcttagccgcagtagcaggcactatggtagttatttttgggtggggaatttctattgtcaccccgaagttggttacctgtactaatgattgcatcactactgtttttgatgccaaaccctttggctggcttctgattgtgttttcattaaccatgatgttctttattatcagaggtatgattaaacgttag

SEQ ID NO: 102310 - DNA, 255 bp, Enterobacter aerogenes
atgacgggaagaggcattaacacagtacgtatcggcgatgaagtgaagcacatcaccgagctcgatgcactaacactcatgcatgaatggtcaaagcttaaaaaagaaaatgcagacctgtatgactataacggtcaggttaaccgggggtggcgcggctttattcttcgcatgatgggtatccatttgcctgataacgaccgtgttcgtcttcagggcattaatgccagaaaagactccatctatccagaatga

SEQ ID NO: 102311 - DNA, 546 bp, Enterobacter aerogenes
atgccattacctgagcgaatgaaacccgcacgggtcacccgtaaacagatgaaagaactggtcagtcagctgaatggcattctcgatcacatcgataacgggatggacgaaaacaatgaagaactaaaacagatgatggcagactggaatgcacaggtcgtcataccctgcgggttctctgattttcgtgatttttcatcctggacaagtgcactagatttcaccaggatggcgcttaatcaggaaaaataccttgatgactttacatggacagaactgaacgacgttatcaacttcatacgcaaagcagaaggtagtgcatctgaccacagctatgcactccagttactggagattaatttcagggcaaacccactggatctcatctatcaccctgactgctggttcaatgatgaagcattgtttcatgctcggctgactaccgaagaaattggtggctacctgatgaaaaaatcaggtcgatggctcaacgatgcaccggatatccagctggtgtatgccatcccccaggatatttatgattaa

SEQ ID NO: 102312 - DNA, 963 bp, Enterobacter aerogenes
gtgttcggtattcagtcctatgcccagctggaagatatctatggcgtcaagcctgccgccacgctctttgacgtgatgaacacccgggccttcttccgctccccgagtaaggagattgcggagtttgctgccggtgaaattggtgagaaggaaatcctcaaggccagcgagcagtattcttacggtgctgacccggtgcgtgatggtgtatcgaccgggaaagaaaaagagcgggaaacgctggtcagttactccgatattcagacgctgcctgacctgtcctgctatgtcacgctgcccgggccgtatccggccgtgaaactcgccctcaaatacaaaccgcgtccgaaaattgccgagggatttattcctcgcactctcgatgcgcgggtggatgcgcggctcagtgcgttgcttgaagcgcgggaagctgaaggcagccttgccagggcgcttttcactccggatgcgccggcatccgggcccgctgatacaaacagtcacgccggtgaacaacctgagccggtcagtcagcctgcgccagcagacatgacagtatctccggaaccggtaaaagcgccgccgacaataaagcgtccggcagcggaaccttccgtcagaacaacggagccttccgtcctgcgggtcacgaccgtaccgttgatcaaaccaaaagcagccgcagcggccgctgctgcctcaacagcatcctcttccggtgcccctgcaacagctgcaggcgggacacaacaggaactggcgcagcagtcagcggaacagggacaggacatgctgccggccggcatgaacgaggacggcgtcatcgaggacatgcaggcgtatgacgcccggctggcagatgagcagacacagcgggatatgcagcggcgtgaggaagtcaatatcaaccacagccaccgtcacgatgagcaggatgatgtcgagattggagggaatttctga

SEQ ID NO: 102313 - DNA, 867 bp, Enterobacter aerogenes; identical to SEQ ID NO: 101634

SEQ ID NO: 102314 - DNA, 573 bp, Enterobacter aerogenes; identical to SEQ ID NO: 93524

SEQ ID NO: 102315 - DNA, 123 bp, Enterobacter aerogenes; identical to SEQ ID NO: 102185

SEQ ID NO: 102316 - DNA, 363 bp, Enterobacter aerogenes
atgctcaggctttcacgcttggtcaaatcccggcgcaaagcttttaaaagtccgtatatggatatcagtaagatcactgagaaaggcaatgcactcgctattgtcactgtttgcagcgcacttagccctccggcaaggagaagcgcaattgcgacaatgcccatgagcgaggcccagaatattcgctgccagacgggtgtgtttgccactccacctgatgccagagtatcaactaccattgcccccgagtcagcagacgtgacaaagaagacgatgaccatcgccattgcgatgaatgacagcacggaagagaacgggaaatgctccaggaaattaaacagggccagcgccacatcctgctga

SEQ ID NO: 102317 - DNA, 993 bp, Enterobacter aerogenes
gtgaaaaccctgacgcttttcctgagtgccctgatgttgtgggggtacagcctcagtgcggctgctgatccctcctgtgagggccggtttgttaacccgatcaccgatgtgtgctggcgctgcatcttccccctgtcgctcggcagcgtgcaggttggtaaaggcgatctgcctgataccagcaatccgggtagtcccctgcagctgtgtccggcgccgccaccgatttttgttcgacccggcctggccatcgggtactgggagccgatggccatgacggacgtcagccgttcgcctggctgtatggtcaatctggggggcttcagtatcaatctcggcaagaccggtatggggaccgcgagaaaggacgacaagcaggtgaacggcgctttttatcacgttcactggtacaagtacccgctgacctactggctgaacatcatcacctccgcaggctgtctggaaggcggagacatggatatagcctatctgtccgagattgacccgacctgggtggacagcagcctcaccaccattctgaatccggaagccatcctgtttgccaaccccatcgcacagggggcgtgcgcggctgacgctatggccagcgcgtttcatatgccactcgatattctgttctggtgtgccggctctcagggttcgatgtacccgtttagcggctgggtaagcaacgagtccagtccgctgcagtcctcgttacttgtcagcgagcgcatggcgtacaagcttcaccggcagggacaaattatggagagcatcgggaaggacaaggcggtctgctatgagtatccgtccccgatcatccccaaagagcgctggcgctatcagatggtgaacatgtacccggacagtggtcagtgccatccgcttggacgcagcgtgatgcgctgggaggccggcaaaaatccacccaacacccgcaagaactacggctatctgatgtggcgtaaacgcaattgtgtctttctctga

SEQ ID NO: 102318 - DNA, 642 bp, Enterobacter aerogenes
gtgtttgcccacgacttccgtctcatagccaagcttctcaaccaggggtttgaacgcctcccggtaaagcttcccgaacgctatctggttcgcgtacacgttctcgataaaacctgttttaccgatcttatctgtgccgagagactgccatttgtccccgttctgcgtggcgttaatgacgacggcatgggtgtgtatctgaggttcctggttacggttcgtgtcgtggttgaatttcgccacaatcagatttccggtcagcaccgtttcgcttttaccgtccgtcatgacacgggtcgcggccagcgtctccagttgccgcaccgcttcggttaccgcctggttgtgggcatcgataaggcgtttatcgccgcccagcatcgccatgaccgacacgcttttgggggccgagaaggtcaggtcataaccgggccggtgcctgttggcgccgtcctgtatccgggtcaggtcgctgccatccggcagcttccctttcagcagttccgtaaacagcgccttatccacggctttcccgtcgatccccagcgcctcagcccccttaccctgccagcgttcgtccatactcccgataacgtagtaattatccttatccgtatagtaattaccggcactgcccgctga

SEQ ID NO: 102319 - DNA, 573 bp, Enterobacter aerogenes; identical to SEQ ID NO: 93524

SEQ ID NO: 102320 - DNA, 429 bp, Enterobacter aerogenes
atggataatctcaacaaaatatattcttcgatacccgtactggaaagaaataaacgcctgaagttatcccggcaaaagagattcgatgtttattattgtctcgcttttatgtttggttttgccggattatttctgtggtggggaagccatgcttttttcaatgtgttcactgacctgttaaccccgccggaaaaactggagtcggcaaataacatcatcaatcagtggaatgtcctgatgtatttcgttccctttattcttttctcgctttccattggttgtctggcaacggctttgctgggggtactcattgccgaactagctttttggtttgaatatgcctttgaaaaaagcttccagagatatttaaaccgcaaccttcgacggaaaaataaaatgaaagaaggagagcctgatgttcatccgtaa

SEQ ID NO: 102321 - DNA, 360 bp, Enterobacter aerogenes
atggacgacgtcatccagcccgccatgacgctggttcaggaagagctgaacaagcaggggacgataagccacatcagtgacgcagtcgaggatcgtattcgtcttgaagtcgatttgggtaacgagctgaattttatatatgaagtgaggcttcgcgggtatagctcaccgaccttcgcgctcgccgcgatggataataatgagcagcagactgaacaacatagatattatcgcgctgaggtatatctcaaagaaggcggtcaaaattatgatgtgatgggctggaaccaggagcagctgattaatgacatactggaccagtacgaaaaacatctgcacttcctgcacctcgttcgttaa

SEQ ID NO: 102322 - DNA, 402 bp, Enterobacter aerogenes; identical to SEQ ID NO: 98355

SEQ ID NO: 102323 - DNA, 288 bp, Enterobacter aerogenes
atgatcgatcattactatgtaactcatgctcaactcctggcgctgagaaacgttgttgcttttattgtgcaaacgatgcctgaagaacaaaaagagagtgtccttcaggttttgaaaaaatttgctgaaatagaattaatggatggtatcgacgcgccgcctacgagtgatatcaccccgaaaacagttgagaagttaaataaagcctacaaggcaatcttcactgacattatcgatctttcaacgcctggcactgagagatcccctcataatttccccaaagcgtaa

SEQ ID NO: 102324 - DNA, 156 bp, Enterobacter aerogenes
atgaacaatgaactatccggaatgaaagcttttgtcactgttgccgagctgggttcatttagcaaagcggcagaagtacttaacctgacgcaacccgcattgacccgcaaaatacaaaaaatagaaagtaacctcaatacagcccttttcgaatga

SEQ ID NO: 102325 - DNA, 2286 bp, Enterobacter aerogenes
atgatcaaattacacgatcgtggggtatatttatcccatcagtacgggatcattccggaagaggagtgcgcaaatcctgtcgctaaagatattgcgcggaagggaaccatcgcctggtcaatactgtcagcacataatatttctggcgatgaacagaaattaaaaataaagtttgattccatggcttcccatgatatcaccttcgtgggcatcatccagacggccaaggcctctggaatgacgcgcttccccttgccgtatgttttaaccaattgccacaattcactttgtgcagtgggcggtaccattaacagcgacgatcatatttttggtcttacatcagcacagaaatatggcggcatttatgtaccgccgcatatttccgttattcaccaatacatgcgcgagatgatggccggcggtggccaaatgatactgggctcggatagccatacgcgttatggcgcgctggggacgatggccgtcggtgaaggcggcggtgagctagttaaacaactactgggaaacacctgggatattgattatcccgaggtcgtcgcggtgtatttaaccggcaaacctgccgctggcgttggccctcaggatatagcgctggcagtaattggcgcggtattcaaaaacggttatgtgaagaacaaagtgatggagttcgtcggccccggcgtggccagtatgtcgaccgactatagaaacagtattgacgtcatgactactgagaccacctgcttatcctccatctggcagactgatgaagagacgaaaaactttttgcggcttcatggtagagagaaagactatcgggcgctgtcagccaaagagatggcttactacgatggctgcattgagatcgatttaagcactatcaagccgatgatcgcgctaccgtttcatcctgccaatgtctatgaaattgatacgcttaatcagaatttgccggatattttacgcgaagttgaaattgaatctgagaaaatctcgctggggcgcgcgaagctatctctgttggacaaaatagagaatggcaaattacgcgttcagcaggggattattgctggttgcgcgggaggaaactatgtcaacgtggcgcaggcggctaatgccctgaggcatcattcctgtggcgacaatattttctcgctttctgtatatccttcctctcagccggtgctgatggcgttaacgaaaagggggatgatcaatgatttaatgagcgcgggcgccattattcgtaccgcattctgcggcccttgctttggcgccggcgataccccgatgcataacggcttgagcatccgtcatacgacgcgtaactttccgaaccgtgaaggttccaagcctggaaatgggcaaatgtcagcggtggcgctgatggatgcgcgttcaattgccgcgacggccgctaacgggggattgttaacctcggcggcggagcttgattgttggcacgaagctcaggaatatgaatttgatgtttccccctataaaagccgggtttatcaaggattcgttaaaggtgttacgcagcaaccgctgatctatggcccaaatatcaaagactggccgaaaatgaatgcgttaacggataatattctgttagccgttacttcaaaaataatggatccggtgaccactaccgacgaactgataccatcaggtgaaacatcatcgtttcgttcaaacccattaggcctggcggaatttaccctttcccgacgcgatccgcagtatgtggagcgggctaaaaaaattgccgccatcgagcaacaacgcgtcaaaggtgaagatctttgccgtttaaatccacagctggaaaatatattttcccagatacggcaactgccgggccaggaaaatattaccgcggcacagacggagatcggtagcatgatctatgcggtgaaacccggtgatggctcggcgcgagagcaggctgccagctgccagcgagtacttggcgggttggcaaatatttgtcaggagtacgcgaccaagcgctatcgttccaatgtgattaactggggaatgctgccgctgcagatgaaggaggcgcctgatttcgaggttggcgattttatctatatcccggcaataaaaagcgcgctgaagggcgagttaagtgatatcaccgcttttgtcgttagcgatcatcgcccggtgcggcagataacgctgtatatggagaaattaacttcatcagaacaagagattatcaaagccggtggccttattaattataataaaaatcaattaaccagtagtcattaa

SEQ ID NO: 102326 - DNA, 174 bp, Enterobacter aerogenes
gtgatcgtcaacggcgatattacccagtgtgatttgccctctggcgtaaaatcaggcctgagtgacgcgctgtcgcgttttgaagaagacgacatgattggcatcgtgcgttttaccaccgatgactgcgtgcgttcaacgctttgccagcgaacgttgaaagcctattactaa

SEQ ID NO: 102327 - DNA, 495 bp, Enterobacter aerogenes
atggtagatagcaagaaacgccctggcaaagatctcgaccgcatcgatcgtaacattctgaatgaactgcaaaaagacgggcgtatttccaacgtcgagctttccaaacgggtgggactttctccgacgccttgccttgagcgtgtgcgtcgactggaaagacagggttttattcagggctatacggcgctgctcaacccgcattatctggatgcatcacttctggtatttgttgagattactctgaatcgtggtgcgccagatgtgtttgagcaatttaacgccgcagtacaaaaacttgaagaaattcaagagtgtcacttggtatccggtgattttgactatctgttgaaaacccgcgtaccggacatgtcagcgtatcgtaaattgctgggcgaaaccatgctgcgcctgccgggcgtaaacgacacccgtacctacgtggttatggaagaagtcaagcagagtaatcgtctggtaatcaagacgcgctaa

SEQ ID NO: 102328 - DNA, 4098 bp, Enterobacter aerogenes
atgactgatgattccctcccccttcatcccggttcctatgttcggaaaaacgtccttgatcctcgtgggctcacggttactgaggtggcgaagttgatcggcgttagccgcccgggcctatcgaattttctcaatgggaaggtatctgcaacgcccgatatggcagcacgtcttgaacgtgctttcgggatttccgccaaggccattctcgatttgcagacagaatatgacgcgcagggtgataaaacggcaggcgcagctcaaaaggcgcgtacttacgtgcccccttttttaaatgtccaagccaacgatctcgtaaattggttcacaacgacaattcttgcgcgcactaagctgtcggtgctgctgcgaacgctcattcactccacgggacgtgatcttcagaaagtagatttccccggtaacgacgatgccgagcgtgccggctgggatggcttcattgaggccagttccggcacgccttggataccttctggtgcctctgggtgggagttcggtgtcaccgcggacataaaagccaaggcagacggggattttgcaaaaagcgtccgggctatcaagagcgctgaaagggcaaatattacgtttgtctttgtcactccaaggcggtggccgggtaagacggcttgggtcgcggatatgaagagcaaaaagctttggaaagacattcgtgcatacgacgccagtgatcttgagcagtggatggagcaatcactcgcggcccagacctggtttgcgaaccagacggatcgtccttctaatggtgtcagaaccttagagcgttgctggagcgattgggcaaacgtagcggcccccgcgcttcatccttctctttttactacggcgaatgaggcgtggaacggcaagatcaaatccttcctggcgaaagacgatgcgaatcccttagtaatagcggctgattccgttgaagaggcgctggcgtttttaaatcaagtcttggccccccccgagtttgaacagtatagggatcgggtgttggtattcgacaaggcaggagtactcccgaaactcgcccaaggcactaccgatttcattgcagtagcccatacgcgggaagtggagcgtgagcttgggccctacagcacatcgctgcgaaccattgttgtttatccccgcaatgctactagcgtggagcctcatgtcgtgttggagccgctcgggttcgagccgttcactaaagctctggaagcgatgggaaaatcgcgcgatgacatagcgaaactaactaacgcctcggggcgttcgttgacggttcttcgacgtcaactctcgaatattccggcaatccacacacctgcttgggctgaagatccaagaatcgcatcggggattgttccgcttgttcttgtcggcgcatgggacgctcagaacaaggcggatcaaactatcctgtcccatctggctgaggcaccttttgaggtgttggaaaagcgcattcttgatttgttgcggctcaacgattctccagtctggtcaattggtgggtatcggggggtgatttcgaaaatcgactccctcttcgcaattgcgggcacggtctccaaggctgatcttgaccgctttcttgacgttgcgcggactgtactgggtgaagatgatcctgccctcgacttgcccgagaaagatcgttgggcggcggccattcatggcaaaagacgagagttctcgggggctgtgcgagaaggcgtttccgagactttggttttgctggctgtgtacggcaagaatctcttcgggaagcaccttggctttgatggggaatttgaagccgcgaaaatcgtgcgtgatcttcttgtgcctgtaacgactagaaagctagaggctaatgggcgcgaccttccactttatgcagaagctgctcccgccgagtttcttgatatcatcgagcgtgatctgcgagcagaaaagtccgaagtcatgggcttgctgaggcctaccgataccgggatttttggctcatgtccgcgcactggactgctttgggctctcgaaggacttgcttggaatccgaccacctttccgcgggtagtgaagattctgggccagctttctgaggtagagattaacgataactgggcaaataagcctatcgaatcgcttggctccattcttcgtgcatggatgccgcagacggcggcaaaccacgagatgcgcctgaaggcggtcagcatgcttttggataagcacccggcggtcgggtggagggtttgcctccagcagttcggtgattacggcagtggcgtcggcggctatagccataagccgaagtggcgtcctgacggctacgggtttggggagcctttcaaaacatggggaccaatccatgcattcgtcagagagatggtaaaagtcgcgctaagcaggccgtcctacactgtcgagatgttatgcgaccttgtgtcaaggctgcatgcactcgcggcggaggatcaggcgcgcgtatgggagattatcgacgagtggcgcaactcgggcgcgcttgacgaggaagttgcgaagatccgcgagaaaattcgtgtgactgttctctctcgccgggggcgtaaaaaggtcaatgaggaaggccaagcgagcctgacggagaaagccaaggcagtctatgcggagttgcagcccaaggacattgtgaataagtatgaatggctgtttcggcagggatgggttgaggagtcggcagacgaactcgcaggagacgagatggacttccgagcgcgtgagcaacgcatagaaaagctccgcgttgaagccctgacagacattgtgcaagaacgaggtattccgggcattctcgcactctctgaaaaaggaaattcccaacgccaaatcggtgctcacctggtgtccggcatacttaccgacgagcagattgaagatttgatcttgcaatgcctgcgtccggcagaaaattattcgggtcgtgatggcattgtcgccggcgcgctctggtcgttggacgaggataggagaaaggccatatatgcgggcctgcgggataaagtggtcgaagaggaaacgctccgtctcttgttgctttcaccttaccgggcttctacgtgggtgcttgtagatcaactttcggctgaagctcggagtcgttactgggttgaagtagttccacaatatgtttttgactcgcctgaggaaaacaatgagagcgttcgccgcctgcttgaagtcgaacgtccgagggcagccttcgcatcaatacatttcaagcttgaagaaatacacccagctctccttgtgcagactctatctgccatggcgaaaaatagtcaggataaagctggggagtaccagctgcacgactacgatgtacggcgcgccttccagcttctcaatcgcaactcagacctcactctagaggaaaaagctggtctggaattcgcatatttagaggttctggctcgctctttccgagggggagaccagcagcagattccaaaccttgagcgctacattgaggaacatcctgaactattcgtgcaggctgtagtgtgggcctataagcgcaaggatcgtggcgaagatcccgccgagtttcgcattacagaaggtcgcgagcatatggcacagcgcgggtaccgcctccttgaagccattgaacgtatccctggtcaagataaagcaactaaagaggaacagcaggaaaagctcgcagaatgggttgcaacggtaaggcggtcttgtgctgaacttgaccgcgcggagatcgcggacgtgtgccttggaaagctattctctaacgcaccggctggcgaggatggcgcgtggccgaacgaagctgttcgcgatgtgatggaggatctacggtctgaggacatcagcagcggcgcacatacgggtttatacaacgcgcgcggcgtccattggcgcggggaaggcggtggtcaggagcgggagcttgcagacaagtatcgcgcctgggccgacaccttgcaatttacgcatcccttcgtggcgtcatcgttgctgatgtcgatggtcaatacgtatgagcgtgaagctgagcaacacgatactgaagccggtatccgtcgtcggttaaggcattaa

SEQ ID NO: 102329 - DNA, 1008 bp, Enterobacter aerogenes
atgcatctaataatgctcgatacatgtgtttggcttgatatttcctctaaaaaagctgaattgccaatgcttactgccatcgagcatctggtagaggatgggagtatcaaaatactactgcccgatctgatacgtgccgagtacgaacgaaataaagaaagggtgattgaggctacgcgaaaacgactctccagtgaatttcgagtaattaaaggggtagttgagtcttttggcggtgaaggtaaagatactgcgctcaggaccttagatgatgttaatcacagattgcctattctttccgaagttaatcaaaatacagtaaatcgtgttaccaaactttttgacatggcccacgaagttataatctctgatgccgcaaaaataagagcggcagagcgggctatcgctaagaaggcaccgttccataagcagaagaatagtgtggctgatgcaatgttagcagaaactttccaagagtttcggctgtcgcatataagtgagtacgaaacctttagatttgtcactcacaatgtgacggatttttccggcaaagaccacaggcagccacacgacgatttcgcagatatttttgacggcaacagctctttattctttaacgccacgagcgcagccatcgaggatctgctcgatcttgaagaatttcactatgagaatagctttgcttgggaggacgaaactcgtgggcttcaggaaatcatgtctgcgatggacgagctcttcgataaagtttggtacaaccgccatatgaacatgatgtatcacctagataatggtgatatagaggtaatccccgctggcacaaaacgccacggcaatgatgtgattcacgaagataccctcgaccaagcaaaaattgcagctcaacgagtcagggataaatatgaagatactgggccttggagcgactttgcatggggggtgctcaatgggaagctttctgccctgcgatgggtcttgggtgatgagtgggacatgctcgatacgtaa

SEQ ID NO: 102330 - DNA, 429 bp, Enterobacter aerogenes
atgtctaggactccctatacacggttacgcattgagggcttccgcaaagcagaggcttccctgagacttgaaggaatggaccccagtggtacgccactgtacgagtccgttaaggcacgtattatttcaggcgagctgacgtatgagcaggggcggtctgagatttttgcatactacataaaatcagatacctccgggtctgtgaccgtgggagaaatgctggcagaagaattcttaaaaccgcttaacatgtctaatgatgaactagcggaagctatgggtatttgccgacaggatattgaagatatcatctacggtcggcgtcgtcttagggatgatgaggctcgcgttcttgctgctatatttggtactgatgaagacttctggagtaatctgcagaagttgcaagatcggaagaaacgacggtag

SEQ ID NO: 102331 - DNA, 762 bp, Enterobacter aerogenes
atgacaactggtaataaagtggcacccacaagtacagcttggcaagcccgagtaattctgtaccagccaagccagcgtcctaaggaggtgaagggacaatggatggagacaagtttcggacgttgtcgtgttaccggacggctcggacagcgtcatgccgatatcgtagagacaatattatatgttgccgagcaacgtcgtgaaatttctgatggtggaatcgaattattagtagatccagcgaaagtacgccgaacgctatccgatgcacaatacagttatggtcgtatacagaaattgcttttagatctgcgcgtcgcaacagttgaaattataacgccagagctggagaaaagcggcgactgtataatagggggactgatcgatcatgtagtgccatcacctatgacgcgtccagatcctttgactgggggagaacgtcgtttatggcgtgtccgtctgggtgttgcattagcgatgttactcaaaaaagatttgccattttattatcatcctggccccatagctcggctacaacatggtattagccaggcagtcgctcgtcatgtcttaacccataggaataatcctttaggagggtggtatatggatacgttgatattagcagtgtgcggtgaaggaacgggtaatatgactttacgtaactatcgtcggagattgaaagaagattccgtgcaattgctggaaattggaattgatttgaacggttctaggataaaacgtgtcacaacggcccgatag

SEQ ID NO: 102332 - DNA, 537 bp, Enterobacter aerogenes
gtgaaggtagaaaaaagcgatgttctggcgtttaccatttcagatgttgaacgcctcgacccggtcagggtgatgattgaaaactatgagcctggaaagggaagaatcactatcacctgttacggacaggcatggactggcgcatggtttgcaatgggcggtgacactgttcaggagttcattaagcgtgtcagcaatgactacctgatcgggtgtttagctccccagcttgaaagctcggttgacgatgataacgacgccaaccttgaattcgttaaatcgcaaatcatcaagcttcgccgcgaacaggaaattgataagggtgatgcccgtgaaatgtggacagaggccgaaaatgcggaggatgtgaaggagaactgctgtgattttatcgttggggacaagcttttgaaattgtttggcgatgacccttggtatgcaggatggccgtctatacccaatccgaaatatcaatatctcgaacgcatcattgaagcggtacgtggcgggctcgcagaactggagtgtgtcgcatga

SEQ ID NO: 102333 - DNA, 2760 bp, Enterobacter aerogenes
atgcaaattgaagttgcaacagaaagtggagatacaaccaagcagaaaggcgatctttttgaaggtctagttaaagacttactttctgcacaaggttacgaagttgagaccgaattaagagtcactggcgccgaattagatttactatgcaaacacaaaatcaacgcaaaagaaatctatgttgaatgcaaagcccaaaaagaaaaaattagtgcccctatccttaacaaattgattgggattgtaaatctgcatgattatgccgaaggctggattatttcgacttcagaatttggtaaggacgcacttggaattgtggacttaatatcaaaaaaaccaaaagaaaagtcatcacagtttagtttttacactcctgaacgtgttgttaactcgttaatttccgctggagtaattaaacatccacctaaatttgaagctgaaaacttcattggaaatagcgacaatttaggaagttggactcttttgatatctaaatatggtcgcttctgggctgtatatactctaaaggggggaatccccgatggcgtgcttattttccatgcatcaagccaaaaaatggccaatgacagcataacattagaaaacatatctaaattagattcaataatttgtgactatgatgtcctggctggtctaaaagaagtagaagagaatgacaaaacgaccacacatcaaaataaaactcatggtttcgttaatgttgttgaagttcagataggtgattcatgggatgattatcgaccagcgaggccaaaagatttcgttggccgtgacgatatgcaaaaagagattataaattttctctcaaatgtcagagatgcaaaaactagcacaaggatttttgcaataaccggaaactctggtcttggtaaaagctctctaatagcgaaaatcagagacagagctaaaaacaagcactacagtaaaaaatattttatttatgcagtagatattcgtggagcaaaatctcccgcatatattacatcagcatttcttactgctctgaaagaagcacaaaataatggtttcggtaaaaaaatagaactacaactaaatgaccctaacaattacttctcatctgaatcaattgctgaatatttagaaagcgttaaagcagaaaacaaaatcatctgtttgatttgcgatcaatttgaagaactgtattctaaaccagagttatttagtgtctttactgctgcaaataatcttatgcttgatgtcgcagcatttaaaggaaactttactttaggctttgcttggaaaactgatagcacaacccagcaagatcacccagcctatcatatgtggcataatttgtctgacatgagaagagagtttaggttgggcctttttgatagcggtgagatttctaaatcgataacaacattcgagaaagaatttaatcacaaaatttcaccagccataaggaatcagatttcttatggctgccaaggatttccttggcttttaaaaaaactatgcataaatcttaaggaaaatattaagcgaactggagcaagtgaaattgcagcattggatttagatgttgaaaaattatttacaaacgaccttgatctgctcactcaatcagaaagaacttgccttgatttaattgccaatagagcacctgctgactggagtgagattattgaattgtccagcgcaacggatgttagtaatttagttaataaacgaatggttgtgaaaagtggcgatcgcctcaatatctattgggatattttcaaagattatttagtcacgaaaaaacttcctgttattccatataactatatacccacaactgaattctccaccttaattaaagttgcgagtttcttagatgctaattccttcaaaaactcagaagatattagtaaagaagctaactttaaagaaaaaaccattatgaatatcggtgctgatttggtgatgtttaatattgcggagagaaattcatctagttttaaattgaataaagaatttaaagacaaaaatgaaactgatttcttgctgaagattagagaacgttttgggaaacattcctttaaagttgcattatataaaaaacatcttggtaaacttattgacttacctacgctcactatagttttaaaagaaagtcttcctaaggctcttcatagcgaaaaaacctgggatgtttatgtcaggagattagcaaaatatcttcatatcacgggatatgttttacaaaacggtgataaatatcatgtacaggatatgggggggattcaaaaagctatttccacatggaagaaaagaggtaaggatcagaaaaacttagttttctcacctaatgtatcgcctttcatggcgattgaagcctataaccttatcactaatggctgttctttaaacactatcattgataaggggtgtagaaatggtttatcagttctcaaaagatttaaaatcattgaggtgtctaaaaatacgattacaatgcttgatggtgctatggggaattataagaatattgatgatttaatttggtcaatgactaaaaaagaagaatccatacagaaatgcattaccaaaataaaaaaagatccaaccatttcaaatatatcattaggtagatttatttctgatgagtatgatttaagctggtctcacgcgacaacaaagagatttggaaacagcttaagccaatggtctcgctgggttatttctggtgaaaatacaaatacaaccccaccacctccggggaaaaaacattaa

SEQ ID NO: 102334 - DNA, 2061 bp, Enterobacter aerogenes
atgctaccgaaagctaaacggatcccccacgccatgacgttacatggcgacactcgcatcgataattactactggctgcgcgatgacgaacgcgcgcgcccggaagtgctggactatctccatcaggaaaatgactacggtaaaaaggtgatggactcgcaaagcagcctgcaggagcgggtgctgaaggaaatcatcgatcgcattccgcagcgggaggtctccgctccctatagcaaaaatggctaccgctatcgccaggtttatgaaccgggctgtgaatatgcgatctaccaacgtcagtcagtgctcaaagaagagtgggatgaatgggagattttgcttgatgccaaccaacgggcggcgaaaagcgaattttacaccctcggcggattaggcgtcgcgccgaacaaccaactgatggcggtggcggaagattacctttcacgacgtcagtatggcttacgttttaaggatctgagcagcggcgaatggtcggcggagatcctggaaaacgtcacgccaggattcgcctggagcaacgactcgcgcttcttgtggtacgtgcgcaaacacccgacgacgctgctgccgtatcaggtctggcgacatgccgttggtaccaccgcagataacgatgtcctggtctacgaagagaaagacgacacgttttatgtcagcgtgcataagaccacctcccagcagtttgtggtgatttaccttgccagcgccactaccagcgaagtgttattacttaacccggagcttcccgatgcggagccggtgtgttttttgccacgacgcaaggatcatgaatatagcctcgatcattatcagcacgcgttttatctgcgttctaatcgcgagggtaaaaacttcgggctttaccgcaccgtgctccgcgacgaagaccagtggcagacgctgatcccgtcgcgtcctgatgtgatgctcgaaggttttactctattcaccgactggctggtggtcgaggagcgtcagcggggcttgaccagcctgcggcagatcaaccgtaaaacgcgggaagtggttggcattgcctttgacgatcccgcttacgtcacctggcttgcctataatcccgaaccggaaacgtcaaggctgcgctacggttattcatcgatgaccaccccggatacgctatttgagctggatatggataccggcgagcggcgggttatcaagcaacaggaagtgcagggctttgacgccgcctgttatcgcagcgaacacctgtgggtgaaagcgcgtgacggcgtggaggtgccggtatcgctggtctatcaccgcgaacactttcgcaaaggggccaacccgttactggtgtacggctatggctcttacggcgccagcatggacgctgattttagcgccagccgtctgagcctgctggatcgcggctttgtctttgcaatagcccatattcgcggcggcggcgaacttggacagcagtggtatgaagacggcaaattcctcaacaagaagaatacctttaacgattatctggacgtctgcgatgcgctgctggcgcagggatatggcgaccctaaattatgttatggcatgggcggcagcgccggcggcatgttgatgggcgtggcgattaaccaacgaccggatttgttccacggtgtggtggcgcaggtgccgtttgttgacgtactgaccaccatgctcgacgaatctattccgctgacgaccggtgagtttgaggagtgggggaatccgcaggacgaaacctattatcactatatgaagagctatagcccctatgatggcgtctcagcccaggcttatccgcatatgttagtgaccaccgggctgcatgattcgcaggtgcaatattgggagcccgcgaagtgggtggcgaagctacgcgagctgaaaaccgacgacaatctgctgctgttatgtaccgatatggattccggacatggcggtaagtcgggacggtttaaaagctacgagggcgttgcattggagtacgcctttttaatcgccctcgcgcaagggactttgcccggcaaggtggaagtgtag

SEQ ID NO: 102335 - DNA, 3873 bp, Enterobacter aerogenes
atgaacccccgtattttctatagcgtggatacccctgccccggatattcaacttctgtccaacggacattatcatctgatgctgaccgcagccggcggcggttacagtcgctggaacgatattgcaataacacgctggcgcagtgataccacccgtgataactggggagcattctgctatatccgcgatacccagacgggagatgtgtggagcaatacctggcaaccgacaggctacatcagcggacaagacgaggaagtgttattcaccgatgcgggggcagaattcagacgcagcttcgggggactcagcgtcaaaactcaggtggtgatctctccggaggatgatgttgaattgcgacggctcacactgattcatcgtggtcgcaagcctcgctctctggagctgacaacctatgttgaagtggtcctggcagcggctgccagcgatctggcacacccggcattcagcaatctgtttattcagactgagctggctcctgagcgtgacgctattctttgccaccggcgcccgcgctcaccggatgaaccgggtccttgcctgtttcacatgatggtggtgcacggcgataaccgaaataacgtgtcgtttgaaacggacagggcaaggtttattggacgtggcagaaatcctgcgaatgcccaggcaatagaggcgggagggacgctcagcaacacgtcggggtcagtgctggatccgatactggctatacgtcactccatcactctacagccggggcatccggttacgattgatatcgtttatggtatcagcgagaaccgccagcagagcctggccctgctggaaaaatatcgcgattaccctattgccgatcgcgtctttgaactggcctggtctcacagtctggtggtattacgccagatgaatgccagtgaagatgatgcaactttgtttaatcgtctcgccagtgctgtgctttaccctgtccaggagctgcgcgccgaaggccaggtgatcagccgcaaccggcgtggtcagtccggtctgtggggctgggcaatttcaggcgatctgccgatagtactgctcagtataaccggcgaagaaagtatcgcctcagtgaccacactgattcaggcacaccgttactggcgacagaaaggactggatgttgatttggttatcctgaataacagccccggtggctaccagcagggattacaaaatcaaattatggaattaatttatgcggggtctgaagccagtctgttggacaaaacgggcggtctttttgtccgtaatggcgagcatctctccgcagaagataagttgcttctgatgagcgtggcctgtctttatcttgatgaccgcgcagggagtattaatgagcagcttaaccagcgtatccataccctgaaatcgccggtcatagcattcatgccgcgtgcagtgcgcgagcgtaatcaacatacggactggccccccgatatcagtcagttatgttatttcaatgggttcggtggattttctcaggatggacgggaatatcaaattgttatgcgggaaaatgcgcagacaccggctccctggtcaaacgtactggcaaatccccgttttggcagcgtgatctcagaggcaggacaggcctatacctggtatgagaatgcccatgaataccggttaacaccctgggaaaacgatcctgtgagcgatcgctctggcgaggcgttttatctgcgtgatgaagagaccggggaaaactggtcaccgacagcgttgcctgttcgcggacacggtgattacctgacccggcatggttttggctacagcgtttttgcccatcgagagagtggaatagacagcgagctgacggtcctggttgccgaagaggcgccagttaaactggtgctcctgacactcagtaactcttcgggacggacacgtcaactctccgtcacaggttatgtagagtggacgctcggaggatcacgaactcgctcagctcctcacgttgtgacacatgcggccagaacgtctggcggttgcggggtgctggcgaacaacttttatggtgataatggtggaggccgaactgcattttttgccgtcagcggtaatgactgttcgctgaccggggaccgtcgggagtttattggccgtaatggttcccttcacgcgccgtcagccatgaaactgcgcaggctttcaggtaacacgggcgccggtctggatccctgcggggcggtacaatcgacggtaacattaattgatggggatcagaggacgtttatttttatcctcggcgcagaagagaatgatgtttgtgctaatgagacgctggcccattacatgaacgaggatacagtccgccaggagctgaaccggattcataaccactggcacgatgtgctcgataaaatcgtggttaacacccccgacacgtcagtaaatttactggtcaatggctggctgttatatcagacagtcgcctgtcgccttatggcccgcagtggttactatcagtctggcggtgcatatggttttcgcgatcagttgcaggattcactggcactgagccatgctgatccgaaccggttgcgtgaacagataatactctgtgcctcccggcagtttatcgagggggatgtgcagcactggtggcacccaccacacggtaacggtgtccgtacccgttgttcagatgactacctgtggctgccgcttgccgtttgccactatgttgaaacgacgggggatatggaggctctgggaatacacattccttatctggaggggcgcctgcttccgcctggtgaagagtctgtctatgacacgccggtcatcagcggcatcgaagagactctctggttacactgtgtcaaagctattcgccatggacttcggttcggggggcatggcctgccgctgatgggggctggtgactggaatgacgggatgaaccgggtgggtatcgaaggcaaaggtgaaagcgtctggctgggcttcttcctgtacgacattttgcagcggtttgcagcgctggcggagcgcaggctggatgaaagcgtcgccgcgatgtgccattcacaggctctgcgcctgaaaagcaatctcgaagcccacgcctgggatggggaatggtaccggcgcgggtattttgacgatggtacacccctgggatcgaaaagctcacaggactgccggattgatgcgattgcgcagagctggtctgtattgtccggtgccgcgagcccgggacggtgcgcaaaggccatgcaggcgctggataagcaccttgtggataacaaaggcgggctgatcaaactgttaacgcctcctttcgacggacacggtccaaatccgggctacatacaggggtacctgcccggtgtgcgggaaaacggagggcagtatactcatggcgccatctgggccgtgatggcatttgcccggatggggaatgccaaacgtgcctggcaactctggtcaatgctcaaccctgtaaatcatactctcaatgcgggctctgtcgggatttataaagctgaaccttatgtcatgagtgctgatgtctacagcgtcgctccccatactggtcgtgcaggctggagctggtacaccggttctgcaggctgggcctggcgtttacttaccgaggaattactggggataaaacgcaccggcactgcctttagtgttcatgccctattaccggatgcgtggccgtctttttctattgcttatcagtatggtgaaagccactatcagattagtgtctcacgcggcgatgcagaatatcgcgtgacgctggatggtgttcttctccctgatgacagaataccgctgaaggatgatggacaaaaccatacggttgagatcattcagaactga

SEQ ID NO: 102336 - DNA, 375 bp, Enterobacter aerogenes
atggataccaaagagtgggttgacggccttcggtggcttagtgacgagcagattgttgatttgcacttccagctccaggagaaaatcaaagagcactataagcaacgagacgtttgcgataatctggagcgggccatccagttctgcgagcagcatgtggctttagctgaactggcattcccagcgctgaaggcaaaacataacaagcaggctgctgaatacgtagctttgacgggtaataaatacccagctgaattttacgcaccggcccaccacggataccggcaactgataaatatcatgaagaaaaggaagcagttagatatagtggctcagctcgaagcaaagagaagatcagagggatggagagagtag

SEQ ID NO: 102337 - DNA, 480 bp, Enterobacter aerogenes
atgattttaagagaagtaaaagatgtactgttgagaaagtcttctctcacttttgatgctgacacaaacatttttatgttagagggcatggatctaacccttcaatcgaataaccgtattgttagcgtacaagttgctgaaaaatatgaagacgaagaactaactaagataagtcggtgcgtatgtcttttcaggctgcaatgttctataagagcaactgaagcagagcaagatccagaaacatctaaagttctgttcgaaattgaagctcagcacgatgttgtttttgactcagactcagctgtaacaatcgaagagatagaaaagtttagcgctgatgacataatcaacaatgctgcttggccgtattggaaagagcatgttacttcgctttgttccaaagctggactcagccctttgcaggtaccgtcagctcagaagaatgagcccataaaaattacagccaagcgagagttgtaa

SEQ ID NO: 102338 - DNA, 618 bp, Enterobacter aerogenes
atgaaacgttattcactctgcccaatatgcggggatgaagggttgcatgaaacgaaaaccaagatcctcagggagtttgagggttttaaaaaagaggtcccgttccatgcatctgtttgcgaatcatgtggctcagaaaccctaacagttcagcaggcaaaatttaacaaacgccagatgactgatttttatcgagaagctgatggattgcttacaggcggtcagataaaggcgatcagagaggatttacgtcttacccaatctgaagcagcaatcatatttggtgggggcaaaaacgcgtttaccaaatatgaaaatggtgacgtaacgcaatcatttgcgctggataagcttttaagaacggcttactcggttcccgctgcttttgagtttctgcgtaaaggttgtccggccgtaaccaccgtagagtataccaatcgcactaccgagttagaaatgatcaagacttatcttgtttcaaaaactggtcaccttaaatacgcgaaaagtcctgctgaagattcggtaaaagtcgtcatccagaattatgtgtctgaaccaactcaacataacacttggcatatgattgaaacgattgccttaggtagtaaattatga

SEQ ID NO: 102339 - DNA, 453 bp, Enterobacter aerogenes
atgagctccgtagcgtcggaaaatacttcgttcgccgggcattattatccaggttcaaaatacccggtcattagcaaggttcaggcaggtgcatggtgtgaggctgttgagccatacaccctcaaagatatcgacttgtggcttgagtctgacgctcacattcagggtgaggcgttttggctgcaggtagatggtgactccatgactgcaccggcaggactgagtatccctgagggtacatttgttctattcgatactggtcgtgaagcgatcaacggcagcctggttatagcaaagctatcggactcgaacgaggcaacattcaagaagttggtgatcgacggtgggcagaagtacctgaagggccttaacccgcaatggccgctcgtgccgattaatggtaactgccggattattggggttgctgtagagacaaagttgcgtttagtttaa

SEQ ID NO: 102340 - DNA, 201 bp, Enterobacter aerogenes
atgaaaatttctttagctgagtttgttggcgaggtaggtcaggccaaagcagctgatgccatcggcgttcaccaaacggcaattagtaaagcgatcagggttggtcgtcagatttttatcaacaagcttcctactggcgaggtgaaggcggtcgaataccgcgattttcctcatagcaagaagcaggaacatcaggaatag

SEQ ID NO: 102341 - DNA, 402 bp, Enterobacter aerogenes
atgaatatcgacacagtaaacgaacttattcagtcgctggagtcggctggcgagctgtcaatcaaagagcgtaagtatctggacctggcgaaggcgtatgcggacaaggaagcggagagcgtggctcaggcgctaacgttcgagaaatgccgcgagctttcaggctgcccggctggcgtagacctgcaggactgggtgaaaaagctggcggaggaaagcttgcaatggcaaatgtcaattcctcatcgcatcgtagccgaagctgaggctcgcggaattgagaagttcgcagcaaaacttcgaattcctggtgatgaccagttttttgatgctgtcgctgagggggttgcaggtgctgctgacgccttcgccaagcagctgcgcgagggggccgacaaatga

SEQ ID NO: 102342 - DNA, 285 bp, Enterobacter aerogenes
atgagcaagcacctcaaactaactgatgctcaaatcttaacgcttcgccgtatgtatatcggcacgcggtatttcatgcgcggcgacaaacaaaaaggtgagcaagataaattatcccaccgcgttaattgcccatctataccagtgctttttcgtgaggggtttgtgaattggcgtaatccagcgtgcaaaaaatttgatggcctgtattacggcgtgaatttaaccccttcaggcttcgatgcagtcttagagggaaaaaccagcaaggagcgtgcggcatga

SEQ ID NO: 102343 - DNA, 519 bp, Enterobacter aerogenes
atggcgctgacacatgatgaactttgccaaatagcctaccaattccttaagcggaacggtttcaaagtctgctttcacgatcgctttgtcgccgtcaccagtaccggtgagcagccagacgcgatggggttcaggaatttcgcatcctgcctgatagaggcgaagtgttcccgtgccgacctgctggcagaccggaaaaaacgcttccgactgcgccccgagcttggcatgggtgactggcgattctttatcagcgagccggggattatctctgttgaagaccttccgccaggctggggtctgctgcacgtagtcaatggaaaggttcgaaaagttcacggatggccgcagggaaactgttgctggggaagcgcagaggataagccattcaccggcaataagcaggtcgaatgcgattacatgctgtcagcactgcgtcggatggagctgagaggtcatctaaacgaaatttatgacggcgtgatagtcaatcgtgccgcagaaggagccaaccaatga

SEQ ID NO: 102344 - DNA, 204 bp, Enterobacter aerogenes
gtgagtaaccaaatccctgaagctgtagccgtggcaatgattaatgcggccagagatattacggtagcaaaaattaatgccaaaggcgcaaagttcgacggttatgtaaacccggtaaactggtttgatcgttcaatgaaagaggtccgcgaagccgttaaagcagtgcttcctgacattgagcggagggttggcgatgcctaa

SEQ ID NO: 102345 - DNA, 480 bp, Enterobacter aerogenes
atgggtcctgaatcgtggagtgctatagctggtggtgcgtcagcatttgctgctgcgctgagcctgattgttacttgtgttggtctgaaatatcagagaaaaaccttgctggaagcaatgagaaaaaatgttattgatgcacttagttatcaagcagaaagggctaatgcatcttgttcagggaaaagtgattctcaatggtcatttactgaatttgcaaacattatgttcgctattgatacagcaagaaatatggtcgcgcggataaatgaaagcgatggcatcagtcgtgatgaggcaaggttgtattttgttgggctcctcaaccagcccatcctatcctcacttaaaaacggggagcccccggatggtgcttttcaaaataaaggcgcaatgcaagaggggcttgatgttatttatttatggaaccctaacgctcatttcctgggttttactgatgttgattttggcataagttaa

SEQ ID NO: 102346 - DNA, 141 bp, Enterobacter aerogenes
atgagccgtgacgttatcgagcgcatccgcgaccgctggtacaagctgcgcctttgccggcaccgcggcaccgtcttagttgactaccgaattttgaagaatttcgtccgcatctatcaggcttcaggagagaaagcatga

SEQ ID NO: 102347 - DNA, 471 bp, Enterobacter aerogenes
gtgattggtgcactggttaagcgctactggttgcagctgctggtggtagccttaatcggtgtgctggcgttcttcgtgaaccactaccgtgataacgccatcacctacaaagaccagcgcgataaagccactgagcagctcagcctggcggacgccaccattaaagacatgcagaccaggcagcgagatgttgcggcactggatgccaaatacaccggagaactggctgatgccaaagataatatcgatcagcttgagcgcgatgttgcttctggcaagcgtcggttgcagctcaacgcaaaatgttccgcgaacggagcgaccggcaccggcggcctgggcgatgcaaccagcccccgacttgctgacgccgctgaacgggattatttcaccctccgagagcgaattgtcacagtgacgaagcaggttggctatctacagggctacatcaaggatcagtgtctcaaataa

SEQ ID NO: 102348 - DNA, 546 bp, Enterobacter aerogenes
atgcaatatccaactgttatcaacggtattgatttccgagaccttgtattcgtggcaggtaatgatccagtaacggattcattcttgatcgcaaaggcatttggaaaacgtcctgacaacgttattcgtgatatcgaaaagaccattaaagcatgccctgaggaattcgatacaaaactcaattttgaggtttgctataaaaacaatgagttacagaatgggaagccgcagaagttctatagactccgcaaagatgggttgatgcttttggttatgtcatacaccaaaaaagaagcgatgcgaatcaaaattgcttatatcaatgcattcaattggatgtattcgatgcttcaggctggtcgccgtcagtttgaggaagaacggaatgcggtaatgctggagtatatgaaggagaaggatgtggccagtatgtcaggtaggctgcttaatcgttgggggaaagtcaagaagccacaactcctgtcgaggattgagcggctggagaacagcggtcagatcgtaatcccagggctaaagcaaaaatga

SEQ ID NO: 102349 - DNA, 303 bp, Enterobacter aerogenes
atggaatcagaacacactggcgtaaaaatcaaaaaagttaccttcgattggaaagaaataaataaatctgaactatcaagtagctacagagtcacctgtaagataactacagaaaacggtatagaagttgagggtagttacttttaccaatggaataaacctggagtttcaggtttaggggctttcaattgggaccagacgccggaggcaaatgcagaagtccaggctttcaatgtagccattggaagagttcagcaggtgcttcctatggttatcatgccaaacaatgcaaattggaactga

SEQ ID NO: 102350 - DNA, 237 bp, Enterobacter aerogenes
atggcactggtaaaagtaacaggcaataacctgttctctggtgccaatctccgcaagttggaggttggttcagaagtggaggttgaccgaagcactgcgcatcggtggaagagtgcagggttggttgaaatcatcattgatgaagatcgcgtacttgaagtcgcctctcctggctctgatgctgaagagcagccggagcagccggacaccaccgctaaagcgaaaaagggtaaataa

SEQ ID NO: 102351 - DNA, 174 bp, Enterobacter aerogenes
atgaaatggatatccgtcaaagagcgccatccgcggtcattcgtccgtgtctgggtgatgactgataccggccagcaaaccacagcgtacgttaaatccaacggcgagtggtacatcaactgcgaccgcatacgcaccacaggttccgttgtgctgcgatggagggatgactga

SEQ ID NO: 102352 - DNA, 417 bp, Enterobacter aerogenes
atgacccaacggaatacactggccttcagtacctctgattttatcagcaggatgatcggcgtgccgtgggctaaccgggcctgttcgttcgaaaaggtcgattgctgggggttggtggtgctgtattaccggcacgttctcggcattgagctgcaccagacgccggactacgaagccggggctgacttcttcacctgctatcagggcgacgtcgtcttctggcgccaggtcgataaaccgatcgaaggcgggatattcgtcgggtaccgaggcgcgcaaccggcgcatgttggcctggtgttgaaccgaaaagccattcatgcgcgcggggaaaacggaagcgtgaaagaggattcattgctggttattcagcgggcattcaccaaagtggagtttttcgaatatggcgctggttga

SEQ ID NO: 102353 - DNA, 1194 bp, Enterobacter aerogenes
gtgagttggccgatgggaaaagttaccgatattgccgaaattatatccggatttgcttttaaaagtgaatggttcggtgctggtgatgcgagagttattcgaatcggcgatctaaagaacggtcgaattgatcttagtgaggctatggcctttgatgaaaaaattcacaaagttcgcgcacagtatagagttaaaagtggtgatattttaatggctttatctggcgctactgttgggaaaatcgcagttgctgatttagaggctgaaggggcgtatctaaaccaacgagtagccgttattcgaggaaaatgctatgaaaataccgagtatttgaaatacatatttactgggagtcgacttcaaaaactactcttaaatgcaggtggcgccgcacaacctaaccttagcccaaaagatttggctgagatggaaattccccttcctcctctaactgaacaaaaacgcatcgcaaccattcttaataaggcagaaaatatatgccaaaaacgcgagcaagccaccaaattggttgatgattttttgcatagtatttttcttgagatgtttggcgatcctgttgaaaaccctaaaggatggaagaaggataaaataaaaaaaggtgtattagacattacttcaggttggagtgccactggcgaaaatattccctgtaaatcggatgaatttggcgtattgaaaataagctcggtgacttctggaatattcaagccggaagaaaataaagtagtagactgtgaaaccattcctgtttcaaaaaaactaatacttcctaagaagggagatttgctatttagccgcgcaaacaccagagagttagttgctgcgatatgcatggttcatcaggattatgacaaccttttccttcctgataaactatggtcgattaagttaaatcatgagctattgctaccagagttctttctcatcttaatacaaaatgaaaaagtccgtgagctactaacaatacaagcgaccggaacaagtgggtcgatgctaaatatatctaaaaataaatttgaagaaactgagattatcttcccagagatcaatgttcaaaaagatttttgcaatgctttcagaaaaacaataaagttgaaacaaaagttaataaaaagtaatgaattagctaataaatcatttagttcattatctcaaaaggtatttttgcaatga

SEQ ID NO: 102354 - DNA, 1635 bp, Enterobacter aerogenes
atgatcaccggtgacttaaaaagtaaaatcgacgggctgtgggaagatttctgggtgggtggtatcacaaacccgctgaccgttatcgaacagatcacctacctgatgtactctaggatgctggatacccaggaacaacgtgacgagaagcgtaagcaaatcgcaggcgttgattttaaaccacgctttgcgcctgagcagcaggagttccgtttcagtcactacagcaaccttggctcggacgaaatgatggaagtggtgcgcgatggcgtattccaacatttccgccagcttgggcaggctgaagatacgaaggtgacgctgctgggcaactttatgaaagatgcccgtctggagatcgtcaaaccgtcgctgttaacaaaagccgtggaggtgatcaaaaacctgccgctggatcgcggcgacaccaaaggcgatctctacgaatatctgttaagcaagctgaccactgctgggatcaacggtcagttccgcacgccacgccacattatccgcacgatggttgaaatgatggagccgaaccccgcacgcggcgagacgatttgcgatcccgcctgtggcaccggtggttttctggcaaccagttatgagtacctgctggagaaatacagttcactagagtccattcataccgagattggcaccaatgaacgcggcgaattagaagagcaaaaaatctttaccggcgatctgctgacgccgtggcgtgaccatgtggataaccacatgttccacggttacgactttgataccaccatgctgcgtatcgccgccatgaacctgattatgcacggcgtggaagagccggatattcattatcaggacaccatgagccagagcttcagcactaacttcccacaggccagtaaaaacgccttcaacctgatactggcgaacccgccatttaccggttcactggatgaagaagatatcgacgccacactgtcagcaatggtgaaaaccaagaaaactgagctgctgttcctggcgcgcattctgcaaatgctgaaagtaggcggacgcagtgccactatcgtgccgcagggtgtgctgtttggctccagtaaggcgcaccaatcactgcgtaaaacgctggtagaagataaccagctggaagcggtgatcaatctgccttccggcgtatttaaaccttacgcaggtgtggcgacggcgatcctgatctttactaaaggcggtcagacggatgaggtctggttctacgatttacaaaatgacggctacagtcttgatgacaaacgtaacccggtaaaagacaacgatctgccgcatctactggcaagctggaagcattaccgtactttgcgcgggctaccggttgataactttatgggcgagaaattagcctcgttgctgaaacagcagcaaccggaagggattgatgctggcgttgattttaaagatcgcactcaggcggcgtttgtggtgccgaaatcggatattatcgcacagaaatacgatctttctatcaatcgctataaagaggtggtatatcaggccgaggagtatgaagatccgaaggtgatactgaagcggttaaaagatctggaaaaagagattctggcggatttggatgagctggaggggatgctgtga

SEQ ID NO: 102355 - DNA, 3414 bp, Enterobacter aerogenes
atggagcagtctctcaattttgaaatgttgcgcagccagtggccggaactggcagaactcgcgtgtatggcggaacgatatgttcactccgatccggaaagctgtctggtcaagctacgcaactacaccgaattgatggtacgttggttataccgccaggaacggctgcctgaaggcatcaaagcaaatctgtatgatttaatgaacgccgatgtcttctccagcatgatgccagaagccatcatcatgaaaatggatgcactgcgtatccatggcaaccgcgccgcacacggtggacgtattaaagctaaagatacctattggctgctcaaggaagcgtatttactgggagtttggctctatgttcgttatgcccatggtaatgttgataattgccccaaattttctcttcctccgttaacacaatcttcaggtcgtgcagatgaaaaacgtctggaagatgcaatcagggctcaagatgaaagccgtgagcgcgaactggcgttacaacgcgcactacagcaggagcaggaaaaggccgaacacctcactcagcgcctgaacgaagccagggcgcgtaaccagcatgttgccgatatcctctctattgatgaagcggaaacccgccgccgtctgattgattctcgcctgcttgctgctgactggaatgtaggtgaagaacttaagaataccgatcaggttacgcaggaacacccggttaaagaacaacctactacaactggcgacggttatgcggattatgtcttgtgggatgaggcgcacaaaccgctggcggtagtggaagcaaaaaaaaccagcgtcaacgccgagcaggggagaattcaggcccggttgtatgcggactggctggagaaagaatatggtcagcgtccggtcatcttctacaccaacggctacgatatctggctgtgggacgagcataaaactcatggttatcctccgcgtcgagtattcggcttctacagcaaggaaagcctgcaatatcttattcagcagcgtgaaacccgtctgccgctgaacagtgtgccgcatgttaaagataacgaaggtaaggccgttgccggacgtttgtatcagcttgaaaccattgcccgcgtcagcgaacggtttaccaacaagtaccggcaatcgttaattgttcaggccactggtacaggtaaaacccgcgtggcaattgcgctaagcaaactgatgattgatgcccgttgggtaaaacgtgttctgttcctttgcgaccgtaaagagctgcgcaaacaggcggcgaatgccttcaatcagttcaccaatgagccgctgtatgtggtcgggaaatcgaaaaaagcagacaggcagaacgccaggatctacattgccacttatcccggcatgatgaaaatcatggaccattttgatgtcggttatttcgatctgattatcgccgatgaatcccaccgctctatctacaacgtctacggcgacctgtttaagtattttgatgccctccagattggcctgacggccacgccgattgacatggtgagtaaaaccactttcggcctgtttggttgtgaaggacgtatccctaccgccaactacagcctggaagatgctgtcgccgataacaatctggttccctatgaggttgttacgcacaccacggaattcctgcgcgaaggcatcaaacgggagaagttaagcgacgcacaaatccgcgaactggaagaacagggtatcgatcccaatacgctggaatttgatggtaaggcgctggatgaggcgatctataacaaagacaccaaccgctatatcctacgtaacctgatggaaaatggcctgaaagatcgagacggccaactgccaggtaaaaccatcattttcgcccgtaaccacaaacacgcactgctgttgaatgaattgttcgacgacatgtacccgcagtttgccggacgcttctgccaggttattgacaactacgacccccgtgccgagcaactgattgacgattttaaagggctggatgaaagcaccaacaaagagctgaccatcgctatctctgttgacatgctcgataccggcattgatgtcccggaaattgtgaatctggtctttgccaagccggtcaaatcaaaagtgaagttctggcagatgattggccgtggtacgcgcctctgtgcggggctgtacggcaacgatgacaacggcaaaccgctggataaacagaaattccgcatcttcgatcactggggcaattttgagtatcacgaactgcataccgaagaggccgaagtcacagcgacaaaatcgctggcgcaaaaacgcttcgaagcatggattatgctggggacagccgctcaacgtaagttcgacaaacaggcggtggatttagtcgctcaccagctccgtgagcagatcaacgcgctggatgaaaagtcgattgccgtgcaggaaaagtggcagcaaaaagcgcagtacagcgatgaaaaagtgctgcgccagctttccccgaaaacacagcaggatttgctatctgtcctggccccgctgatgcagtggctggacgtgcgcgggcaaagcgacgctatgcgttttgatatggatattctggcggcgcaaactgcccgttataccaacccggaagaactggatgtgctctggccggtcatcgtcgagaaagtggaacgcctgccgccgcatttggcgcaggtgcagcagcaggggcagcgaattaatcaacttcgtgatttaggctggtggaagcaggccagcctggaagagctggaagatatccgcattcatctgcgcggcatcatgcacttgatggaaaaagatgcgacgccgcaattcggctcgatacaggtggatattaccgaagatgcgaacctgatccagacggaaacccgtaaaaccaacatccgctcgattgatttcaaactctatcgtcagcaggtccaaggggcgcttgagccgctattccagcaaaacccggtgctgaaaaaaatccgcaacggcgagccggtaacacaaggcgaactggatgagttggcaaaactggtgctgatccaaaaccccaacgttgatatccgggcgctaaaagagttctatccgcaggcaaccgccagcctggataaacttttgcgtacaatcatcgggatggacagcgacgcggtagaagtacgttttgcagagttcgcagctgacaacagcctgaccagccagcaactgcgtttcctatcactgctgaaaaaccacatccgcgattacggcaccattgaaatgcgacagctctttgaacagccgtttacccatatccacaacgaaggtgttactggcgttttcccagacatagagcagatcgcccggttgcaaaagatagtcgaagagttgggtgttgtgatcgacgcagcgacggtataa

SEQ ID NO: 102356 - DNA, 600 bp, Enterobacter aerogenes
atgaataatagtcaccaatataacccattatggaatccagactggtttctttcagtaattctggataatcatatcgatgcaatggtagccagatattcttgtttactaacattacgcctagacttcttttataaaaaggatacccctcgctacttacatcaagatcatcatgcacttgagcgtgacctgcgattattgatgaataaaatgatgcaaaaagctgctattgtgggctatttctgggtcattgaatggacagccgatcatggcttccatgcacatgctgcatactggctggatgggcatcaaacgcaaagatcctatccttttgcacagcaggcaggagaattctggaagcagttaacccaacaggagggctattttaatatatgccagtttaaagaaccttataaagccgatatcaatattcccgtgcgttataatgaacccgccagcattctaaatattcgtcgagtattgagctatctgacaaaagaagagcaaaaagaggggctctgttcatacggatgcaatgaagtcccacaacgtccaatgtcagggaggcctcgtaaagcgatgggcactatttctgaaaattag

SEQ ID NO: 102357 - DNA, 243 bp, Enterobacter aerogenes
atgaccagccaaacgactttgccattaactaaaatcctggattcaaaatcagtattgaatgatcagctcgtcgacatggcatttatcactgcctacaccaatatgaccgacaaatggttctatagattaatttctgaaaatgcgttcccagcaccaattaaacttggccgaagttctcgttggctaaaaagtgaagtcgaagcctggatgacaaaacagattaaaaattcaagaggacagtaa

SEQ ID NO: 102358 - DNA, 1089 bp, Enterobacter aerogenes
atgaataagaatgataaggatagtcatttaggtgcttttggagaattattctctattgaattatcacagaaagaaatggtttcgactgagcagccgcccacttctgtcaatcctgaaaataacaaggaaggctctttattgcaggcatcagaggtgaagcaacttcctggcgatgatagtaagcacgagtgcgcagatgtagatctttctcctgctactctggtgtccgaaataaatcaaactgaccctgcgatagaacgtgtgatgcggcaggcattggctcaggaagatactccccctaaaaagcaagtcttaaatggaggtgaagatccctaccttcgtgatgttgattttaggtggttaaaaggagatgccaatgagcgagccattttctggttttggatatatatccgcactgcatcaaatagccgtctcaatttgccagaattaaagttgcaaaatggctgggattcagaggatcattgtttatattctttttttagacttccggataatcccgtcagctccgctgaaaggagtcggttaattattaccttcttcaataaactctcgggtttcttcaatcctatccaaattaaagagtcattcgaacatattcgtagtatctggcttcacttgattagccctgttcgacaatttaaatggttaaagaaaaaagactctgagggtattgaatgggcgtgggattatttattaaaaaggaaggatgtcaatgataacatccttttttggtttaagcccgcagatgcaaatgagaaatatattgcaatcatgggggcaattgattgctgggttatacggcggaataaaattgattgtcaggataaaaaattacttctggataacatgaaaaaagcgtttcagcagcgcgggcgacgagataaaaagaaaagcttcaatcttaatactgaaatttctataaaaacccgtagagagcttaaagagctggttaaattgcatggtgttaatataaataaatttattgaaaggctgattgatgatgaatatggaaaatataaagacaatcctaatgaatataaaatatctttattaaagaaaaaacaataa

SEQ ID NO: 102359 - DNA, 891 bp, Enterobacter aerogenes
atgtcccaagcccccgaatcgcaggataccagtgatatcctgcgtgcctgccttaatttcttaccccaacaaacgaccgaacgtattctttcccgcctgcaacacgccatcaactacgagcccgtgattggcattatgggcaaaagcggggcgggtaagagctcgctttgcaacgccctgtttcaacaaccggtatgcctgaccagcgatttgctgggctgtacccgtgaacctcagcggatagtgctcaccgtgggcgagtgcagcatgacactggtggatttgcctggagttggcgagacaccggaatacgatgcggaatattcggctctgtatcagaagttgctgacggagctggatttgattatctgggtcctgcgtgctgatgatcgtgcgcgggcggtggatattgtcacgcaccggtcactacttgcttatggcgcggatgcttcccgtttcctgtttgtcatcagccaggcagatcgcattcctccgttgccagaacctgccggtcaggctgttccttcaactgagcagtgcctttcacttgcggttatcagttcgcagattgctggtcagttgccgtcctctttcccggtgatggctgtttcagcacataccggctacaacctgcatgctctggtggaactgatgatacacgcgttacctgtacaggccagtagcgctttttattgccagttaaagccagaaaatcatacggaggagagtgatgtcgctgtacgtcagcgttttggtgaaatagccggttcggcttttgatacggtgatcacttctgagcgtctgccttctggctggagcttgttgctgaggaggctgcgggaaaaactggtacagcttgcatcggaattatgggagaggatttttggctga

SEQ ID NO: 102360 - DNA, 690 bp, Enterobacter aerogenes
atgaaaaccagaacaataattgctctttttctctccgccgcctctgtctctgcgcaagcaggcaactggatggtgaaaaacggatggtgccagaccatgacggaagacggtcaggcgctggttatgctgaaaaaagacactattggtatcttcggccagttgcagggttgccccaacggtcagcaggaactgatgggaagccgtatcagtattaacgggaatttgatccccacctctcagatgtgtaatcaacagacaggctataaagctgttgaaatcgaaggcggacaggcacccgccgcagctaggaaagccattgaatcaattgccgctcaggataattccagcgtgcaggtctttggcacacaaatgaaatttacccgtggtgatatgctccaggtttgtccgaaatatgtcaacgctcttacaggcgcatcagcagatgccaccgggaacaagccgctgaaagtcaacaaaggttcggtaatgaaagcggccagacaggcgtacacgaaagaatatgaccgtgaaacggcagacgccgctgattttggcagctatgaagtgaagggaaatacggtggtatatgaagtctacaatgccgcttaccgcacctacgataaaatcgttgttactgtaggatctgatggtaacgccaccgatgcaaaggtggagtacatggggcaataa

SEQ ID NO: 102361 - DNA, 447 bp, Enterobacter aerogenes
atgaatactgcaattactgacgccaccttattgtcagacactattttcgccacgcctgtcgcagatgaacagcgccccggcttctggccgcagcattttgccgctattccacagtggatattactggagccgcgtatctttgcgtggatggaccgtttctgtgcggattacagcggcggaatctggaatttttacacgctcagtaacgacggcgcttttatggtgccggatactgacagcgatgtgcaatggcaactctttaacagcatgaacggcaataacacgcaaatgagtgcagaggccgccggaattgccgtctgtcttatcgagtacagccatcatgcctgccgtaccgggtgcgatgccatgacagcgcacttttatcgtctgcgtgagtatgctctgcaccatcaggaatgctccgccatcatgcgcattattgactga

SEQ ID NO: 102362 - DNA, 477 bp, Enterobacter aerogenes
atgactttcaacttatcactaccgcaggaactaccgctgacaacccggcgtactgttcagcgtgctctggcgctgcttgaacaccatctgcgcgaaccaggcgcatcattcacgtccacaacggttgtccgggattggctgcgtctgaaaatgaccgggctggagcgcgaaatgtttcttgtgctgtatcttaaccagcaaaatcagctaattactcacgaaaccctgtttaccggcactatcaacagcacggaagtgcatccccgcgaagtggtgaaatcagcccttcgccataatgcagccgccgtgctttttgcccacaaccatccctccggtgaagctgagcccagccaggccgacagacagattaccgccagactggtaaaggcgctgtcgctggtagaaatccgggtgctggatcactgcatagtcggaggcatgacagtggtttcatttgccgaacgtggctggttatga

SEQ ID NO: 102363 - DNA, 327 bp, Enterobacter aerogenes
atgccactgactgatgccatacagtggggattaaagcgaagtttcacaccgaattttggcgcaaggctggtacaggaaggcaaccgactgtactacctggctgaccgggccaatatcaccggtaaatttggtgacgccgaatgtctgaagctggaagaagcattcccgcattttatccgccagatggaactgatgctgagcactggcgaacttaatccccgtcatgcgcacagcgtcactctctaccacaacgctttcacctgtgaagccgatactctcggtagttgtggttacgtctacatcgttatttatcccactcaacgttaa

SEQ ID NO: 102364 - DNA, 342 bp, Enterobacter aerogenes
atgaaaaccttacctgcaacaattcagcgggcggctaagccgtgcccgtctcccgtgacggtctggcagatgctgcttacccgtctgctggagcaacattatggccttaccctgaatgacacgccgttcagcgatgaaaccgttattcaggaacatatcaacgcaggcatcacactggttgatgccgttaattttctggtggaaaagtacgaactggtacgtatcgatcgcagagggtttaactgtcaggaacagtcaccttatctgtgcgcagtggatattttgcgggcgcggcaggcaaccggcctgttacggcaaagacatcttccttcgatacgctga

SEQ ID NO: 102365 - DNA, 885 bp, Enterobacter aerogenes
atgcgcctgccattcccggcgggcgtgtttgctttttacggacaaaataccatgcaaacagaagctgaaattttaaccgatcataatgagctgatttgctccaccagtattgaacgcatcgtcacaggacgtaatgctgcgttgaaacagattgaggcgctgatttgtcagctagatgacgtttcccgactcacttcagaaattggcggcgacatagcgagtcattgggcgatgcggcagggccatgctttcgactgctggctggtgcaacctgtagataaagcgatgcctgtcatcacccgcaatatcgaccgcagcatctggcgcgatctgatgctgaagtccgggatgttaacgttgatggatgctgaagcccgcagtcagtgggcgaagaacctggaggagggcgatcttccggccatcagtgaagccaatatcctgagtacctttgagcagttgcaccataacaagcaggacgtttttgagcgcgggataattaatttattcaagggattgagctgggactacaaaaccaataatccttgttacttcggcaagaagattatcgtcaacaatctggtgaagcatgacagatggggctacagcctgaactggggctggcgacgcgatcagctcgccgatctggagaggatgctgtacctacttgacgggaagaccattcccgataaccggcatgatatctctatccggtttatggactttgtgcgcgacaacccgcatcagcaggtcttcgaggatgagctgttcaccattcgctactttcagaagggcagcgggcatatcacgtttaatcgtctggatctggtggagaagatgaatgacattgtggcgaagtactatccagggatgttgcctgccaaatga

SEQ ID NO: 102366 - DNA, 402 bp, Enterobacter aerogenes
atgagaaataatgtttttataagtagggctatgttcaaattaccacgagttattaaacgaggtagtccctatgggttcgcttacaaacaaatcattagcgcaaagattggcgaggatggtgatgcgaatgaaggaaaatatggaaatgtccatatcaccatggtgaatggtggcccggttattgagcttttttgtgagccagatgagtctaaggaagaaagtgatggcgatatcggtcagttgaatgcattttttgacattctggaattagagccggaatcaacagagcgatatcagttaaccaatatagatggagaagacgcgtttatccgtattggttccatcgctatggtgcgagtcctacttgatgtgctggagcctgtcgaggaagatgatatataa

SEQ ID NO: 102367 - DNA, 1236 bp, Enterobacter aerogenes
atgaatagcacattaaaagaacttgagagaaattgcgcaccaatagattttattgaaccactggctcgattggtcttggatgatttagctatgtgggcaaatgataatatatactcaaaaaaatctgggtgtttaacttatgaactccctcttgatggaaacatcaatgcagcttgtacaagttatcatgattcacgctatcgaacccatattgaaattaaccttggaatggttcaggaaatctacatccagtcatttacctatccaggtcacattaaaaatctagaaagcggaaattggcatttcaacgctcttgatgagccctttagtgatgctgaatttttattcgaaggtggtatccccccaagaatcagcgcgtctgacacggtcactcatatggtcgagctatacaaaaatattcctaacaacagaaataccatgtggactgatgaagaattaatttgccgttttgccatgtttgaattaatgattgcgtggatattttttcatgaacttgcacatcacgttcaagggcattacaagataaaaaaagaaataaaagaatcggttacttatcatgaactagattactcaagcaacactaataattccaatcctgaggtaactcccagcgtcatccaaaagaacattgaccagcatgccagagagatacttgcagacctcgaaggcatgtatttaacactgaggatgatggtgagaaatgatacattaacaccacctaacacttttttgcttttatatgtccaaacttcaatgtttaatgtattctataaattatctgagggaaagtatacggaattagatagcgttaaagtttctcacccccaccctgtaattagaaacaaatttgtgcacgccctgtatgtctctgtgatgagttgggaattgggtaatgagatataccaagattatcgtcaatctgttagccgaggttttgaatattatactgtaaaatcatcattattagctggaatgatatgggcaatgagacaatctgattacagtccggatgcaatgccccaatttcttaaatttagtgatgagaccgagtattccacagattataactaccttagagaattgaccttaagcgctgaaaggcaatcatccatgatatcactcttgcatatcatcgataatgattcagataatatttttaaattaacaaaattagacaatctattcactcattttttaaatgttaatgaagaataa

SEQ ID NO: 102368 - DNA, 1893 bp, Enterobacter aerogenes
atggctgatattgattctcgatacaaactaagcgggtctttaaaccccagttcgcttcccatacttgctgctgacattcttaaatggtctcttggtcatactaaggttcgcattcttgatggccctggcgatggtagaagagatatactttcaataactcctgaaggtataccgcatttaacccaatgcaaacaccactctgacgacacaaaatctgttagctcacgagaaacagatgaaattgttatagctttggcaaagtttggagttaagtctgctttattttttacgaatggccgcatttctccacagggaaagcgtgaatacattgataattttccaggttattctctggactatattgacggcgacttaatgttgcaatatgttgaagaaagcccgttactatcgcgaatgtggctccatggttctaccttgggaatgattacccatcgcttgcttatccccttcatcattaggaatgtaagtgacgatagcactgtaaaattaaatgcaaatcaatataaagatatttctagctattggggaccacgtgaattatttgaaccattccgagcatcaattaagtctggaggcattggtgatttgtcggctaattcgattagcggagagcgtagactatccctgacagaactacctagtgctattgctgatatgaaacagaatgtattgcaaacattgaagggaacttattctggagtgactgtaagatttggtaaacccgctttgattaaccccaaatctaataatgaggacgacaatatttggataggagggattgagccagagagttacatcataaattttaatggggagataaagactgaaaaggaatggcttcttcctgaactgggagaggactggcaattccctgataatatttcagtagctgaagttgagtgggccggttggttttcagaaaatcatgatgcattcttgatgtacgaactcctatggccttatgtcactggaagcaatcacctagttgatgtttatgagcattctgaacgagaggccgttaatcaatcactttttgccgctgtaaatgacgaacaacttgaattgatacttcaagctcttgttcctcaacctgattggtttgaaagcctgggaggggaaactgttctaggatggctacatccttttttgtgtcataataaaaaagagcaacaaagaagtatcaaagttgaagatggaaaatatattccttatcatcctgaagcagaaagattttttgtagaagcagaaaatattcgtcatcaacttaaaataatgggtattgatgagtttgaacctgctcgagcaattcatttggccgctgcattagcaagaccactggtctatacaaagtcatttgatagagcacctgcagcacagattttagaatattacgataatataccatcacctatttatttactcgatcgtaacatgacttacttacaaatgtgggaaagctttgatgaatctgtttttgaagtggatatagatattagagctttagaagcccaacttccggatgggttgacgcttaagctggatgtcaaaatgggaaggcgcacagaacggttatttgcaatggtgatgttaatagctaaaagtataggtcctgaaagtgccacccatcatgctaatcgattaatgaaccttgtgagttatatgactccaacgttgaaagaaatcgttgaatcaatttggcctggagctgtgttggcgacaaaacgtttttggcgcgatgaagtaggcatgttttttgaaggcggtaaatttataggccgtccatgggttatgatgatgcctcctgacaacgctaccgatcagtctccggagctatatattattcgccccgatcagttagcagaaaacaaatag

SEQ ID NO: 102369 - DNA, 357 bp, Enterobacter aerogenes
gtggagaaaagtgccactctgtcgaaaaaatcccggttaggcgaggtgttcgcttatgcactgaaccagtgggatgccctgtgttactactgcgatgatggtctggcagagccggataataacgctgctgagcgcgcgctacgagcggtctgtctgggcaagaaaaactacatcttcttcggcagtgatcatggtggtgaacgtggtgccctgctgtatggtctgatcggaacgtgcaggctgaacggtatcgatccagagggttaccttcgccatatcctgagcgtattgccggagtggcccatcaacaaagtggccgaactgctgccatggaacgtagatctcaccaataaatag

SEQ ID NO: 102370 - DNA, 1206 bp, Enterobacter aerogenes
atgaacgatactgccaggaatgatcacagctcctgggctgtctttctgattttcttccgacttggcctgacatccttcggcggcccaattgcccatctgggttacttccgcgatgagtttgtgacgcgacggcagtggttgaccgagcgcagctatgcagatttggtcgctctgtgccagttccttccgggaccagcaagcagtcaggttggtatagcgctcgggctgtcccgggccggttataccggggcgctggcagcatgggccggcttcacgctaccgtcagcagttgcactgatcctgtttgcgctggggatgaccagttacggggatgtgatgccctctggtgtattgcatgggctgaaagtggtagccgttgcggtggtcgcgcaagctgtatggggcatggcccgaaatctttgcccggatataccgcgtattactgtcatggcagtggcaacctgctttgtgcttcttgtgccatcggcctggggacaggtgggagtaatcgtcactgcggctgtcactggcatgttactgttcaaacctcagcagacgacggtacatgatccgctgcccgtttcaatacggcgtcgcgtcggattgttctggctcacgctgttctttgtgctactgacagggttaccattgctgacggcgatattcccaaatccgacgctgttaatggtagaaactttctaccggaccggatcactggtttttggtggcgggcatgtcgtgctgccattactgcagactgaagtcgttccttctggctgggtcagcactgatacattcctggctggctacggcgctgcccaggccgttcctggaccgttgttcacttttgcagcctttctcggggcttcgatgaaccaggtgccttctggctggctgggtggtctggtttgtctgctggcaattttcgcaccgtccttccttctgattgtgggagcattgccgttctgggaaagtctgcgccgcaatatccgtacacaagcagcgttgcagggtattaatgcagccgtagttggccttctgctggcagctctctatcaaccagtatggacgagcgcagttctcgctccgcaagatttcggccttgcccttgtggcactggtcgctctgatgttctggaaactgccgccgtggctggtcgtagtgagttgcggtgttgcgggttggttgttgagtttagcactgtga

SEQ ID NO: 102371 - DNA, 306 bp, Enterobacter aerogenes
gtgaccgacaaagatctttacggcgggatgatccgtttgcacatcctgcatcatgcagccaaagaacccgtctttggtctgggcatcattgaggaattgcgacaccacggttatcaactcagcccgggtaccctgtatccgatgctgcacggtatggaaaagaaggggtatctcacctcacgacatgttcaggccggtcgacgaagtcggcgagtatatgaaatcaccggacaagggcacatagcgctaacggacgccagaaacagggtgaaagagctgttcggtgaacttgttgaaggcaaatga

SEQ ID NO: 102372 - DNA, 279 bp, Enterobacter aerogenes
ttgccaagcggcccccatattgaatggctgacggtactggatttcgatgagataaaaatagaccgtatttttattgccaatattgatgacccggtgaagcgagcgctacttgtttctgtggtgaaagggttacgtggtactggcaaaccactggtgtttgaaggggtggaaacgccaggacagtttgaattcgtccgttctcttggccccggttacctagttcagggctggtataccggaaaacccgaaacaatatctgcgatgaatattcagggttaa

SEQ ID NO: 102373 - DNA, 141 bp, Enterobacter aerogenes
atgtaccgggtaaaacagctgttcgggggttcactgacgctgcgtgactacgatggtcaggttgcggaggctatggccctggtacgagcgctgaacaaaatgacgaaagcatgtatgcctgaaagcgtgcgtattgcctga

SEQ ID NO: 102374 - DNA, 141 bp, Enterobacter aerogenes; identical to SEQ ID NO: 102373

SEQ ID NO: 102375 - DNA, 648 bp, Enterobacter aerogenes
atgtttaaaccgtccagccgtgagatcccaattgagaagcaagccgcaacgctgttatttattgatgtacaaaattacaatgctcgccgtgatgggggggaatatgttgggatgtcgacaaccgagctgaatgagaggttcggctacttctttgatataattgaacgcgaaacaatttctaatatgcaaaaaatccagactgcatgtcgtgcaagtcagattgaagtgatgtataccgttatagaaagtctgaccaaagatggccgtgaccggagcctggactacaaaattaccggctttaacgtgccgcgtgactcctgggacgcgcaggttctggaagctattgctcctggtgatgatgaaattgttctgtcgaaaacctcttccagcgtatttatctcgaccaacattgattatgtactacgtaaccttggtacccgttatcttgtggttgcgggttttcttaccgaccagtgtattgaaagcgcagtacgtgacgcctgtgatctgggatacttggtaaccttagtgactgatgcttgcgcgacactgtcggctgaacgccatcaaaactctctcaacgctataaaaggttattgcaggcaaatcactacacaggagtttctcaatgaactctccgctggataa

SEQ ID NO: 102376 - DNA, 792 bp, Enterobacter aerogenes
gtgagcgccccccttcttttttcagatgaacctgctccggtaatggtggaaaaccaatcgggcatttctccttttttgatcctttgtgaccatggtggaaaacgtatcccgcgccagcttggcgatttaggtttaccgcagcatgaaatagatcgacatatcggctgggatttgggcgtgctgactgtgtcccgacatatgagtcgtttactcaacgccccactggtgcatcagatatattcccgactggtgattgactgtaaccggcaaccaggtatccccagttccatcccggaggtatctgaagccactaccattccgggaaatatcggcttgacccagcaggagcgtgaccagaggcgtgacgaaattttcaccccttatcatgatgctatacgcgcgatactgactgaaaggaagaaacacggtattccgacctgtatcctcgcgatgcacagctttacaccggtatatcatggtgaatcgcggccatgggagatcggtgttctgtaccagcatcaagctgaatatgctctgacggtactggagcgattaaaacaaacccggcgatggtgtgttggagataatctgccttactccgtttcagatgtgactgactatgctgttcctcagcacgccattaaaaatgaactcccctatgttgaaatcgaaattcgtcaggatttgattacagaaccagaaggacaacgaacctgggctgaagatctggctcaaatattcacagatagctgggccattctcaccagtcaacaatataaaaaagaggcataa

SEQ ID NO: 102377 - DNA, 852 bp, Enterobacter aerogenes
gtgctggcacaacagataaaagacaacatggcggagctaagtcctgcagagcgtaaaattgccagggccatgctggctgactatcccggtgctggtttaggttcggtgcaaatgctggccgatcgagctggcgtcagtctgccttctgtggtgcgttttgcacgtcgaatgggatatggtggtttcgttgattttcagcaggcgctgagggatgaaatatcggaacaggctaaaggccctttacagcgcctggataactgggtaacgacagaaagcgcatcgtcgttgatagaggccgccataacatcctcgacactggcgatacagtgttccttacgtgacatagcggaatatgagatcgctgaagctacccgtctcatcggtgctaaagaacatcatattatcctcggtggcggtcgtatcagccagtctctggcaatgtattttggccgcaacctgcaacaggtgagacgcggtgtggaagtgctcgccgaaaaccatcacgatcgtattcagcagatcatcgacgttaataaaaatgacgtattcgtgttgttcgattttcgtcgttaccagcaggatatgtatcaactggcacaggagattgtggcacgcggtgccacactcatagccgtaacggataccaaactttcccctatatcttctctcgctaaagtcgttctggctatccatgtcgaaacgccatggctttttgatgggtacgccgccggtattgtccttattgatgccattatcgccagcattatggaaagccagggtgataaaaccgtgcagcgcctgcagcagtgggaagcacttggccccctatctttaaatgcaaaatccaaatga

SEQ ID NO: 102378 - DNA, 1371 bp, Enterobacter aerogenes
atgggcaagcaatttgtaggtgtcgatgatgaactcattgatttacaaagcataagtgagaacctcagagctctggggatcacgaccctttttacctcgctggtcgactctgcgggcgtaatccgaggcaaatctgtcccggtaaaccggctcaaaaccctttgtcagtcaggggtgggagcatcaccttcctgggctctgttctgtgccgataacgcgattgcctggatcccggcattcacggctgttggcgatcatcgcctgcgtgccgatatcagttcactggtgacattccaggatggtttttgctgggctccggtggatgtttttgaacaggaaggacagcacgccgcctggtgcagccgtcattttctacgccagcaggtcgcagcgctgcaaaaacagggtatcgaaactctggcagccggtgagcttgaattctatttgttaccagagcaggacgttccggggcatagcggatggcacgcttacggtataggggggctactggctcatgagtcgatgatcaatgatctcgtcagaacgcttgaagaagcgaatgtcggcctggaacaatttcatgctgaatatggctcctgtcagtttgagctttcactggcaccggccgatcccgtgacgatggtggatcgcctggtgctgacacgtattttactgggccgcattgcacgcaaacatcatttacgtgtcagtttctccccaaggccatttgcgaatgaagcaggtaacggtgctcatctgcattactcctttacacgtgaggggcaacctctgctggccggcggtaccggtatctacggtattaccgctgagggcgggagcctgatagcggggatcgtacgatatctgccggaattggtggcattacttgccccgtcagtattgtctgccgaacgcctgcaacccggccactggtcgggcgcgtatgcctgctggggactggaaaacagggaagccgcagtacgttactgtgcggcaaatcggggcaacccttatggcgcacatcttgaagttaagtgtatagatcctgctgccaacccctacattgcctgtggggcagtgcttgggatggcgctggctggtctgaaagacgaacttcccctaccgcagcctacacaatctgctccagccgatctctcagaagctgaacgcaatgagcagaatatccagcgacttataacaaaccacagcgaggccttaacccgtctcgcacaaagctcactggcgcagtcaatgttacctccggagctactgggcgcgctgatcgccgtacgccagcatgaacaggatacctggggacatctaccgctggaaaccatcacggagacattccgcttcgcatggtcggtttaa

SEQ ID NO: 102379 - DNA, 1467 bp, Enterobacter aerogenes
atgagtcatgcatcaaataaaaagcgaagtttaaaactctgggaggctctggcgctctccttgggaatggttggaccaacactggctatgtcaggtaatgcgcaggggttgatcgactcagttggcaaagcattgccgattgtgtttgtattaggtctgatcggggtagcattaattgcctatggttttatccgtttgacccgattttataatcacgctggtagtgcctacggtttggtcggaaaaactgtcggtcctcgcgccgggttcttttccggttttgccattatgggaacgtatcttttcttttcgattggcacacttgcggcactgggtgcatttaccaatgcttttctggccgcattattcccctcctctggttttcagatcccatggattatcactgcgacagttggagtgatatttagctggatcctgaattctcgtgatggaaagacggtcgctcgcgtactgatggtgattgaggggctcggcattgtattgatgctggtactggctgcagtgattgtcgtacatcaaccggcaacaggggcagaacatgcttcattgttcagtttgaatggcgtcagttttcaggcggtaatggctggcgtcgtcgccgctttcctctcctgggctggctttgaagcctgtgccaccctcggggaagagacagaaaaccccaagcgcaatattccgctggcactgctgggttccattctgctaaccggtgtgctgtttgtggggatgatgtatgtgcaaacccttggttttggccttagtgagtcgggcctgaatgccttcaaaaattcagcgaactccctgggtacattatcacaaacatacgttggcaccgcatttaccttagcgatgttgtttaccgccatgatgtctgctttcgcggcaaatttatctgccgccgccacctccagccgtctgttatttgcgctcgctcgcgatgggtttggtccagcgtgttttgcgaaaatgtcagataaaaatcatcaacctcgtaacgccttaactctgatacttattctcagtctgctggttgatgttgtggcctggctgagtggtaaaccggcgatgggaacgggtaacagcgcgatagatgcatacttttattttgcgatcatcggctccgtttgcctgatggttgcctatctgatgatcgagattggagtgattaattttatcgcccgcatgggtcagaacatccctaaatgggagctgatcatgccagcgctgggcatcgtcattatggtgatgtcgttatatttcaatgtggcaggccaggaagagctctttagtccggcactggtggcgttttactggtgcatcgccgggctgatcaccatcatttcggcacccaagctcgtacgaaatatcggattgtccctggcgtcagagtttgcaaccccaggtgataaagtggcaaccaggacagtacaaaaggagtggatatga

SEQ ID NO: 102380 - DNA, 1089 bp, Enterobacter aerogenes
atgagcaagcagctctttcctgacgaagcagccagtttgtatcagcgtgacacccggtccgtagctggaattgagaagttacgcttcttcccgttagccgttaccgctggcaagggatgctggttaactgaagcaggtggccggaaattgctcgacctgtcagccacctggaccgcggcaggtctgggtcatggtcacccggaaatcgccgcggctatcaccagggctgcacagaatccagccggggccggtggcctttcagcggtacacccggattcggtcggacttgcagaggagctgctggccattaccccgggcaacggggatcgctgcgtctatctcggacatgccggtagcgatgccaatgatgtggcgcttcgcgcctgccggctcgccagcggaaaacgtaaggtggtggcttttgcgcatgggtatcatggaggtatcgggctggcgatgaaagtatccggagtacatatatcggcaggtaacgcagctgatccagacctctacctggccacttatccaaatccattcagaaccaatgatgaaggcgctgcggcagtcagcgcaagcctgcacgaagttaaagaacagctcgatcaaggtgatgtggcttgtgtgattgttgaacccatcctgtcggatggtggaatggtcgtgccaccaaaaggttttttaggtgggttacatcgattatgcgtaaaggcgggtgtgccgctaatatgcgatgaagtcaaaatgggtctggggcgccccgggctgatgcacgccttccagcatgagaacatcgttccggaaatcgtcacttttggcaaagtgttaggtggaggtttgccgctttctgccactgtgggccccaaagagatccttggtggtcccgcagcgcatgcattgcttaccaccgcaggaaatcctatttgtacagccgtaggccgttctgtgttgcgtgtgctgcagcacgaagagctgcctgaacgagcggctcaggctgggctttacttcattcaattctgcgtgaactggcgaaggacttacccgagatcggcgatgttcgtgggcatggtctggctattggcatcgagttag

SEQ ID NO: 102381 - DNA, 720 bp, Enterobacter aerogenes
atgaaaaatcgcttcactgataaaaaaattctgatcattggagggagttccggaattggcgaagcaacggcccgtgcttttgctgaagccggcggacatgtgaccattgcgtcacgtaatatgtcgaagcttcaggctgcagctacacggattggatcggatactgaagtggcagaactgaatactaccgatgatgaatcagtgcagcgttttttcgagggagccagtggattcgaccatgttgtggtcagcgctgcccagacatcatcagggcccgtacgggagatggcgcttgaggatgcgcggcaggctatgaacagtaaattctggggtgcctataacgtcgcaaggcacgcacgcataaatgaaggtggctccctgacttttgtctccggatttctcagcgttcgtccttccaagccagtgttacagggagccattaatgcagcaattgaatcactgggccgcggtcttgccttagaacttgcctcatctaaagtcagggttaataccgtttcacccgggctgattgccactcccttgtgggacgctctggagagttccgcacgtcagtctatgtatgaaaaagccgcctcaacacttccagccagaacaatggggctgcctgaacacgtggcagatgccatcctctatgttgcaggaaatccttatgccacaggttccactgttctcatcgatggtggtggggcgattgcataa

SEQ ID NO: 102382 - DNA, 903 bp, Enterobacter aerogenes
atgaacttcggaaatttcgctctgctacgattttttattgatgtgattgatgaaggttcgatttccggagcagcacgcactcacaatatttcgttaccagcggcaagccgaaaaatgcggcagcttgaacatctctttggagtcaggttgttacagcggacaacgaggcggcaatcactgacggaagaaggtgtaatactttatgaacaggctgttcgtatcctgggggatcttgaaacactggaagatatgctcagacaaaatagcagggaagtggccggtgttttacgtgtaaccgcacctgtgtcgctggggcgccgaagaatagccccgttgctggcgcagtttggggcaatgtatccacggttatcagttcatttaaaacttaccgatacggtgcttgatcttgtggcctcgggtatggatgttgctatccgctacggagcgactgaggattcatcctatatttccagaccgctggccaacaattatcgtattctttgcgcttcaccagaatatgtacaaattcacggcgttcccgaaacacctcaagaccttatcaggcaccgatgtctccattctggcacagagtcatccgttgactggtcactgggagacctctcagtgcgtattaactcccccttcacttcaaatgacggggaggttattcgacaactggctctagatggttacggtattgcattaaaatcaatctgggacgtggcggatgatattgaaagcggaaggctatgccagatcctcaagcaatatcagtcacaagctgcccccttgcatgccatttatcctcacaggcaacatgtggcccccagggtaaaggttttcattgaatttttgataaaaaacatccgggagccagatatttacgcaaaatcaccttcctga

SEQ ID NO: 102383 - DNA, 1062 bp, Enterobacter aerogenes
atggacagtctaaagttagaaaaattctccgaatttaatcataatgaccctttctttgactcactcaagagtgattataaagagttttcagattggttgaataaaaaagcaataagcggagattcagcatacgttctttatgatgagaatcataatatcgagggttttatgtacctcaaagaaaatgatgatgccggagatatcttacctccactgccaaatggaactcacttgaaaatagggacatttaagtttgagtcaaaaggcacacttagagggcagagatttctaaaaaaagcgttcgaccgagcatttaactcagattctaatgatatttacgttacagtttttcaaaagcatactcatcttgttaagctttttcaggcatatgggttttatatccatggagaaaaagaaactcaaaatgggaaagaattcgtatacgcccgaaacttaaacgacgttaatggcgatgtactccttgattacccgctggttctaccaagagaaaagaaaaaatttattcttgcaatcaaaccagaataccacacaaggctcttcccagactcaaaactagtcaacgaatcaccagatatagtccaagatgtatcacatactaacagcatccataagatttatgtttgtggtatggactccgttcaaatgatgagcaggggggatataatcattatatatcgcatgtccgacggacaaggcccagcaaaatatcgttcagtagccacatccatatgcgtggtggaatcggtgcgacatgtaacaagctttaacgacgaagattcatttgtaaaatactgctacaaattcagcgtattttctgaaaaggaattgagggaattttatcgctctaaacgcctcccctatattgtaagatttacatataacatcgccttgcaaaaaaggccaactcgtgagatgcttatggatcaggtggggctgcgtggagaccgcactggacggtggggtaatttcgagattaccgaccagcagtttaatgaaatattgaaattgggttgtgttaatgaaagttttattatccattaa

SEQ ID NO: 102384 - DNA, 336 bp, Enterobacter aerogenes
atgactctgatgactctgacggtactgatgactctgacggctctgatgactctgacggctctgatgactctgacggctctgatgactctgatgactctgatgactctgatgactctgatgactctgatgactctgacggctctgacggctctgatgactctgatggctctgatggctctgatggctctgatggctctgatggctctgatggctctgatggctctgatggctctgatggctctgatggctctgacggttctgatggctctgatgaccctgacggctctgacggttctgatggctctgatgactctgacgtctctgatggttctgtaa

SEQ ID NO: 102385 - DNA, 141 bp, Enterobacter aerogenes; identical to SEQ ID NO: 102373

SEQ ID NO: 102386 - DNA, 1212 bp, Enterobacter aerogenes
atgagcatgccagatattattgaattagctaatgggcaaaaagttaaaggaacgttcagctcccatgagatgcagcgccgactgtcgggattacgggccaccatggaagcagacagcattgatgcagttattttaacctcgattcataatattaattactacggcgattttttatattgtagttttggtcgccagtatgccttggtagtgacaccgagccagtcatttttaattaccaccaatatcgatggaggtcagggatggcgccgcagctacggtgcaaatatcgtttacacggactggcagcgcgataattattaccgtgcagtacgtaaagtggttcctgataatagccggcggattgcactggaaggcgatcatgtaacgatcgaacagcgcgctaaattttgccattacctttctcagacacagtttattgatattgcaccggcgacgatgcgtatgcgcatgattaagtctgccgaagagattgcgctgattaaaattggtgctcaggtcgccgacctcggcggcgcggcatgcgtcgcagcgattgccgaagatgttccggagtatgacgttgccctggcagccacctcggcgatgacccgggaaatcgcgaaacgcttgccgcatattgaattgcgcgatacctggacgtggtttcagtctggcctgaataccgacggtgctcaccatccggtgacgacccgtcgcctcaagcaaggggatattttatcactgaactgttttcccatgattgccggctactataccgcgctggagcgtacactgttcctcggtcagcctagcgatgagcaattgcgtcactgggagatcaactgtgaggtgcaccgccgtgggcaggcgctcattcgccctggcgcccgttgttgcgatatcgccgcctcgctcaatgaaatttatcgcgagcatgacctgctgcagtatcggacttttggctatggtcactccttcggcgtactgagccactattatggccgcgaagccggtttagaattacgcgaggatattgaaaccgttttagcgccgggaatggtagtctcaatggaaccgatgatcatgctgccagagaacatgccgggacacggcggttatcgcgaacacgatatcctggtagtcaccgaaaatgcagcagagaacattacccatttcccttatggtcctgagcataacattatagaaaaatag

SEQ ID NO: 102387 - DNA, 954 bp, Enterobacter aerogenes
atgatgcaacgaaaaccaggtttgccgtctctcgacggtttacgctactttgatgccgcagcgcgcaatctcagttttacccgtgccgcgcaggatctttttcttactcagagtgcagtaagccaaaaaattcaatcgcttgagcagcaacttggctatctggtctttcaccgcactcccgcgggactacgcttaaccccgcagggtgaacaactttttatcggagtgcgccaggcctttgccatcctcgaaactacgttgcaccaaaccggtgaagaaacccttgagggcaccataaagattcgggttatgccgtcctttgccaccaaatggctgcttccccgattgcatcagttttatgagcagtaccctatcagcctggaaattgatgccgatatgacgcccgccaattttaaatctgacgcggtcgatatcgccatcactcctttttgggttgatgataaaaatctaattcaacggcatctgttcaacgatgtgatctatcccgtgatcagcccggatttgttgaaaacacggcatctgcgcagttacagcgaactctgtggtttgcgcttactgcatgattccatgccgcaaaatgcctatagcacccattggcgctcctattttgcccgcctcgggctctatgacctgaatgtcgaggcgggaaccggattttcccgcgctgacctcgtactccaggccgcctgcgccggccaaggaatcgccttaagccgtcactctttgtgtgcgatggaagtgagcaatggcgcactgattcgcccttttaccgatatcgtcgaagacggacaggtgtggttaacctgcccgcgtaataatgagaaacggccacgcgttcaggcgttgattaactggctgacacaagaaaccgcacgtcatattgcagagcgaacgcaaattctcggtgaatatacgctgcataaggccggctaa

SEQ ID NO: 102388 - DNA, 849 bp, Enterobacter aerogenes
atgaaaaataaactgtggctattactttctatgtctgccttacaactttcaccattattgatatctacggcccaggctgatttactggatgatattaagcaaaaaaaagaaatagtgattgccaccgaagcacgctatgccccttttgaaatgcttgaagatggcaaaatagtcggtctgggaaaagatattctcacggaagtgatgaaaggattacccggggtgaaagtggttcagctggatattccatttcaggggattttgcccggcctggaaagcaaacgatttgactttgtggcaacttctttaaccatcactcgcgatcgtgaagcaaaatttgcttttaccgctcccttttctgacgccagcgtggccattctgaaacgcaaaggggatagccgcattaatagcgccaaagatctccagggcatgattgtcgccagccaggccggggcgccgcaaattgcggtgctaaaagaatatgaagcatcggtacttaaacccaccaccggtcacggcgttaaagaaataaaagcctttattgattataacgaagcctatgcggcattagcggcgcaccgtgttgatgcggttgtgcaatcgctgccgaacctcgcgccgttggtaaagacccgtggtgatacgtttgaaattgtacgcccaccgtttggcccggccacttggtacgcatgggccggaagaaaggatgcggatagcgcctcactggtcaaatttatcagcgacggcattgtgcagttgaataaatcgggaaaactggcgcagctacaaacgaagtggctgggtttttctatggccgttcctgagcaagttccgaccccggcaaactaa

SEQ ID NO: 102389 - DNA, 672 bp, Enterobacter aerogenes
atgtttgatatttcagtggtgtttccctatttccctcagctattaattggcgtgctcagtactctggctgtatcgctgagcgcgattgtcataggattgatcctcggttggttaatttgcctggggttaaactctccgcggcgtctcgtgcgttgtttttgcaaaacctatgtcagtttttatcgtggaacgccgttactggtccagttgatattaatattttatgctttgccaacagtagggatcacgctttcaccattgctggcggcggttgtggctctctcattaaataccgcagcctttcaaggagagattcttcgggctggctttaaaatgttgcccaaaggccaactggaagcggcacgagattttggtttttcagcggcgcaaacgctgttttatattcagatgccgcaggtgttgcgcgccatgatgccggctttgattaatgaaaccatcgatattatcaaaaactcggcattggtctcggtggtggcggtccatgagttgatgagagtgactcaaacgctggcctcaaccacctatcggccgctggagttttatacggcatgcggtctcctttattttctgacctcgtgggggctgagtattgttggcaccaggttagagaaaaaccgctcatcttcggctcaaagggtattagcacaatga

SEQ ID NO: 102390 - DNA, 663 bp, Enterobacter aerogenes
atgaatgttgaaatactttttacctataaagatgccattgccgccggtattttaatgaccctaaaaatgagtctcggcggtatcctgctggggctggcgatcgggctatgtttttttcttctcgaaagacaaaaacctgctttatttaatgtgatatatcatgcatggattaatgtgtttcgcggcacgccgttactggtgcagctctttttagtcttttatggtggaccctatataggtattaatctcgaggcgcaacaggtcggggtactgtgcctgggatgttatggttccgcttattttgcggaaatatttcgtgcgggtcgcaatgctgtctcaggtgggcaagttgaagcggcggcagacctggggttaagtccatggcaaatatttactttcattgtctggccgcaaatgctcgcgcgcattatccagccattgattggccagagcgtcattttggtaaaagagtcgtcggtgctatccattattacggtcggtgaactcaccaataccgccatgaccattgctaaccagacctatgcgatggttgaaatctacgccttaatggccattgtctattgggggatcgcgatcggtatctcccgtctgggtaataaaatagagcgccattattcttattctcaattaagccgaggttaa

SEQ ID NO: 102391 - DNA, 297 bp, Enterobacter aerogenes
atgcgatcatgctcgaacatcaaaatcaaaaaaaccataactctcattaagttaacgaacaatcacgaacactaccgttcctctgaaacctctatgttgtatgctcatgatccacgtctgatggcttctaaatttgtatctccttaccgcatggccggaaatcaggcaaaaatgatgcagctgatgcacaggctatctgtgaagcagttcgtcgcccgcatatgcggtttatacccgttaaggatgagagccagcaggcgatgcaatgcctacaccgctcccgtcagggatttatag

SEQ ID NO: 102392 - DNA, 1242 bp, Enterobacter aerogenes
atggctgcagaaaataaactgagtgataggcaactaaaagcgctacagggtaaatcgcagactaagcagcggttgatttcagacggtcgcggaatgtcggcgcgagttagcaagaatggggctgtgagctttgtcatgttctaccgtttgggcggtagggatacttccccaatatggctgactctgggcaagtatccggatatgtcattgaaaatggcacgagataaacgtgatgaatgcagggcttggctcgctgaaggtatcgacccacgtcaccgtatcggcttaatcactgatgtatcggaaaggccagtcaccgtaaaagatgcgcttgattattggttagagtattacgccaagcctaagcgcagaacttgggaggtctgtgaacaacggtttgcccgatacatttatggtcgcctgggggatgtacctctaaccctgtgtaatgctgcaatgtgggtaaagtgttttgatgaagtgagaaaaacagctccggtagctgctggccatacattccgagacgtaaaacaggcactcaagttttgtcgggtacgccgttatgctatctccaacgaactggaagattttaccgttatggatatgggggaaagggctcaaaaaagggatcgtgtactcacagctgatgaagtgagggacgtttggtattgggcgaatactgaggaaaacaattccaaattatcaccagttaacagggtgacacttgtcataatgatggtattcggttgccgtggtcgtgaattgcgggagtcgctctggaatgaatgggactttaaagagtggatttggacggtgcccaaagaacacagtaagaatggacgcgaaattattcgcccaatccccccgcaaatccgtcaatggcttgtaaaccttcgtgcaattgcagaggaggagggcaccgagcgcctacttaatggtgaatttgcaaaacagacagttatgagcacggttggtagccgtttctggcgtaagttcaggcatgaaaaatcatggtgcctgcatgaccttcgtcgagttctagcaaccaatctaaatgacatgggggttgatccccatgttgtcgaacagctcttggggcatacgctaccaggggttatgggaatttacaatcgtagccaatatctggcggcaaaacttgatgcactgacgagatgggtagactacctgaattcgttgatccgttcagatgctaaggaggaaagttccaatgggctttgttga

SEQ ID NO: 102393 - DNA, 141 bp, Enterobacter aerogenes
atgtacagaatgaagcagttgttgggagattcactgacgctgcgtgactacgatggtcaggtagcggaagctatggccatggtgcgtgcgttgaacaggatgacaaaggctgggatgccagaaagcgtgcgtattgcctga

SEQ ID NO: 102394 - DNA, 819 bp, Enterobacter aerogenes; identical to SEQ ID NO: 95495

SEQ ID NO: 102395 - DNA, 1200 bp, Enterobacter aerogenes
atggtaagacccatagccctgattgatgggaataatttctatgtttcgtgtgagagggtgtttcagccgcacttgctaggcaagccggttatcatcctgtcaaacaatgatggttgtgccgtagcacgatcagaggaagcaaaagccctcggtattaagatgggtgcgccgctgtttaaaatccgtgagctggtcaaagaacacggcgttaaagtgctatcctcaaactatacgctttacggagatatgagccgccgtgtcgtggatgctgtgagccagttttcacctcattacgaaatctattcgatagatgaaaactttgttgatttgtcgggctttggtgatcgttatgaagccattgccgttgatatgcgagccaccgttagacaagtgaccggaatccctaattgtgtcggcattgccgagacaaagacacttgcaaaacttgccaattttgccgccaagaaaaacccgatttttggcggtgtttgcgacttcacgcaaccggcagtattggcatggtgtttagaccggattccggttgctgaagtgtggggaatagggcggcaaacacaaatcaagctggcatcacaaggaatagcaacggcggcacagttgcgcgacatgccgcgcacacttgcacgtcaactcggtacagttgtcttagaaagaacagttgcggagcttcagggcatccgctgccttgagatcgaggacattgcaccacaacgcaagggcatggctgttacgcgctctgctggtgcgcctatgcgcgatttagaggctgttatgcaggcactcaccgcccacgcttcccgtgccgctgaaaagcttcggttgcatggattagttgctggtcagatcacagcgttttttcacacaaacagtttttcaaaaaacgccgcgcagcactcggtatcaagaaccgtaaagctgaagcccatgacgaataatacattcgatcttgtgcaggctgttaaccggtgcgcccgtgctggttggcatcctaaagcgcatgagcatggctatagctatacaaaggcgggtgtgatgctcgatgatcttctgaaggcagaggacgcgcccaaaatgctttttgatatagtgcagccccgtgatgctcgcctaatggaagcaatggacgcaattaatgaccgatacggcaaacgcaaggttgttatcggtgcgcaaggctggtaa

SEQ ID NO: 102396 - DNA, 132 bp, Enterobacter aerogenes
atgaaagttttgcgctcgcttgtgatcgaatacaatgtgaatccggcgtggttcttacttggaaccggcaatttttcatatctgcctgaagctgaagaaatgacaaacatcgcggccaagttggaaatttga

SEQ ID NO: 102397 - DNA, 831 bp, Enterobacter aerogenes; identical to SEQ ID NO: 36219

SEQ ID NO: 102398 - DNA, 312 bp, Enterobacter aerogenes; identical to SEQ ID NO: 49033

SEQ ID NO: 102399 - DNA, 408 bp, Enterobacter aerogenes
atgcagaaattcagcgacccgatggccgcccgcgcactgcttcagtcgcagcagaactccgacgaggcgctcagtatcaagcgcgatgctgatccgacgtttgatttttgcggctatctggagatgctgccgcagacaaacgggatgtttatgggtaatgccagcgtcgtcccgcgtaattatcgtaaatatctttatcacgcgtatctggcctatatggaggctaacgggtacaggaatgtgctcagcctgaaaatgttcggactggggctgcccatgatgctgaaagagtacggcctgaattatgaaaagcggcacacaaagcaggggatacagactaacctgacgctgagagaggaaagctatggcgactggctgccgaaatgcgatgaacccgcagcgacataa

SEQ ID NO: 102400 - DNA, 1269 bp, Enterobacter aerogenes
atggcgttaacagatatcaaggtcagaacagccaagccaacggataagcaatacaaactgaccgatggcagcggtatgcacctgcttgtccatcctaatggttctaagtactggcgtttgcagtaccgttatgacggcaagcaaaagatgttggcacttggggtttatcctgaaatcacactggcggatgccagagcacgtcgagacgaagcgcgtaagctgctagcgaatggcgtcgatccgggagacaaaaagaaaaatgataaggttgaacagagtaaagcacgaaccttcaaagaggtggcgatcgagtggcatggcaccaataaaaagtggtctgaagatcacgcccatcgtgtgctaaaaagcctggaagataatctcttcgcagcgcttggtgagcgtaatatcgctgagttaaacactcgtgatttattagcgcccattaaagccgtagagatgtctggacgtcttgaggttgcagctcgtcttcaacaacgtactacggctatcatgcgttatgcagtgcaaagcggtctaattgattataacccggcgcaagagatggcgggggcggtagcttccagtaatcgacaacatcgtccggcgctggagttaaagcgtatcccggaattacttgagaaaatagacggctataccggcaggccactaactcgttgggcaaccgaacttactctgcttatttttattcgatccagtgagctgcgttttgctcgttggtcagagatcgattttgaaacgtcaatgtggaccatcccgccagagcgagagcctattcccggcgtgaaacattctcagcgaggatcaaagatgcgtacacctcatctggtgccgctttctaagcaggcgctggcgatcctgaagcagataaaacagttttgtggtgataagcatgagctgatttttattggcgatcacgatccccgcaaaccgatgagtgaaaacacggtaaacagtgcgctgcgggtgatgggctatgacactaaagttgaggtttgcggccacggcttccgtacaatggcctgtagttcgttaattgagtccgggctatggtcgaaggatgcggtagaacggcagatgagccacatggaacgcaattcggtgagggcggcgtatatccataaagcggaacatctggatgaacgcaagctgatgttgcagtggtgggccgattttctggatgccaatcgggagaggggggttacgccgtttgactacgcaaagatcaaccaggggcatggtgagtga

SEQ ID NO: 102401 - DNA, 876 bp, Enterobacter aerogenes
atgacctctgacaaaaccctaaagcaagcgatatcaaatatcactatctggcgcaaaggcgaacagcgtgcgccacataagccattattgctgctgcacgtcctctcacactatcggcagggtcatgatcgcctgtttaactatggctctgaaatctacgagcccctgttggatctcttggaacgttatggaccgcagcgccgtgaccagcgcccggacatgccattctggcgtctgaagggcgatggcttctgggaactacaaaatgcggaacggtgctcaaccaatggtagccgccagccaccccgacgtgaactcatcgaatataatgtcgcgggtggatttgatgccgataattttgcgttggtggcaaaaaatcacaggttaattgatacgctggcgcagcagctcctggaggcgcatttcccggccagtcttcaggaagacatcgctgacgagatgggctttgatattcgcacctctctccgtcaacgcgatccgaagttccgtcagatggtgctacgtgcttacaattatcagtgcgcgatctgcggcttcaacatgcgccacgacaatgcgccgattgctctggaagctgcccatatcagatggaagcagcaccatggcccttgtgaagtacctaacggcctggcgttgtgcgcaatccatcataaagcgtttgatcgtggttcgattggtttggatgaaaatatgcgtgtgattgtttccgacgcggtaaatggtggtggggtggtacagcgactgttctgggattttgcagggaagacgatcgcgctgccaccggttagcgataatcatccgggtgagcagtttgtggaatggcacagggaagaggtgtttagaggagagcattga

SEQ ID NO: 102402 - DNA, 459 bp, Enterobacter aerogenes
gtgcgcattgcttttgacggcgacgcggtactcttttccgatcaaagcgagttagtatataaaacacaagggatggctgcctttcatgctcaggaagacgcgcagcaggatattcctatggaagaagggccatatgccactctgttaaaaaaaatagccaagcttcaggaacgactgccaacccgcgttgagtattctcccgtccgtattgcactagtgacggccagaaacagcccatcagaaatgcgcgtcattaaaacgctcagaagctggggagtatatgtcgatgaggctttttttctgggcggtgtagagaaaacaaaagttctgaaggcgtttaagccacacattttctttgacgatcaggatgtgcatttgatcgcggctgcaaaggtagtaccttccggaaaagtcccttatgccagtaactccgaacttgcagaacgtgaagcatcgtga

SEQ ID NO: 102403 - DNA, 246 bp, Enterobacter aerogenes
atgtcgaggaatagccctgatacgggtatccgcgttctgaatactatccgccatgacaggctcgatatcactcgctctgcctttaccgcaggtgaaactgttgccgattaccttgatgcttttgatgtggatctgtttttaacgaccaacgttgaagatgcgcaaaaggttattgattctcggttttgcgcggcagcaatattaaaagacccaccttccgacgcctccgatatcccggaggggtaa

SEQ ID NO: 102404 - DNA, 927 bp, Enterobacter aerogenes
atggtcgctaaattgcctttacctcaatataactctattacggtacttagaactatcatttcagaacgagagtggtataaagatttttataaaagcttaacaaatgattgggtgtcacatgtagaaaactatctggaacatcatggtgaccctcgttttattacacctatcgatctgtcgctatatttatcagaagaatcggtgcgaaaagaggaaaaaaaaacaactgatgctaatagacatatatcacccaaagagagattgagagagaaaagaaaacaaactcttattaatttatactctcctgatgagggtaaaacaccttacgatattcttgaagagttaagacgagggcataatctgttattttgcccgtgttgcggagaacctggaaagccaacaacattagatcattacttgcccaaaactatgtatcctgaattagctgtaattattgctaacctaacaccaatgtgtaatgaatgtcagcagaataaaagctctgattattttgatgagaatagaaacaagatttacatacatccgtattttgaccctattgaacaagttaacttaagcattgatataaaagagccctatgctactccaacattcgaactgaccatccttgagaatggggataataacgagttttatgaattattaaagcgacacatcaatggtgttaaattttcagaacgatttgatgaattctgtcgaaatgaatatatggcgttattacgcacgatgtcattagaacgtcaagatgctgaacctgatagagcatcaaaaataatacgacgattcaagcgtcaacatgaaagtcagtctccaaacagatgggaggctatattttacagagggattctaaataatacagaaatacttgattttctggataatggtcatttacctgattatacttaa

SEQ ID NO: 102405 - DNA, 1008 bp, Enterobacter aerogenes
atgggggaacaacgcatacttgaaaaaaataagcatattccatttgatgaacgacctaatataagtaagcttgttcttgtttcttatagcccttttgaagagttcagcttagatcttgaaaaagacaatttacaagataaaaaggcatatcaatattttggcttcaggcaaatgagggataatggcaaaattggtatcagtcgaaacttaccagctttgaattcaagtgagtcattacttgaaatgatatctgatgataagaaatacaaattcattgaaaacagaataaataaactcaactcagtcgattctgcactcaaatccgctattagctatgattattgtgttctaaggttatctccagaagataactcaacctatcttgggacagatattgtcataattgatgatgaaaaatatcttcctgccgaaaatattgtaaaatgggctgatcacctagatttaataaggggttccgtactgttaaatgatggtgtaatctttgttaaagatggaaagattgtacatcttagttctggtcaacgattatttgtatatatagctataaatgttgtcggtgcaatgaaagaaaatagcttaattgtgattgatgaacctgaattgtttttacatcctaaccttgaaatagaattcattgggctactaaaaaaattacttaaaccgtttcgctctaaagctattctagctactcattccctatctatcacacgtgaagtaccgtcaaaatgtgtacatatattccgctacaaggatgacgaacttgaaatagttcccccaccatttgaaacatttggcggtaatgttcagagaatttcttcttatgttttcggcgataaatcgatctctaaaccttttgatgaatggcttgagatgcagcttcaagatattaaagatcctaaaaaattaattgaaatgctgaacgaagaaattaacgaagaaatgatcatgaaaatcatgagtttagggagaaaatatcatggtcgctaa

SEQ ID NO: 102406 - DNA, 546 bp, Enterobacter aerogenes
ttgcttaacgtgagttttcgttccactgagcgtcagaccccgataagcaccgtcagcgcccccgtttgcccgccagcgttgaggataagcaccgtcagcggtcacgtttacccgccagcgttgaggataagcaccgtcagcggtcacgtttacccgccagcgttgaggataagcaccgtcagtggatccgtttacccgccagcgttgaggataagcactggcagcggccctgtttacccgccagcgttgaggatgagcaccggcagcggccctttttgcccgccagcgttgaagatgagcaccggtagcggatccgtttacccgccagcgttgaggataagcactggcagcggccctgtttacccgccagcgttgaggatgagcaccggcagcggccctttttgcccgccagcgttgaggatgagcaccggtagcggatccgtttacccgccagctttgacactaccagcgactacagtcgacattaaaatcgccgtgacctgctgcagcgtgatatacgcccggctggcatcaaaagaatcttaa

SEQ ID NO: 102407 - DNA, 306 bp, Enterobacter aerogenes
gtggaatatagctctataactgatgtcagaaatcatatcgatcagatagacagtgagctggtcaaactcatagctcagcgtgctcaatgcgttaaagctgcagcggcgtttaaaactgatcaggcatccgtgcgtgcacctgacagagtacaacagatcatcgaccgggtacgtaagcaggccactgaagcaggacttcccgaaacgattattgaaaaaacctatcgggcgatgattggcgcattcattgattatgaactcgggcaacaccagcagctgcggaagacgaaatccggccctgaataa

SEQ ID NO: 102408 - DNA, 561 bp, Enterobacter aerogenes
atgtttattaaaaaggatggtcgtcgtcgtttgtttatacttgatgaggcctgggagtatatcggcgaaagtaatggtgatgatgctgctgttaacttttttactaaattccttgaagcagcatggcgtcgtttccgtaaaacaaactgtgcagggatctgtattacacagagcttcgaagacttctacaagtcgccaatcggtgtagcgatagccaacaactcaccatggaaatttattatgaagcagagcccagaggcgattgattcaatggagaaaaataaatatatttcagcatcagcatcagaatatgaacggatgaagatgatcaggactgtaaagtatgttttttcagagattatgattcgttttgagaacgtgcaacaaatcgtccgtctttatgttgatcgtaaaatggaactttgttttactacagacccgtctgaccgacgtaaaatatggaaccttgttaatgacggatatacgtatgccgaagcaattgacagggtttatgaagaagagctagtacagttaggcatgaaaacaaggcaggttgcttaa

SEQ ID NO: 102409 - DNA, 822 bp, Enterobacter aerogenes
ttgaatttgtttcattatactgatttaaatggattgaaaggtattatagaaaataattctctatgggctacgaatttgtattttcttaatgacaggaatgaagcggttcatggttttttatgttttgagaatacaatccagtatcttgatgagaagattatttccgcaggaaagaaaaagattctacaggatgcgttggatatttgtaaatctaatggcggacatggtgggggaactaagggaacgcatatttacagtatctcattttgtatggactcagataaattaagccaatggagaggctatggcgcgcatcaaggggtctgtattgagttcgacaaagaaaagctaattgatggtttggatgttagcgatatgactttttttcataatgaagtcaactatactaatgaatcaagtacagttaaaatgaatgaaagcataaataatttcttttcagaattaaatttgaggcccgagacaatagatgatgacttttcatggtttgtaagttcttatggattaataaataaagtgaccccattttttaagaatgatggtttttccgaagaaaatgagtataggtttgttttttttcctggatataaaattccgaatgttctttttagggtgaataataacggattggttccgtacataaacgttgaaatgaaaaagagagtaaaattaccaattaaacgtgtgataattggaccagccaaggattttcaatttgtttttaatggcgtcgagatgttattggataaacatggatataaggaagtgcttattgaaaattctaaggtttcttacagaggttga

SEQ ID NO: 102410 - DNA, 795 bp, Enterobacter aerogenes
atgctcatggacccgcaaagccttgtcgctggcgctcatggcggtaaattctgcctcgctcatggtatcgaacggactttgcgccggtggccggatggcgtcataaatggctttgcgcgtggcttcctcgccgtactgtataaacgcatcattccagtcaccgaacaccggcggcagggcaacaacgccctcacaggcgtctgcggcctctgcggctttattctggccgtcgccgttcaggtcacggtcggcggcgaggacaatctgacaggccggatatttctgacgggcaaggctcgccagagaaaggaggttcacggaggacagcgccaccatgacggtttccccggtcaggtgatgcacggtgagtgcggtcgcataaccctctgcaatccacagacgttttccggcctgttttttcccttcgatgacatgacatgcccctttgacctgaccgcctttcagggtgcgtttgaggccgtcagcattgataagctgaaggttaaccagtgtgccggtatcctcatacagcgggacaaccacatccccggcgcggaacgtcacgccgccggttttatgcatgacggtgagcgtcagacattccagagcagggaaacccttgcgggtgaggtaggcgttgccggtggccggtcgggttttctccatgagcctgacggccagcgcggccgccgctttgcggtcggccacagtttcggcctctgcggccgcaatcacttccggggcaaccggcgacagattgccggtcacggcgttcaccttcccggcggcctctga

SEQ ID NO: 102411 - DNA, 624 bp, Enterobacter aerogenes
atgagaattaaaaagcctcaccttcgtccgatagtcataaccttgtccgttggtggtatttttttgacttctatttttatgatagttgtcattatgttttatcaacacgaaaatatagaaaaagatatgcttgatgctaattcatcgtacgctatgaaaatgtcggatgtaatgagcatttatattgaaatggctcagggcgaactagcatatggcgctaagaaaattgaatcaacgactgatgttgaatatcttaaaaatgaggctgataggctaagattgcagtccggcatgtttaattcagttattgttgttagtaatggcgctgttgttctggcaacttctccagaatcacttgatttagttggtgttcacttgaactcaagtgtcagtaaattggctattgagggcaaaaaggcatttatatcgcaaccttacaaatcagttgctgggaatttgattgttttgttgtcacatcctatttatgataagagtagtaattacatagggtatatcggcgggtctatacatctaaaaaaacagagtttatttagcgatgttttgagtaggcattttttaatggcgacactgaaattaccatcgttagtgatgatggtaatgtga

SEQ ID NO: 102412 - DNA, 750 bp, Enterobacter aerogenes
gtgctggtcattaaacgcgtgttcaggttgaccctgcgggctgcacagggttttattgattccatttttacactgatgaatgttccgttgcgctgcccggattacaccagtgtcagcaagcgcgcaaagtcggttaatgtcagtttcaaaacattcacccgaggtgaaatcgcgcatctggtgattgattccaccgggctgaaggtctttggtgaaggcgaatggaaagtcaaaaagcatggccaggaacgccgtcgtatatggcgaaagttgcatctggcagttgacagcaacacacatgaaatcatctgtgcagacctgtcgctgaacaatgtgacggactcagaagccttcccgggtcttatccggcagactcacagaaaaatcagggcagcatcggcagacggcgcttacgacacccggctctgtcacgatgaactgcggcgtaagaaaatcagcgcccttatcccgccccgagaaggtgcgggttactggcccggtaaatatgcagaccgtaaccgtgcagtggctaatcagcgaatgaccgggagtaatgcgcggtggaaatggacaacagattacaaccgtcgctcgatagcggaaacggcgatgtaccgggtaaaacagctgttcgggggttcactgacgctgcgtgactacgatggtcaggttgcggaggctatggccctggtacgagcgctgaacaaaatgacgaaagcaggtatgcctgaaagcgtgcgtattgcctga

SEQ ID NO: 102413 - DNA, 384 bp, Enterobacter aerogenes; identical to SEQ ID NO: 51105

SEQ ID NO: 102414 - DNA, 492 bp, Enterobacter aerogenes
atgtatatcggtttgccaaattcagacctgagtgaggaggcatataccttcactaatctggtcattaaaccattgtatgaatatacacgttggatacatcttttacctgcgtctgaaaaccatcaccacgccgggacagggggtctgttaacgcacagtttagaaacggcttttcttgctttaaaattcgcgtacagtacggaattactccccattggtctgcaggatgaagaacagacccgtaaacgtcgttatctatatgcggcctttatttgcggtctttttcatgacgcaggcaaaatatttgatgtcgacgttatttcgtccacccctggtgttaaaagcacatggcgtccgctctcctccagcctgatggactgggcaaagtccaaccgtattttttcctatgaagttatctggcgcaaaaggcaggctaacgagcattccgtgcgggcaccagcatcatccccatctgtaccacgaaggtggtga

SEQ ID NO: 102415 - DNA, 216 bp, Enterobacter aerogenes; identical to SEQ ID NO: 5123

SEQ ID NO: 102416 - DNA, 138 bp, Enterobacter aerogenes
atgaatcacgatgaatttgatgatggtcgttgcggtatgtcccgccggtgctggcgaaacctgacccgcatctgcattggcttgatagccatatacctgctgattgccttgtttgtgatggaggtcttccatgattag

SEQ ID NO: 102417 - DNA, 252 bp, Enterobacter aerogenes
atggggcaaatggtggtcaccatcctgtcggctgtggcacaggctgaacgccggaggatcctagaacgcacgaatgagggccgacaggaagcaaagctgaaaggaatcaaatttggccgcaggcgtaccgtggacaggaacgtcgtgctgacgcttcatcagaagggcactggtgcaacggaaattgctcatcagctcagtattgcccgctccacggtttataaaattcttgaagacgaaagggcctcgtga

SEQ ID NO: 102418 - DNA, 141 bp, Enterobacter aerogenes; identical to SEQ ID NO: 36145

SEQ ID NO: 102419 - DNA, 315 bp, Enterobacter aerogenes
atgattaccttccttggggcatcttatagccggctggttgcctcctcggcggtggcgattcgtttcccggacgataactggcgcgcgggatttaccactctgcaaggcggtgtcatgtcattcagtacggcactcgcttttatgctctgctcactgtggctggccgacggcgagatgagtcagcaggcgtctacggggttgattgcatttagcggcgctagcgccttgctgctgccatgtttactgcgctatcaagaaaaaatactcgtacgcaacgccgccgaacgggcaaccggcggcgttggtgagctttaa

SEQ ID NO: 102420 - DNA, 3873 bp, Enterobacter aerogenes; identical to SEQ ID NO: 102335

SEQ ID NO: 102421 - DNA, 381 bp, Enterobacter aerogenes
atgaaaaagagcattgcactgacgatggtggcgctggcctgcctggcggctaacgtccaggcagcagagaaacttgctggtaatgaaatacttgccgtacagaaaggcggggtgccggataaagtctatacccaacatcagccgaaattacgtatagcaacctataatatcggcaagaatgaagcgtctgataatgtggccgattttacggcacttaattcagcgattaaaaaaattaacgccgatattattgccgtcccggaagtcgatcacaaaactcagcgcagccagaaaatcgatcagcttaagacgattgccgatgctaacaatatgcattatgcctttggtaaagcgggtgatgctgccaacttactgatttag

SEQ ID NO: 102422 - DNA, 477 bp, Enterobacter aerogenes
atggatagttcgtttactcccattgagcagatgctcaaattccgcgccagccgccatgaagatttccctttccaggagattctcctcacccgtctctgtatgcacatgcagggtaagctgctggaaaaccgtaacaaaatgctgaaagcgcaagggattaacgagacattatttatggcgctgataacgcttgagtctcaggaaaatcacagcattcaaccttccgagctgagctgcgcgctgggttcgtcacgcactaatgccacccgcatcgccgacgaactggaaaaacgcggctggatcgaacgtcgtgaaagcgataacgatcgtcgctgcctgcacctgcagctgaccgacaaaggtcatcaattcttgcgcgaggtattacctccgcagcacaactgtctactgtctacatcagctgtggtcttctttgagcaccgcggaaaaagaccagctggagcacatcacccgtaa

SEQ ID NO: 102423 - DNA, 471 bp, Enterobacter aerogenes
gtggataagactcactcttcgaccccgccagagagccacgaaagccgctttcataaagaagagttccccttcttctgggtggttaacgtttacgcccgttatacccaattaatggaaatcgagctcaaaaaaatcgacatcgacctttcccgcttccgcgtactgatgctggtgcaccaataccaccgcgccagtatttcgcggatcaccgaatatgccgttagtaagatgccgacggtgaccaaaattgttggccgtctgcgcgatgatggcctgctcacgacccacgttagcgtcagcgatggccgggtcaccgaagcggaactcaccgccgccggtgaagccaaggttgccgaagcccgggcattagcggaaaccgtgtttgctaaagccttcaagggcgtcaccccggcgcaggaaaaaaagatgaatcaggtgctggcgctcattctgcacaacctcgatgactga

SEQ ID NO: 102424 - DNA, 246 bp, Enterobacter aerogenes; identical to SEQ ID NO: 102403

SEQ ID NO: 102425 - DNA, 438 bp, Enterobacter aerogenes
atgttaaacccgtttgttcagaacaaaacccacatatccggagtgtgtcgggccataaagcggggtgatgagggtattgttaatgttgtgttactgacgggctccagtaagtttatggtagacccagtaccggagtggttgtgccgtaattgtgatgacctcggtaacaagttcactgcgtacgatgctgagcccgtgtttagtgttgaggagactggctggatcgaaaatgacctgcgtaaagcaatgctgccgcagacgctgttgaccgacctgggtcacgtctattcactgaaactgaaacaccgacaaccaatatctgtaccgcacagggtgacctattttacgctactgaccaccaccctgttcttccgtgcgctgaaaaagttattttcgcgtaagcgctcagaggtcatccacaagcagtaccgtgaatag

SEQ ID NO: 102426 - DNA, 153 bp, Enterobacter aerogenes
atgctccagacgaaacagcaggcagtgctcgacggctttcgccacgtattttttcacggagctgacggaaacaccgagtttgtgcgcaatctcgctgtatgtcaggccatccagttgcgaaagcagaaacgcttcacgtgtttttccgtttag

SEQ ID NO: 102427 - DNA, 177 bp, Enterobacter aerogenes
gtgcttctcaagataggtgacgccgaacgtcacgatgtcctgcgcgtcgaacaggtagcactgagcaaagcccacgacaccttctcgatggcgaccgagcttcacgtaagcatttgctatagtttcgaccgcatccggctttccttcgatagcaaagcaatcgagaatgccgtttga

SEQ ID NO: 102428 - DNA, 1263 bp, Enterobacter aerogenes
atgaaaaaaagcaccaccattccattaacgccattacagaaccaggggcgctatctgcccgcctataaacgccgctatcacatgatggcgaaacccagcggctccacctgcaacctggactgtcaatactgtttttatctgcataaagagcagcttttacatcagccgcacgacaaaggaatgagcgacgaggtactggagaatttcattcgtcagtacatccaaagccaggacggcgaagagattattttctcctggcagggcggcgagccaaccctgatgggactggagtttttcgaaaaggtcgttgagctgcaaaagaaatatcagccgaagcaccagcgcattgagaacgatctgcagaccaatggcgtgctgattaacgataagtgggccgccttcttgaaggcgcataacttcctggtcggggtatcgatcgatggcccgcgcgagatccacgatcgcttccgcgtgacgcgcagcggcaagccgaccttcgataaggttatggaagggatcgcggcgctgaagcgccacggcgtgccgttcaacgcgctggcagtcgttaaccgggtgaatgcccgtttcccgcgcgaggtatatcgttttcttacccgcgaactcggcgccacctatatccagtttacgccctgcgtagaggccgccgagtttaaaactaccgcgccgcagttctggcgcgaagagacgatccccatcaccggcagccgccgggcgaaaccgggggatctggattcaatcgtcaccgactggtcggtggatccggacgattggggacattttctgaccgaagcttttgatgagtgggtgacctgtgatctgggccgcgtgcaggtaaatttgttcgaaaccgccgtggtacagactatggggcttccatcccagttatgcatcaccgcgccgttttgcggcaaggcgctggcgattgagaaaaatggcgacgtctactcctgcgatcactacgtctacccggaatataagcttggcaatattaaggcgcataagctggcgcatatggtcttttccgagcggcagaaagtgtttggcatgggcaagaaagagacgctgcccgcctactgcaaaagctgcccgcatctgaatttatgctggggcgaatgcccgaaaaaccgcatcgtgcgcgccccggacggcgaagaagggctcaattatttgtgtcctggctttcgccatttttacgcgacggttaaaccgacgcttgagaagattgccgccatgctgaagtag

SEQ ID NO: 102429 - DNA, 996 bp, Enterobacter aerogenes
atgaaaaaaacagtactgctcagcatgctgctattgagcttcaccagcgcggcagccaccgatatgctgccggcatggaaagatacccctgctaaacaggcgattgagcaatgggtgcagggggcgacgcgtgaaggcggggcggactttattccgctggataagcgctacgtggtttttgataatgacggcaccctgtggccggaagcgccgctgactttccaactacagttcgcggtggatgaagtgaaacggctggcgcccgaccatccggagtggaaaaaggatccgctggtggcggcggtactgaacaacgatttgaaaacggtagcggcgggcggcgaaaaagggttgctcaagctgctggcgttaacccatagcggcatgaccaccgaagagtttagtcagcgggtcagcgcatggtttgacagccatcaggataaacgtaccggctgccgctatgaccagttaggatatcagccgatgcgccaactgctggactatctgcgcgccaatggttttaaaacgtggatcgtttcaggcggcgggattgattttatgcgggtggtatcggaaaaaatgtacgatatcccgccggagcaggttatcggttcgttcgcgctcagcgagtttagtctgacggacgatggcaccgagcttcgcaagacgatgaaaggcgcatttaatgatgatgccgcggccaagccggtggcgatccacctgtttatggggcagcgcccggttgcggctttcggcaacagcgatggcgatctggcgatgctgcagtacaccgctgccaacccaaactataaaaccttcgagctgctggtacaccataccgatgcggcgcgggagtatgcctacgacagccatccttccgccagcggcaagctggtgaaaggattgacagaggcgaaacagaagggctggacggttgtcgatatgcagcaggactggaagacgatatacgacccggcgcagtgtcaggcgaaataa

SEQ ID NO: 102430 - DNA, 372 bp, Enterobacter aerogenes
ttgctgtggctgggcaacagctatgctcagcaaaagcagtggcagcaggcgctcgacagctacgatcgcgccctctacctacatcctgactggttcatggcgctgcaaaatcgcgataaaatctcgcagattgtgatgggcattcgccagcaagagcgcgagcgccaacaggcgcagggcgatgcgatggacgacggtccggataagctggtccacgacctgcagaaaaaccagggcatcaatcagcagcaaatcggcgctatcgccggggagagtccgcaggttaatcaatggtttgatgcgctggaggtttcgccaacggggctactgaaaagcctgtatcgcaacggctcgggagataccacgccatga

SEQ ID NO: 102431 - DNA, 123 bp, Enterobacter aerogenes
atgcccggcggcagcggcgtagtcgccgcggcgaaaggcgtgctgcccctgaatatcggggcgaacctaggcatcgagccaggcggcatcgctgtgcggcgaccacagcagcgcgggaaatag

SEQ ID NO: 102432 - DNA, 978 bp, Enterobacter aerogenes
atgtctgaatggctcgcccacattgatttcgcctggccctgggccgcgctactgctggcgctgccgctgctcactcgttttctcccgctaccggcaaaaaccaccgacgagcgcgtgcgggtaccgtttttaccctcgctcattgacgcgctacagctcgatacccggccaaaacgcggaagtggggccagcgccgtgctgttctggcttatctggtcactgctggtttgcgcgctggcgcggccggaatacctgacgccgccacaatatattgccagaccgatgcgcgacatcgtgctgatcctcgatgtctccgggtcaatggcgaaaaatgacgtccagggcggtaatacacgcctgcaggcggtacagcaatcggtgcgcaagtttgtcgccgcccgccaatccgaccgcatcggcatggtcatcttcgccagcaaagcctggcccttcgccccgataagcgaagataaacaggcgctgcaaacgcgcatcaatcagctagcgccgggcatgattggccagcaaaccgctatcggcgatgcgctgggcgtggcggttaaggtgctggataatggccccgataagcaggccgataagctggcgattttactcaccgacggcaatgataccgcttcgcagctgtcgcctgaactggcggcaaagcttgctgccgaccaccatgtccgggttcataccatcgccttcggcgacctcagcgataccagcaaagacaaagtcgatttgccgctactgcagcgcatcgcgaaaaccaccggcggccagagctggaccgccgcgcattccggcagcgcgctggatagcgtctggcaacaaatcgacgccctcactccggcgcaggtcaaaagcctcggctggtcctggcatcaggcgctctatccgtggccgctcgccgtcgcgctgctattgctactgctggccgcctgcggccgtgtcctcagggagaaaatggcatga

SEQ ID NO: 102433 - DNA, 510 bp, Enterobacter aerogenes
gtgctgtataccgaaagtattggcgacgagacggtggcgaagaccgcgggtaaggttcgctcgcgcggtgtggaggtggatctggcgggctcgctcaccgataacctcagcgtcatcgccagctacggctataccgatgccaaagtgctggaagatcccgattatgccggtaaaccgctaccgaacgtgccaaaacataccggttcgctgttcctgacctatgacattcataacgtctataacagcaacatcctgaccgttggcggcggcggccacgcggtcagcaaacggtccggcaccaacggcgcggattattatctgcagggctatgcggtggccgacgtcttcgcggcctataaaatgaagctgcagtatccggtaacgctacagatgaatgtgaagaacctgttcgataagacctattacacctcgtcaatcggcaccaataatctcggcaaccagattggcgacccgcgtgaagtgcagtttacggtgaaaatggatttttaa

SEQ ID NO: 102434 - DNA, 171 bp, Enterobacter aerogenes
atggtaatgctggcctgtgggttcgtttcgcaacagcaattgctccagacatctcttgtgctggattataatcaattaagccattctggacagcatatcgcattattgctgtggttcgttgttgcagacgtgcagctacttctagtcgtccagaagccgcaacagttttga

SEQ ID NO: 102435 - DNA, 492 bp, Enterobacter aerogenes
atgaaaccggtcattttagtgattgatgatgacgtcgcgatctgcgagctgctgagcgacgtgctcggcgcccacgcgtttgaggtggtggcctgccaggacggcggtgaagcgctggcgacggtcgcccggcgcgcagatatcgcgctggtgctgctggatatgatcttgccggataccaatggattgctggtgttacaacagctgcagcgcacgcggcctgagctaccggtgataatgctttccgggctgggaagcgaatcggatgtggtggtcgggctggaaatgggcgctgacgattacatcgccaagccgtttaacgcgcgggtagtggtggcgcgcgtaaaggcggtgctgcggcgcagcggggcgatcggcgcggaaagcctcgtgccgggcggggagcatgggctgttgtttaacggctggcggctggatacccgccgctgtgagctatttaatccccaacagcagagcgtggcgttaacctag

SEQ ID NO: 102436 - DNA, 276 bp, Enterobacter aerogenes; identical to SEQ ID NO: 92046

SEQ ID NO: 102437 - DNA, 246 bp, Enterobacter aerogenes; identical to SEQ ID NO: 92049

SEQ ID NO: 102438 - DNA, 3036 bp, Enterobacter aerogenes; identical to SEQ ID NO: 92070

SEQ ID NO: 102439 - DNA, 381 bp, Enterobacter aerogenes
ttgactgccaaatatccgttacagctgacgggattccactacaagtctcgcgtccactcaacttatggcaacgttgatgtcctgcaggcagcctgccgtcaggagatgtggatcaatccgatcgatgcgaagacgcgcggcatcgtcaatggcaatcgcattcgtattttcaacgaccgcggcgaagtccatatcgaagcgaaagtgacgccgcgtatgatgccgggcgtcgtcgcgctgggcgagggcgcctggtataacccggacgcttcacgcgtggatcaggccggcagcattaacgtgctgacgactcaacgtccgtcgccgttggcgaaaggcaacccatcgcataccaacctcgtccaggttgaaaagctgtaa

SEQ ID NO: 102440 - DNA, 219 bp, Enterobacter aerogenes
atggcaggcttggcccctttcttgaggccggtctatcagattatgcagttacaaaaattagtcaacatgtttggtggggatcttacgcgccgctacggcgaaaaggttcataaactgacgctgcatggtggatttagctgcccgaaccgggatggcacaattggccgcggcggctgcacattttgtaatgtcgcctccttcgccgacgaggcccagtag

SEQ ID NO: 102441 - DNA, 276 bp, Enterobacter aerogenes
atgctactccagatatcggctattattgttgtttgttcccttttttttttatttttcctttaccgttttttggcaaaaaatgtgcatattgtggcaaactccgtcccgcactattttggttattttcactggataaacattattgcgatgattgccttgacaaattcaatgccgacatcagaaataaaaaaaacatgtaagtctcagagtgtggtcaccagagacacctgtaattcaatgagtatctctggattgtggagagcaatctctgtttaa

SEQ ID NO: 102442 - DNA, 9621 bp, Enterobacter aerogenes; identical to SEQ ID NO: 8671

SEQ ID NO: 102443 - DNA, 1431 bp, Enterobacter aerogenes
atgaaagagtttatcgcatacgcccaagacgtgaatgaaaaatcaaaggtggcacaacaacaaaggattgaagaagacaaaaaattagtctatcagcttcttgaatcttatgatcaaaaatcaatagctaaagttctaagagaagtaggatgctgcgactggacaagggaaaccctcagtagatggctctgtgggaaagccttccagaaacctctggtagaggcagaagtgaaagtccttcaaaacatgttgccaaagccccctaaaaatcatcccaattacgattttcgatttatagacttgtttgcagggatcggtggtatcagaaaagggtttgaagaagttgggggacaatgtgttttcaccagtgagtggaacaaggaagctgtacgtacttacaaagcaaactggtattgtgatcctgagcatcatgtatttaactctgacatcagagaaattactttaagtgataaagaaaacgtaagcgaaaaagaagcttacgaaaatatccaaaaagaaattccagatcatgatgtattattagcaggttttccttgtcaaccgttttcacttgcgggagtatctaaaaaaaactcactggggagagcacatggattcgaatgtgaagctcagggaacactgttttttgatgtggcaagaatcattgcgtctaaaaaaccagcaatatttttacttgaaaatgtcaaaaatctaaagagccatgataaaggtaagacattcaaagtaattatgaatactttagatgagttaggttatacggttgctgatgctgagttctcaggttcatctgatccaaaagtgattgatggaaaaaacttccttcctcaacacagagaacgcatcgtgttagtcggatttcgccgtgatttgaatattgatacaggttttacattacgtaatatttctcaatatttcccgaaaaaacgccctacattcggtgaattgcttgaagaaaaagttgatgataaatatattcttactcccaagttgtggaagtatttatacaactatgcaaaaaaacatcaggctaagggcaatggtttcggctttggcttggtctcaccttcaaatagtgaaagtgtagcacgcacgttgtccgcccgttatcataaagatggctcagaaatattgattgaccgcggatgggatatggatcttggcgagatcgattttgataatccagagaaccaaaaaaatagaccacgccgtcttacaccaaaagaatgtgccagattgatgggttttgaagaattaaatggggatacgttctttattcccgtatccgatacacaagcatataggcaattcggtaattcagtagttgttcctgtctttaccgcaacggcgcggttgttgaaaccgtttataatgaaagcggtagaattacgacagcagaaccaagcagcttaa

SEQ ID NO: 102444 - DNA, 1203 bp, Enterobacter aerogenes
atggttacgctttggggaaattatgaggggatctctcagcgctgggcatttatgctggtcaccagcctgttctttatgtgggggctctcttacggcctgctcgatgttctcaataaacattttcaggagaccctgcacgtcaccaaagcgcagtccggtttactgcaggcggcctattttggcgcctacttcctggtggcgctgcccgccggctactttatggataaacgcggttataaagcggggatcctggtcggcttgtgcctgtatgcgcttggcgcgctgctgtttgtgccggcggcgagcgtgaatagctttgcgctgttcctgttcgcgctgtttgtgattgcctgtggattaggttgccttgagaccgcggcgaacccttatgcgacggtacttggcgatagtaaaggcgccgagcggcggttgaatctggcgcagtcgtttaacggactggggcaatttattggcccgctgatcggcggcacgctgttcttttcagctactcagggcgatagcggcgatcagagctcggtaaaaatcacctatgttgctatcgccgtgctggtgctggccatcgcgctgctgttccgccgcacgccgatgccggatattcgcgaagaggagggcagtcagcaagaagcggcgcaggggctgtggcagcatcgccactttaccggtggggttatcgcccagttcttttatgttgccgcgcaggtcggcgtgggtgcgttctttatcaactatgcgaccgagcactggcatggcgtgacaaaccagcacgcttcctatctgctgtcgattgcgatgattagctttatggtcggtcgtttcttcagtacctggctgatggggcgggtgcaggcggcgacgctgctgatggtgtattcgttggtcaatatcgtgctctgcggtctggtgatgatgagtatcgacggcgtgtcggtggtggcgctgattgcggtcttcttttttatgtcgattatgttcccgaccattttcgcgctgggcgttaaaaatatgggcagccataccaaacgcgccagctcgtttatgattatggccatcgtcggcggggcgattatgccttactttatgggggcgctggccgaccgctacagcaccgcgctggcctatgggttgccgctgctatgcttcctggtggtgctgtggtacggcatgagccaacgacgcgcgtaa

SEQ ID NO: 102445 - DNA, 252 bp, Enterobacter aerogenes
gtgaaacttgaagtcgttaaatttggagataaagacggaaagcgcgcgatcgtaagagtaaaaaagtggttcaaggtcaggcattggacggttcttgatgaggaagacgttgacgaaaatcgggcttatcagtggacttgcttagaaaccgggaaatctgagtatgcgtttatttttgccgattatatagaccggttctaccgtgcccagtttcaaaaattgcttaatgaacaggaggattgccgtggctaa

SEQ ID NO: 102446 - DNA, 780 bp, Enterobacter aerogenes
atgaacgcactctctgttttctcgtttcaggaaagccaccccgttcgggtggttctggttaatggcgaaccgtggttttatgcttccgatatctgcagggctattgatatagcgaaccatcgcgatgcagtacgtaaacttgacgaagatgaaaagggcgtcggttcaaccgacacccctggtggtgagcaggaatcagtaattatttcggaatctggtctctatacgctaatcctccgctgccgcgacgcggtgaagcagggaacgacagcctggcggttccgcaagtgggtcaccaatgaggttctgccagccattcggaaaagcggtgaatacagctacgtcgaacccgcgccaaaaagcgccggtgaaccgttggactggcggcaaaaggaagaattacgcggcctgataaacgatatagcccaaagttttcgttaccacaacgcatggaaaagtggtgtatggctggcgctacgtcgcgcctgcagaaacccatcccccaatccgattacggttgatgatctcccagccatcactgccgagttgcgccggatattaacgtctgcagaaaccgcgctggataatatgcgggcctacgagcgggaatttctgcgtgaggtagttcgcggtgcgcgtcggagtgtgtcgcgtgaggaattgtcaatcatcgaccttggctcagaggtggagaaggtgctgccagcgcatttcgagctggccatcaataaactggaggcgttatccacaaaattagaggctcctgccgtctcttcctga

SEQ ID NO: 102447 - DNA, 927 bp, Enterobacter aerogenes
atggcatccctgaaagatgtagcgaagctagccaacgtctcactgatgacggtatcccgcgcgctgaacagcccggagcgcctgaaggcggaaacgctcgcccgcgtacaggcggctatcgaacagaccaattacgtccccgacctgtcggcgaagaaaattcgcggcgcccgggcaacgccgagcaccatcggcgtgctggcgctggatacggtgaccactccattctcagtagagataacgctctctatcgaagagacggcgcgggcccacggctggaacagctttgtggttaacatgttctcggatgacaatccagatgccatccttgacctgctactttcccaccgcccggacggcatcatttacaccaccatggggctacgccaggttccgctaccggcgaaattgttgacgctgccctgcgtgctggccaactgcgaaagcctgaacgagaacgtcgccagctatattccggatgatgagcaaggccagtacgacgcggtgaaagcgctgctggccgccggctatcgccgcccgctctgtttgcatcttccggccaggcatctggcgacgatacgccgccgacaggggatggaacgcgcctgccgcgaggcgcaggtcgatccggatacgctcgatcactgctatatgacctacggtgacgaacactatcgcgatattcccggccagctgctggcccatattgatcagggtaaaccgcggtttgattccgtagtgtgcggtaacgatcgtatcgcttttatggtctaccagacgttgctggcgcagggcttgcgaatccctgaagatgtggcggtggtgggttatgacaacatggtggggattggcgatctgttcctgccgccgctgtcaacggtgcagttaccgcattatgaaattggccgcctgagcgccctgcactga

SEQ ID NO: 102448 - DNA, 636 bp, Enterobacter aerogenes
atgctgcgcgagcgcttcaaatactactgcgagaaagtggtgaaaggcttttataaagaccactttctgcgctttgaccgccagattgtgttggtggactgtctgcagccgttaaacagcgggccgcaggcgtttaatgatatgcgtctggcgctgacccagttgatgcaaagcttccattacggccagcgaacgctgtttcgccgcctgttttcaccggttattgacaagctactgtttgccgccactaaagccgatcacgtgaccgtcgatcagcacggcaacatggtgtcgctacttcagcaactgattcaggacgcctggcagaatgccgcctttgaaggcatcagcatggattgtctggggctggcatccattcaggctacccagggcgggcttatcgaggttaatggtgagaagatcccagcgctgcgcggcgatcgtctgagcgatgggcaaccgcttaccattttcccgggggaggtgccggcgcggctgccgggccaggccttctgggaacagcagggcttccagtttgagaacttccgcccgagagcgatggatgtcgataaaccgctaccgcatatacgccttgacgcggcgctggaatttttgattggagataaattgcgatga

SEQ ID NO: 102449 - DNA, 228 bp, Enterobacter aerogenes
atgtataccatatgcctgttcaaaatatttgaatgcattatggcctacgacgacagtacgcttttcctgtgggatcgtagcgacagtcttaataattttattttccagatccgcaagttttgcatcataagcacgggcattagcctgataaaaatcacaattacttttatcttgtgcacaaaaggcttctgcaatatttttcacatatattctggaattccctactga

SEQ ID NO: 102450 - DNA, 651 bp, Enterobacter aerogenes
ttgggaagaaatgacctgcttattcgcaccttccctaaggctttcgatccggcgaaaaaactgacggctgaacaggcggaaaacctgaaaacgctgctgcaatatagcccgtcgagcaccaactcccagccatggcactttatcgtcgccagcagcgatgaaggtaaagcccgcgtcgcgaaagcagccagcggcacctatgtgttcaacgaacgtaaaatcctcgacgcttcccacgttgtcgtgttctgtgcgaaaaccgcaatggacgatgcgtggctggaaaaagtcgttgatcaggaagatgccgatggccgttttgccactccggaagccaaagccggtaaccacaaaggccgcaccttctttgccgatatgcaccgcaaagagctgaaagatgacgatcagtggatggcgaagcaggtttatcttaacgtgggcaacttcctgctcggcgtggcggcaatgggtctggatgcggtgccgatcgaaggcgtcgatttcgctatcctcgacgaagaatttggcctgaaagcgcaaggttataccagcgtggtcgtggtgccggtcggtcatcacagcgtggaagacttcaacgccgcgctgccgaaatcccgcctgccgcagtccaccaccatcaccgagatctaa

SEQ ID NO: 102451 - DNA, 648 bp, Enterobacter aerogenes
atggaaagggagcttatggtcgttgaaaattgttcaggaaaatcagttgattaccaaattcacgtagggattgactatgctaaagtggttgacttgcagagcaaatggggtgcctatcgtgctgatttattgtcagctctaattactgctaaccccggtatggccactgataacgagttagcaaggaaaattctggcagataacagcctttctgattggcattgggactggtgccgcaagcttttgcaatgtaatggtgatgattatcagtggttttttctgcaaataaacgacgcagttcaaggtgtttgtgttctttaccatccaaaagaaagtcgatttgataataataaaattttctacgtggattatattgcaacagcatactggaatcgtcctcgtcctaactttacccctaaatatagtggagtaggcaaagagcttatccaacatacaattaattatgcctgttcaaactgggggtatagacctggtttttgcctacatgcactcccaagtgcagagggtttctataaccatcttggcatgactgattttggcgtcgaccatgaaaaagaaaatctccgattttatgaggcatcacaggttgtcgcatcaactctcggaggaatttcaaatgccgcatga

SEQ ID NO: 102452 - DNA, 135 bp, Enterobacter aerogenes
atgggcatcgccattagggccgacaatagtacgcagttcgatgcggtcccgaccgatgttttttgccatatcgccaataacagaaaagcttgctatgacattaattttcgctttcgccgggaaagtaaaaagtaa

SEQ ID NO: 102453 - DNA, 645 bp, Enterobacter aerogenes
atgagcatctactctatgaagagcaacagtaagcaagcagaaacggttgctccgaaattcgttttcttagaggaaacctacgagtttgttgaaactttttcaggcgcagtcatcgaatcatttaatgaacagatcttagtaaagaatgattcaggtgaggaaacaaaaatttctgactacggtattacattcagtaattcacaccgcattcataaatatgagttgcgccaatatagtggatatgaacggtgtagtgtcaattatgatgctctgatcgtaaatgagaatactggtgagtataaagtaaatttaagcagaaaactcattgtcatacctgcattcatgacaatgctattaaataatgtgtcaatggcatcacactacaaagtgatgcctgttcccaaactgttttatctcattttcacttcgctttgtttagcttctttcattgccttctgtattttacttgcaggatataaagatgggtatattttcaatgaatacaaatatgagtggttaacatatctcctatctcgatcagcaacttttatctgcatcaaatggatgaaaagaagaagttcaaggtttgatatcgaaatcagaaatattatttctaagttagttaaaaataaaagctcatcctaa

SEQ ID NO: 102454 - DNA, 183 bp, Enterobacter aerogenes
atgccctacaatcgcgcagatgagtcgataatcgctaacgtagaagatctccggattatccgcactttgctcgccgataaagaagacccaagctttatctttcagcccttttcctttggcttctatcgcctctgtccgggcggcctccagatctttgcgaaccacggtacgcttggcttttga

SEQ ID NO: 102455 - DNA, 126 bp, Enterobacter aerogenes
atggttgtcgcgaacgggaataagctaatacttagacaccatgtgactggcgctaaagacagaatactgttggggagcatggtcaagtacgccgcgcgcctgggcattacccctatctggagataa

SEQ ID NO: 102456 - DNA, 240 bp, Enterobacter aerogenes
atgagggcgggcagtgtgattgtgatgcttgtccttctggctgctgtctggtggcagaccgaccagctgagtgaggcccggacccgcaacaagctgctgaccgaaacggcgaccggttacgaccaggttattcaggaagtgaaggcgaccgccatacagacccacaaattactggcagaggtgaaagtccgtgagcaacagcgtaatgcagaaggggagcaccgacgtgaagcaatgtag

SEQ ID NO: 102457 - DNA, 1098 bp, Enterobacter aerogenes
atggccacgggactgacactaaccacggcgggtgccgccgaaatcgaggccgcgtatcaggcgggggaggttgtgcatattacctccgtgctgatcggcgatggtggcggcgtgacattgccgactgatcccgatgagctggcggcggtgacggcgctttttggtcagtttggccgtgaaacctttgactctgattcaagctatgagggctttatcagcggtcagatcgttatcaactgccaggattatccaggtaaaacgctcagagaagcggggctggttagcgctaaggggacgctcatcgcttacggcacatacccggcgacatacctcccggcgcaatcggattccattatcaaagagatcattctgacgctggtgttgacgctgacgcacagctcaaatgtgcagctcgttatagatccgacacttgccactatcacgctggaaacgggcgataaacgttatctgcggcgagcacaaaatcttgctgatttaaacgatacagaagaggcccgggaaaatctggagctgggaaactcagccacgcgggacgtgggcaccgaggtgggaacggtagccgcaggaaatgactcgcgcatcgacggcgcactgcaaaaagagaaaaacttgtccgatctgagcaatccatcagaggcgctaaagtcgctggggctggacagagatggagtcggatacaaggctattgttgacgccattttttacgtcgggatcatcatctctggagaacaaagcccggcgacttgctttccctggcagacatgggtcgacttaagtgaaacctttgctgacagagtggtgcggattggttctcagtatggtagaaccggcggcaataacgaggtaatactgaaagccgataaccttcccccccactggcatcgttcaggcgacagatcacccggggccacgtgggatcctaatactacccacggaacagataatcaaaaaagcggtccactcgccctcactgaagggacttataccgatatggatggtcagacagaatcctcgaacgagtcgattgatgtgactaacgaatacgttaccctttgtatgtggaagcgaacggcataa

SEQ ID NO: 102458 - DNA, 759 bp, Enterobacter aerogenes
atgattaaattaactcgcccccctgaaccccaggttttatgcgataatcgtgcagagtggacccggtgtattatggaactggtcgataagtacaatgagtacaaaaaaatacctgcttctgaaaaagaggccgcattaaaacattatcgtcatgacgatattcgtaacgcactgaaagaaagttcttttcacaaatgcgctttctgtgaaggtattccagccgagactggctttgctgaggttgaacattttcatccgaaatctatatatactaataaagcctttgaatggacaaatctcctttatagttgcaaggcttgtaataacaaaaaacttaatcatgatactcagcagcaccccataataaacccttacgatcttgatcccagtgattgctttacatatacagatatcatgattgagcccaaagagggggctaaccatgatatcgcaaaaaaaacgattgaagtatgtggcttgtctgataaaaggcttttttcagcaagaggcgatattctcgtaagcttccgtatttttgaggctgacatccgtgaggcgatggaagaatttgacatggcacgtacttcgtcaaataaacagaaacgtgcaggaaagataaacgatgcgcttcgcacgattgaagaactggcgcaacctaaagcgagactctcaagcttttgtgcctatctgcttgctaattcagaaatatatcaaaaagccaagcaacgtcttcatgaatacacgagagagaacttatga

SEQ ID NO: 102459 - DNA, 1239 bp, Enterobacter aerogenes
atgccaatagaacgattgcatgttaaaaacattaaacgattcccggaagttaacgttaaattcaatgacaattttaactttattacaggccccaatggttgcggtaagacatctattcttgcagcaattgctcactgtttgagctggaatggtgaatattctagacatcaagataacagtgagtactggatagatgttaatgaatatggtgaaaaatttagattcggttctggtccgggatttttaagggcaataaaatataggcaagaccaaatacagacgtttgtcacaccgccttccgaagaggggcgtaagtcatttgatctgagtgatgttaaaacgagatacaaattgccccctttagttattggtgcacagagaaaaattggttataaaactataaacggtgttaccagagaacaagacagcgaagcaagtattaaggattattgtaacaaagctctacactctctttacaataattcctcacgagatgtaaagcaatggcttatcaacagatactttgtaatagataaaccatgggcaaaagaggagaaaacaaactgggaccatttgatcaaatcgttaccagtaattggaccattcaatagtgtattccagtatatagaaacagggcgcgatcttgagcctgttttttcaatttatgataaaaattgtttccttgaggaactttcatcagggtttcaggctattttgtatattattattgcaatatttgaatgggtggaagcttgtttacccgtaggagagcgaaatgtaacaacagcgtgcggaactgtgctgatcgatgagttggacaaccacctacatccggaatggcagttgactgtaagggagggaattgcagctatattccctaatatacaatttatagtaacaactcattccccccaccttttagcctcggcaaaaaaaaatgagatcatcatgcttccatcatcataccctgatgaaacttatgaattccaaccttcggataaagcatattcagggtggagtacagatttaattttgactgagctcatgggtgtgacaagccttgacaacaaagattatgaaacactggtaaaatcttgttatgaaaacattaaggataataaccttgatgctctcaaagaaaactatgcccgtctagaatctatctgccatccgggtgatgcggtgttaatcatactcaagacgcgcatagcaggcatggaggcgaaagtaaatgattaa

SEQ ID NO: 102460 - DNA, 804 bp, Enterobacter aerogenes
atgaatatggatgagctgaagcgcgattactgtgccggaatattgtcgatcagggccgtggcggacaagtacggcattcgaaaatcgacgctttgcgactgggctaaaaaatttaactgggtccgtatcaaatcgtccggaacgaccggacaacatccggacaaaaacgccggacaaaatcatgtccggaaatctgtccggacggaaaataccgctgaaagccgcgtcacacctgatgatcaaaatttaaatattttgtccggaagcgagaaaacgccagaaacgaaacggaacaggagcggaaaccccaatccggcaaaccagtttcagcaacgcaatcaggccgcacttaaacacggtggatatgcgcgccgtatgctgcattccgatgcggtgattgaggatgccagagcactgacgctacaggatgaactgacgatggtgcgtgcctgtaatctggaggcggctgaaaatatcggacgctggaaaaccgaaatggcggatgcggatgatgagcggaagaaaacgctcaccgagcagattgatggggcggaaaaggccatgcttcgcaatactgcggccattgagtcgcttgagcgttcgctggtctacgtgtgttatgccggtcccaaaatggccgctgatacgcaacgtagcagcgcgtcaaaggaaaaaacgcgtgttgaaacggacattctggcgaatcagcaccatgcagctgccacaccgatggcgcagatcctcgctgaaattcaggccatggaaaattcggggatgctgaatgactacccttacacagaatga

SEQ ID NO: 102461 - DNA, 618 bp, Enterobacter aerogenes
atgaaatccggtactccctcttctcctgaacaaacggttgctgacctcaggcatctggcgtggtgcgcactggtcgcattacgactgatgcaacttgaaggtcaggcactgtcgccattaacggctcatacttttttactccgatggtttgccggtgcacaaaaacagcgtcgttttccgcgcagtgtctccggtgatatcggtgccctgctgcagctcggacgtcagaaaggcctggacgccaggctggtatcacgactggaagagctctggcgctcatgttcaccccctgtttcgcgtcagtcagatttgttccggttaagcagcgcgatagaaacgcttaaagctgaaggctggcttaatgccgttgtgactgacgaagaatgggacactccttcgctgattgcggactatgccggtgcatctgcactgctggtgaaaaaaacggcattaatacagcatttcacagaaagcgggcaaatgagcaatccgctaacctttgctgtggtgggagagcatagcccggtgaccatggctctcggggctccgggatttcgctgtaccgttgccgacgctgaatttcccggtagcgtcttgctgacgctgataccggaatga

SEQ ID NO: 102462 - DNA, 243 bp, Enterobacter aerogenes
atgaaaaaattagcagcaatgatcggcgcatgtgcgcttctggtatgggggtgtgcgaatgccgctgacggtcaggcagccgccaaagcaaaatccgcctgccaggccaatccgacacagtgttctcaggcgaaagccaatgcccaaaaggaagcccaggcagcaaaagatgcctgtgcaaaaaaccagacagcctgtaatgacgctaaaacaaaagccaaaaatgcagcttcccagcactaa

SEQ ID NO: 102463 - DNA, 1596 bp, Enterobacter aerogenes
atgaatgtcatcaatttaatgattgccggaagccttcttctggtcgtcattgccatattgtttttaattttgctgaaaaaactgcgttccgccaggctggccgagcagaataaatcagcacagcttgagcggtattctgttatcaccgatgcagaggctgaagcttcccgtcttattcaggttgcagaccagcagacccgggaaatggtggatacggcgaaaaccaccgcagcacatctggaagaaacagcagctcgccatgttgcggagaagaaaatacaggcgcaggagctggtggacaaggcaaaaataacggccgcgcttctggagaaagaagcgactgagttgctcagcaatgccagagatcagatcgtttcgctcaaggataatatcaccgggcttcgccggtcatattcagaaaagaaaaaaatgtatgatgagcttgaaaaagccttactcatttatcgcgaagacgccgaatttgctgaaatgggagtctatgagccccactttgattttgattcatcggaggagttcaaggaggctatcagaggaaaccgggaacagcaaaaagcaatgttgcgtctgaaaaaccgtgaaggtgctgtctggtgcggaacagactggactgttcacaattcccgcgctgcgggtaaaaaaatgaccacccgggcgattaatcttaccgcccgggcttttaatggtgaatgcgatgcggccattgcgaactgtacgttcaaaaactgggcggtaatgcttgagaggatcaaggctgcatttattaaaataaataccctgaatgaagtgaacgacgttcacatcagcaacaaataccttgaattaaaacagcaggaactggatctggttcatgcttataaaatgaaaaaacaggctgaaaaagaagagcagcgtgaaatcagggctcagatggccgaagagaaaaaagcacagctggaaattgaaagagccataaaagaagcggaagcagaagaagtccgggcgcaaagagcactcgataaagcacgtaaagagatggacgccagacttgagaaaatgacagcggaacaggccgctgcttatcagacgaaaattgacgcattacaggaggcattaacagaagctgagctcaaggggcagaaagcactgagcatggcgcagcagactaaacgcggccatgtctatgtgatttccaatatcggctcttttggcgaggacgtattcaaaattgggatgacccgtcgactggacccgcaggatcgtgtcgatgaactgggcagtgcatctgttcctttcctgtttgatgttcatgccatgatccacagtgacgatgctcctgcacttgagaatgccctccatcaacacttcgacagtcagcggaccaatatgattaaccggcgtaaagagtttttcaacgtcagcctcaaagagattaaaaaagcggtatatcaacttgcgggtaatgatgtggattttattgagacaatcgttgcacagcattattacgaaacacttgcacttcgtaaaaagatgcaggaaaaaactgaaccttcagttcattcaccaattaaagaacagcgatttgcagagactatctga

SEQ ID NO: 102464 - DNA, 393 bp, Enterobacter aerogenes
atgaaatcactgacctcagttcgtaaaaaaagcgccaattatcccgccgagttcaaagccagaatggttgaactctcgtacaactcggaaatatcagtggcacaactcgcacgtgaacacggcatcaatgataacctgctctttaagtggcggcaggcctggcgcgaagggaaactccacatcccggttatgcctgaaatgagtatgcctgcgttagttccggtcacactcgatgccgaagatgcgctgacgaaccggacctcgccagaacctgacaaatctgaagctctcgatatagcctgtgaagtgacgttccgacacgggacacttcgcctcaatggcgatatcagtgaaaacctgatgacgatgctgatacgggagctcaaacgatga

SEQ ID NO: 102465 - DNA, 351 bp, Enterobacter aerogenes
atgatacccctcccgtcaggtacccgaatatggctggttgccggtgtgactgatatgcgcaaatcgttcaacggtctgagcgaactggttcatcacgctcttgacgagaacccttactccggacacatttttatcttcaggggacgaaaaggcgatatggtgaaggtgctgtgggctgatcctgatggcatgcatctgtatattaaacgcctggaggaaggtcacttcgtgtggcctgttgccagagacggaaaaataatcctgacccgctcacagcttgctctgctgcttgataaactggactggcgtcagcctaaaacatcccgcactaactctctgatgatgttgtaa

SEQ ID NO: 102466 - DNA, 1629 bp, Enterobacter aerogenes
atgtggtctatgagtcaggatcatcacgcccggatcgcagagcttgaaaaacagctcagccaacaagccgaatccctccgtcagaaaaaccagcaactcagcctggttgaagagacggaggcgttcctgcgctcggcactggctcgtgtcgaagaaaaagtggaagaaagtgagcgcgagatcgagcgtcttcgtgcacaactggacaaactgcggcgcatgatgttcggtgtctcttctgaaaagttcaacagagaaatggcgaaagccgaagccgaactcagacagagcgaagaagaaaacgatcggtacagtggtcgcgaaaatgatccacaggtcccccgccagctgaggcaatcccggcatcgtcgtccgttcccggctcaccttccccgcgaagaaaaacggctggagccagttgaaacacactgcccggaatgcggcggagaactggactatctgggagaggtcagcaccgaacagctggaactcctgaccagcgcaatgaaagtgatccgcacagcgcgggtaaaaaaagcctgtaaaaaatgcgactgcatcgttgaagcccccgcgccatcccgcccgatcgagcggggtatagcagggccgggtctgctgtcgcggatcatggttgccaagttctgcgaacacacaccactctatcgtctgtctgaaatactggagcgccagcatggggtgacgctcagccgggtgctgctctccaactggatcgatgcctgctgtcgtctgttaagtgccgtggtggatgcgctcaaccagtacgtgatgagcgggcggaaagttcacgctgatgatactcccgttaaagtactggcaccgggaacaagaaaaactaaaaaaggccatatatgggtctatgtacgcgatgaccggagcgcaggttcatccgcccccccggcggtgtggtatgcgtactcaccggactggagcggtaagcacacccggcatcatcttcgtcccttccgtggcgtgcttcaggccgatgcatataaaggttacgggcctctgttcagcacagagcgtgacggaggcccgttaacagaggttgcctgtatggcccatgcccggcgggggatcaacgacgtctatgaacccacccgaaaatcggcggcggcagcagaggcactggcacgtataggtgagctgtacgcgatagaaaaggagatacggggtctcccggaagacgaacggttgcgggtacgacagaatcaaagtaaaccccgcctgctggcgttgttcggctggatggaagacaaagtggcagtggcgtccaaaaaagatcggttgccaggagccttccagtatctgctgaaccgtaaagaagcgctggcttactactgcgaagatggtctggcagaaatagacaacaatgcagccgagcgtgcccttcgctcagtctgtctggggaagaaaaactggctgttcttcggtaacgatcatggtggtgacagaggagctatgatgtatagcctgatcgagacatgcaaacttaacggaataaacccggaggcgtatctgaaacatatcctgcaacgccttcccgactggcaggcaaacaggatcgatgaactgctgccctggaacgtggatctgacgtccaaataa

SEQ ID NO: 102467 - DNA, 303 bp, Enterobacter aerogenes
atggtatcggaagaagtgactgatgcgacagcagaaaagctggaagcatccggattatggcgaagggccgctatccgctggcttaatattatgcagcgacctgagctgactgaccttcagcgggaatgggttcgccagcgacgggcattttgccaggagaacattgcaccgactggtgccccagaaaaactggatattatggaaatctccagagcagcgagtgccacgcagacacgtatggggctggcccgaccaaacggtgcgatgttcaggaccgtaagcgataagcgagcgccgtattga

SEQ ID NO: 102468 - DNA, 1080 bp, Enterobacter aerogenes
atggaatttgcagaaaaactgtcattactggccgacaaaattaaacagcagggacatgggatccagaccgaggaagccaccaaaacggcatttattatgccgtttattcactcggtgcttgggtatgatgtttttaatcctgaagaggtgaccccggaatatatctgtgatgtgggaacgaaaaaaggagaaaaaatagattacgctattctgcgtgagggggaggttcagatactgttcgaatgcaaaaagattggcgaacccctgaatcttaatcatgccgggcagctttttcgctactttcatgtgaccaatgcccgtattgccgtgctcacgaacggacagatctatcagttttataccgatctggatgcaccgaacagaatggatgagaagccgtttctggtactcgatctctgcgacattgatgactacgtggtgccggagctggttaaaattaccaaatcagatttcgatgtggaatctattgtcagcgcagccggtgagctgaaatacgtcagtcagataaaaaaagtgatcgccacacagttctccatgccggaagatgagtttgtgaaattcatcgcatcacgggtctatgatggcattgtgacccaaaaagtccgtgagcagtttgccgaactgacccgtaaggctgtcagccagtatctgaacgaccggattaatgagcgtctgaaatcagccatgaatggcagccagattgtggctgatatggctgagagtaaagaattgcccgttcccgaagacatcaccgcagatccggacgatgtcgtcacaacggaagaagaatgggaaggttttcatattgtcaaagcgattatccgtgcggtggtggacgtcaaacgtatcacaatgagggacaccaaaagctactgcggtattctgattgatgataataaccgtaaacctgtctgtcgtttgcattttaaccggacgcaaaaatatattggcgtttttgataacgacaaaaatgaaacccgcatgccgattgcttctctggacgagatttacaacatttcagaaaagctgaaagaaaccgccgcgtcatacgaatgctga

SEQ ID NO: 102469 - DNA, 741 bp, Enterobacter aerogenes
atgggactggtatatcaggaagacgaagaccttcattttttacaacactgtacggaagaacaattgcagatgatagcggggctactgacgcacgacgagaaaggcaaacaacgcctcgccagtgagctgctgaagcataaagaatttcaggcgctggagaaccatcctgagcagcatcgtcgttgctggcaactgatagccggtgagctgcagcattttggcggtgacagcattgccaacaaaatccggggtcacggtctgctgtaccggagcattctgctggatgtctgcaaacgactgaagctcaaagcgggtaaagagatgtcgacctttgatattgagcacagcctgctggagcattttctgcgtaacagctggcagaagatggacgagacgcaccgggccgagtttctggaggctgtggaggccagggtggcagagctggaagacctgctgccgatgctgatgaaggatacgaaactagcaagcggcgtatcccatctgctttcgggacaactgagcaaaattttacgcacccatgccgctgtcagtgttatcggacatggtcttctgcgaggggccgggctgggtggcccctttggcgctgcactgaatggcgtgaaagccgtcagcggcagcgcctaccgggtcaccattccggctgtgctgcagattgcctgtctgcgccgtattttactgaaccaggctgccggacagggcatgtcactcagaaacgtctga

SEQ ID NO: 102470 - DNA, 489 bp, Enterobacter aerogenes
atgtcagcccgggagcgatttttcaggaagatgcaacagaatggcctacccgtctgtgcgggcagcaataccgtggacgcggatattgcacgattttgcaggcagatggatgagctggtacaacacattcgcggatggcttgaaggttcaggtattgcgatgacccgcagcaccaggcacctcagtgacctgagcaccatcggcgtcagccttaacagtggcgcatcacgctatgacatcgcccttcttcgcctgcaaaatgatgataaacgtgtcgatatcatcccggagcagctttaccggaacgggggaaaaggatgggtaaacctcaccgtgaatgtccccggaaataagccagaacagcgccatttctgtttacatatggcgacagaaagtggctggcttatctgtgatgaaattcagacaccgggtagcagtattccactgacggaggaaatattctttcgggttattgagccactggcatga

SEQ ID NO: 102471 - DNA, 660 bp, Enterobacter aerogenes
atgagtgcacagaagcggtaccgcaacaaccggtcactgtggacgcttgaggatctgcggtacctggagcagaactacactgtccggccagtgaccgaaatagcggaaaagctgggccgttcaccgggcgcggtggccctgatggcggacaaactgggcgttcgcggtgaacgggggctgccctggactgacgctgaaatgcagattatccgcctccactatggcagtggggtgggcgcagagtttttgcaaccgttacttcctggccggagcgtcagtgctattttttcgcaggcggaaaaaatgggggtgctgagcggacgcttctggaacgaggaagagctcggcattctgaaagcgtattacccgaccgagggaacgaccgtgacggccagactggccggaagaacagcgcatgccgtcaggatcatggcgaagcggctgggcctcaaaaaatcccgcgagtgtacaacaggctttcgtccgtggagcgatgaggagtggtgccggcttgaaagcacgctgcacctgagtactgccgaacagcaggctgctcactttccgacgcgaaccctgcgggccgttgaaaaagcgcgggagcgattcagtcgtaaacgcaggcccggttatctgagcacgaaaaaagtcaacacccggtag

SEQ ID NO: 102472 - DNA, 1377 bp, Enterobacter aerogenes
atgtcttacgatactccacaccgcctgaagccaggcggtgacccgcgtacgctgccggattacgccgcactgcgcgatgaactgaacaagctcacccatccggcacgcccggacgtgaactggtcgtacgccgaaaagttgtgcctcagcctgtttgagcacaacggtattgagctgcagacagcagcctggtatacgctcgtccgcacgcagcttgccgggctgtatggtctcaacgaagggctggcgatactggaagcacttatcacccgccagtggggcagtctctggccgcagccagtgcatgcacggatggatatcttaagtgggctgagcaaacggctacagcagaccatgcgcaccgtcacgctgacgtatgccgacctcagtctgctgtaccaggcagagcggcacctgacgggcctttgtgacacgctggagcgtctggagctgaagcacctgagtcagtttgaagcgctgcggatgctaatgcacaccgcctccgtcagactggagaaccgcgacagtacagcagggcgcgggaatgaaccgccggatgattcagcaacaccgttgacgacggccagtctgcatcacaccgtctcccctgaatcgggtgtcagcctgcatctgaaggagaaatcccgctggatttatgtggcacaaccggtacagcctcccaatatcaccgtcgtcgctgaaccgacgacaccaccacctcgcccatggaaagctttcatcgccggtgtggcttccatgctggtggtcggcactgtagcggtatggggctggcagcacgcccatcgctctgacccgctgcttgcacagctgaacgcctcgctggctccgctccctgtgccgctgaacagcgcacagcggcaggcgctgcctgaggtccttccgcctgcagaaacggttatccgcgccacgcaggagcagctcacccggctggctgcactgccgccgggctggaatatcacccggggcagccagcttgtccggcaggctgcgatcctctggccggaacagagcgcaccgctgcgacagcagtggcagcaacagctggaagcaatggcactgccggcagagagcctgaacggctggcatcagggcatggcgcaattgcagcaactcaccgaccggctcaacggactggatgaacagcacggtaaatacatgacggtcagcgagctgaaatcgcaggtatttgccctcacccggtccttcagccagacgccaccggttgaagagcagttacggcagtggcaacaggctggcgtcagcccggtactggcacagcagacagcgacacatcttaatcagctgctggcacgctatgtgttactcacaaaccgccaggaacagaccgtaccatga

SEQ ID NO: 102473 - DNA, 402 bp, Enterobacter aerogenes
atgaaactttctcatacactgccgtgcctgctggccggatttctgctgagcctttccgtacaggccaacgaccataaagccctcggcgtggtcgccatgccacgtaacgccaccagtgacctggcgctgaaaatcccggtctgccgggtgattaaacgcctgcagctgaccgcagagcacggcgatatcagtttaagcggggctaccgtttattttaaggcggctaaatccagcagccagacgctgagcgtaccttcctctctcaaagaaggcagcaccaccgactggattaacatcaacagtgataacgacaataaacgctgcgtgtcgaaaatcaccttctccggcaacaccgtcaactcgtcggatatggcgaccctgaaagtctttggtgacgactga

SEQ ID NO: 102474 - DNA, 1389 bp, Enterobacter aerogenes
atgaacgttcagacactttttgaccagcttcgcggtgaactcggcctgctggattttcgggcagacaacgtcacgctgacgggccgtgacccggtgtatcctacccccttccgtattggtgaggccgccgcggcaattcttgccctgcagggtgtgatgctcaacgcgctgagtcagcagcaggggttacccacacagcagatagtggtggactgccgcagcgcggccgcctccacgcatgccgtggctttccagcgccagaacggccacaactggcagtataacgacccggattatccgacaacggacttttaccgtaccggcgatgaccgttttatcttcctgcacggcgggtacccgaagctccgcgacggtattctggatgtgctcaatgtccctaataaccgtaaacgcattgccggagccgtggcaggctggaatgctgaatatctggaagccacgctggcggatgccggattgtgcgcggctattgcccggacgcatgacgaatggctgacccatcctcagggcagagccgttagccgcgaaccgctgataacgttcacccggctcagcgacagtggaccacggcagagacagtacgggcgggagcgcattctgcaaccgctgcgggtcctggattttactcacgtaattgccggccccacggcgaccagagggctcgcgcagatgggagcggaggtgctgcatatctcttcaccttcccgcccccgcattctgccctttgatgtggacactaaccacggcaagcgtaatgcgtatctggacctgtcggcggcagatgaccgccggacagcggcgcaactcatccgtaccggtgatgtgtttgttcagagttaccgtcccggtgccctggcgcgttacgggctgtcggttccggagatggtgcaactgaacccgcacctgattgccgtcaatctgaactgctacgggcacagcggcccctggaagaaccgccctggttttgagcagctggcacagaccgtgaccgggatggctatggcgcagagggaaaacggccacccgcagctggggccgacctgtccgaacgattatctcacgggttatctcgccacgctgggcgtgctgatagcgctggagattcaggggtgtgaaggcggagcctggcaggtggatgtctcactgtgccgtactgccacctggctgcaacagcagggaagcctgaatcactggcagacagtcgcaccgatggatgaaacgtgggtcgctggctgtatggctgctgaaaccggcccgtttggtgacctgcggtatttcgacacggcgcttaagcttgaccggacaccgctacgcttcacctcaccggcgatgccgctggggtcacgtcttccggcctggacagactga

SEQ ID NO: 102475 - DNA, 1866 bp, Enterobacter aerogenes
atggcaaaacttatcacatccatgacgttttgcgctgaccgaatgacgcccggtgaaaagcgggtggcgcagcgtcttgaaacccatctcagcgatgattgcctggtctggtatgacatccctgtcgggcgcaactatcgtcatccggattttgtcgttatcgatccggcacagggactgatattcctggaggtcaaggactggcagttatccacctttcagcaggccagctcgcagaccgtcacgcttgacaccgataatggcctcaggcaggtgcttaaccccctggagcaggtccggcagtatgcctgcgacacgataaaccagttgtccggggatccccgtctgcaacaggtgggaaaatatgccgggaagttaaacctgggctgggcgtacggtgtgattttcaccaatattacgcgtcgccagctgaattcgctgtccagtgctgaaaccatggaagccgtattcccggagcggctgacgctctgccaggatgaaatcgccggctccgtttcacctgccgcctttcagcataaaatcagtgagatgttcaccacggcattcaaaccggtggtgacacccgaacgccgggatatattgcgtcagcacctgttcccggaaatcgtcattccggtgaagaaaagtaacagcgatttacacaaagtgatggatatgcagcaggagatcctggcccggaatatgggagagggtcaccggatcattcatggcgtggcaggttcagggaaaacactcattctgttataccgttgtctgtatctcgctgagaatacaacccgcccgctcctggtgctctgctttaacatcacgcttgccagttatctgagggaatgtattgcggccaggggactgacgggtcgtgttcatatttaccattttcatggctggtgcgccgccatggcccgaaaaaatcatctgaaggtcagtacggagggtaactacggtgaaaactgtttcgttgcgctgaaagacgcggttgaagccggggacgtgtcggatgtggactatgatgccgtattaattgatgaaggccatgattttgaccagtcgtggctcaggctgatcgcccgtctgttcgataacgacacccgctcgctgttgctgatgtacgacgatgcccagacgctttatcgacgggatcggggtctgaatttttccctgagcagcgtggggatccaggctcaggggagatcctccatattgcgaattaactatcgtaacacgaaaaatatcctgaatttcgcctatacgttttcccgggattactttgaaaaacaccataaccaggagatcccgcaggtattacctcaggcctgtggggaagcaggaccgatgccggaagtggttcattgccacaatacgcaggatgaaatcaggcatgtgatgtcctggctccggcagaaatacgcccggacaggccgctggggggatatcgcggtattgtgtcccgctgcattctcagtcgatgggttgtgcgatgaaatgagtcaccaggggatcccgttcgcggcaggattcggtgattcaggtaagagaaactattcgcctcgccagaacgcggtgcatctcctgacctttcagagcagcaaagggctggagtttccctttgtcgccgtcatgaatgcctcgtttgttcatcagcatgcggaggaagaagcctcagtgatccccgcgctgtatgtggcgttcacacgggcaacaagtgaacttcttgtgacctgctatcgtgttaacagtatcagtcatcatcttgagcaggctgccagccggctttcaacagaaatgccagcgtcacaggttgcagacaacggagtctttgctgatgaacgttcagacactttttga

SEQ ID NO: 102476 - DNA, 447 bp, Enterobacter aerogenes
atgccgcgtccttccctctacgaaatgctgttcggcaacttcgccggtggcctcgacctgcatcaggtcggtgaagaaaatcaggtgatcctgtctgtgctcgacaacatgcagcgcatcctgaactgtcgtgcaggaacgctggcgcacctgccggaatacggcatcccggatatgactaaaattctgcagggcatgccgggtaccgctcaccagttaatgaccacgctctctgacgtgctgctgaagtacgagccacgtttgaaaaatgtcaacgtcgtgctgcttgatcaggaaatacccggagagctgcgctatgcgattgacgcagaactcagggggattgggctggtgcgctacggaacgacctttatgccggaaggaaaaatccttatccgccatctcaggcagcagcaccttatgacccgtcagagtctctggccgtaa

SEQ ID NO: 102477 - DNA, 543 bp, Enterobacter aerogenes
atgaagatggcgattaccgctggtaaaaccacaacactgatgatggccgccagtatcgcgctgatgctggcgggttgcggcctgacgcagacggtcacggacggcacaaagtctgtggcgaaatccattttttataagcaggtgaaaactctgcacctggatatccgcgcccgtgaggcggtgaacagcaatgccggcggggctgcactttccaccgtggtacgcatttaccagctgaaagaccgcaaaacctttgatgccaccgattacccgtcactgtttgccacagacagtcaggccattaaggccgggctggtggcggagaaagacatccggctgcaacccggtggggcagtagcggtggatatgccgctggaggatagcgcacaatatgtggcggttgccggcatgtttatgttccccgaccaggtcaacaatacctggcgtatcgtcctgacccgtgacgacctggacccggataaatcccgcattatcgaagcgggcagcaacacgctcactttactgccggtgaaggataagtaa

SEQ ID NO: 102478 - DNA, 1092 bp, Enterobacter aerogenes
gtggaaagagaaccacagtccgcgtctgcccggctaatagcgcagctgggtgaccggctcccgcagacccatttttaccgcctgtgtcagttgcttgagcagtgtaacccggataagcctgtcaccggcagcacctggcaggtccgtcatgagccggtacgcttccggccccacccggggatgggctttccggcatcggaaatcagaggggctgaacagccggaacatccccatctgccgccgaccatcagggtcacctttatggggctctgtggcatcacgtcgccgctgccgacccattatatcgatgacatcgctcagcgacgggagggctgggaagccacgtcggattttctcgatatctttaaccatcgcctgatagcccagtattaccgtatctggcgtaagtactcgtatccggccactttcgaagcgggtggaaaagaccggacttcacagtacctgctgggactggcggggctggggattgacggctgcgctgagggtatcggcacacccgtatcgcgctttctggcgttattgcctgtgatgctgctgccggggcgcacggcggaagggctgacttctctggtgcgcctgctggcacccgacaccagagccacggtctggcatcacgataaacgccgtattccgctgaaaaagccgctggtcctgagtcttcaccatccggtgaccctgaagaaccggccggtaatgggcagttacgccacggacgtgaacagtcaggtgctgctgcaactctccacccacaatccggatgaggtgcagggctggctgccgggcgggcagttgcatgcagacctgatggcgctgctgcatgtgtatctgggcgcacatctggatgtccgtctgcagctgtgcattgaccgaagtctgctaccgcctgccgccctgagctgtcaccccggtcagcaagccccccagctgggacgtaccgccgtaatgcgaccgcttaatccgggcacggcaaaacaccataaaaccataaccatcaacctgggacgctatgagcgtgtgcaggaacatattcaccgaaggaagaccgatgaagatggcgattaccgctggtaa

SEQ ID NO: 102479 - DNA, 1197 bp, Enterobacter aerogenes
atggcaaaaggtaactatctggtccggggtgacaaaacgacctgcggtggagtgatcacagaaggctgtgacgatcatctgatcctcggaaaggctgctgcacgtgagggggataaagtcacctgtggtcaacatccggggatgttcagcattgttggcggtattgcaaacgatgtggttcacggacgaaaacaggcggggacgctggacagcaaaagttcctgcccgtgtcaggcgaggtttctggcttccatgacagaggacacctatgagtctgcatcttcatcttcatcagaccaggcttgcggagagcattctgattcagataaagacaatactgctgagagcccgggtataaaagataccaccacagaggataccgggggttcttcctctgtccagagtcaggcggatagcagcgatcctgatgaacagcagagcggctggctggcctactacggcacggatatgcagccgctcaagaggcttgcataccgctcgtttgtggactctgatgttccaaaaatcatcatcgcaggtgacggccatcgcaacccgcctttcgcgtatgcagaatcaatgcccggagtattgtcagcctttcaggggggagcattacgactttatgttgaatatacccgctccgggtggatggccagaaataaaacgcccggggcactgccttcctgtctgacgcaaaagaagcgcttttttcagaaggatattgtgacgccctgggaaaatgaaaccatggcagagtcgtcaaaagaaatttttgaaacgctgacagaaaaaatgggcgacaccagaccattgactccggctgaaaaaaaacgacttggcatactgggtcagcagtttgcggatgggctgaaaaccattacccccgatctggccaaaagcgtccgggagcatattaacaacattgtcacagaaccgcagttacctgacgctgatgtcatggcgctggtcaccatcatttccggaaaatggcgggatatgtttgtgaatgaagacctggcctgccgcatggcaaaggagatcattacgtcaccaaaactcacccgactgatatccatcggggatgcacatctggatgacaataataaccccttccatattttgctggcacaaaaactggctgattccatgtcggcaccgcccgttattctggttaacaaaagcagtagctattga

SEQ ID NO: 102480 - DNA, 1590 bp, Enterobacter aerogenes
atggcttcactgaccacgttacttaacgcatgccaggcggatgctgaggcactccggacactgacccggcaacgactcagcctgtgggacaactggttgcagccgttatcagactcgtcccccacaggagaagatccgggctatgacgatgacttccagcggatacgcgaggaggtcaatcaactttccggagccgataccgaccttatctgccagctggctgaaaaactgctgacccgctctgccaaagatatccgggtggcaacatactactgctgggcccgcctgcgccgtgatggcgaggccggactggcggaggggctggaactgctggccgtcctgcttgaacgctttggaccccggcttcatccgcagcgagaccggagccgtaaggcggcgctggagtggctggcttccggcagaatgctggacagcgtgtcactgtacccggaagtcgtgcgtgaagaggcgttgcgtacggcaggcgcactgctgcttatcgacagtgccatggagtctgaaccggaagatgcacggccacaactgagtgggctgtacagtgcactggaatcacggttattaaaagcgggcggcgtggatgcagttgtcccgcagaatgccgcgccccgttcggttgcatcctctcccactcacagcaatgcccctgaactgagccgcatcagctccgggcaggatctgctggctcaggcccgcacgttgaccacgtatctgcgggagcagccggacggctggcttgcggcacaccggctgatgaaaagcctgcgtcacgataccctgcagagcattccggccccggatgcagacgggaaaacacggattgagcctccgcgcgctgaccagcgggcgttgcttaaacgtctgtatctgcagcagagctggctggacatgctggaggtggccgacgatacgttctcccggggagccaaccatctgtggctggatttgcagtggtatatccatcaggccctgctgaaatcaggtcaggaagttctggcggaaattatcgcggcggacctgaaagggctgctccgtcgcctgacggggctcgaaaccctggcgtttaacgatggcactgcctttgctgatgaagtcacgctgaactggatacaccaggaggtgacggaaaccctctccggctggggcaatgaaacggtggcaaccgcatccactggtcacgatgacatcctgcaactggaacaggaagcactggcgatggccgaccgtgaaggcgctgaagctacgtttgcctggttacaaaaccgccctggcacgacgacccgtcagcagtggcttctgcgtctgctgatggcgcgggtggctgagcaaatcggcaaaagcgaactggcgttacatctgctgggagagctggacggtaacggttccgcgctcactctgcagcaatgggagcctgagctgctgtttgaggtaaaagcccggcgcctgaagcttttgcgcacaaaaaccgggcgcagcgataccgataagacccgcctgcagccggagatggagcgactgctggccgggcttattactctcgatccagtacgcgccgccgtgctgtgtccgtga

SEQ ID NO: 102481 - DNA, 3405 bp, Enterobacter aerogenes
atgaaagcagctgaggggtcattatggcgaggtcgctgggggcgcttcgggctgacaggggtctttattgtcgtcattgcctgggctatctggcattacggtgaactcgcgggactgaatactcctggtctgaagttgtccggcgtggccggggcattgattattgtgctgttcgttcgtcatggcagggtaatcagtcaggccgttgaggagcgctggcatcgccatcaggccaaacgcaagagcgaaaatcccggtgatgagtcccgtgtggcgcagacgcccccgcgtaatatcaccgtgagtgacatccgtaccgccatgcgtcacctctatggccgtcgctggggtcacaaagtgcgtatcctgctggtgactggcagggtgtcggacgttgaacaactgaccccaaaactcaccagccagctctggcaggaagaccaggggacgctgttgttgtggggcggtgacccggctgcaccagtggataccgcgtggtttactgcgctgcgtaaactgcgccgtcgcccggcggacggacaggtctgggtcaccagcgtctttgaccggttaagccgtccggggctggcatcacctgctgcgcctctttccatcgatgcgatggatacgctggctcatgcgctcaatacgcacaccgcctcacttggctggacgctgccgctgtatgtctggtcgctgcatccacgcgccggccaacaggaaggtcgcctgacccagtcagtcgggtgcctgttgccggtgggctgtaaagcgcagacgctgggagagcaactggcggtactgacaccgtcgctgatagcgcaggggattcagcaggtgagcggcgcgccgcagcatgactttttgctcacactggcgcaccagttaaccacagagccgcagagcgtggtggcaccgcttgccgtgatgctcaatccttatcgtcctctgccgctggcgggtgtggtcttcagcccggtggtgccgggcgcggcccggtcggtaaagcatcactgggcgctggataaccgctgggaggtgttgccggcgtcggtgcgtgcattgcctgctggccttcgtccgcgtaaaccgggcattccgtggcgcagggtgataacgtctgccgctgccctgctgatggtgctgtgggggggctggatgctgttctcgtatgccagcaaccgcagcctgattcatgacgcgcagtctcaggcggcacgggccgcagagcagaaacagccgctggcacaacgcctgtttgccctgtctgagctgcaaaaaacacttgccctgctgcagtaccgtgcagagcatcaggtgccgtggtatgaccgggccgggctcagccacaatgatgaactgctggtctcactctggccccgctatcgtgccagtgcacagcccctgctgcgtgatgcggcggccggtcatcttgaagaacagctgaatgcctttgtgtctctgtcgcctgacagcccgctgcgtgaacggagggcaaaagcagcctatgaccagctcaagctgtatctgatgctgtcgcgcccgacgcgtatggatgcggtctggttcagcgctgaactgttgcaggcgtggccgcagcgcgccggagtggctgacggggtatggaaaggcaccgcgccgtcgttgctgagcttctggggggcacagcttgttgcccacccggaatggcaactgcctgccgatgaaaatcttatcggtcaggcgcgaaccctgctcattcgtcagatggggatgcgcaacagtgaatccacgctgtaccagaaaatgctcgcccgggtatcacacctgtatgccgatatgcggctacaggatatgaccggcgagacggacgcatcccggtttttcaccaccgacagtgtggtgccgggcatgttcacccgggccgcctgggagcaggcggtacagccggcgattgataaagtggtgaaagagcgccgcgatgaactggactgggtgctgaccgataacacgcagagcccgcaacaaaagagcgaacccgaagcattgagaaaacggctgacggcgcgctactttgctgattttggcggggcatggctggagtttctcaacagcctgcggcttcagcatgctgccacgctctcggatgcgattgaccagctgacgctgatggcggatgtgcgccagtcgccgctggtggctctgatgaacaccctgaacgtgcagggtcgaaccggacagaccagtgaggctctgtctgattcactggtgaaatcggccaaaaatctgctggggggcgataagcaaccggctatcgaccagagcgccggtgagcaggggccgcttgatgccacctttggtccggtgctggcgctgatggacaaatcacaaaacagcagctcagcgctgagcctgcaggtctacctcacccgggtcactcaggtgcgcctgcgccttcagcaggtcaccaacgccgccgacccgcaggcgatgacccagacgctggcacaaacggtgttccagggcaaagccgtggacctgacggaaacccgggattacggcagcctgatggccgcaggtctgggacaggaatggagtggattcgggaacacgatgtttgtccgcccgatggagcaggcctggcagcaggtgctgacgccggcggcagacagcctcaatgcccagtggcaggcggcggtggtcagcgaatggaacagcgcgtttggcggacgctatccctttaacgatgtcagcagcgatgcctccctgccgctgcttgcgaagtacctgaatgccgactccggacgcatcacccgttttctgcaaaccagtctcaatggtgtactccaccgtgaaggcaatcactgggtaccggacagcattaacgcacagggactgaccttcaatccggcattccttgaggccatcaacaccctgagtaccatctcggatgtggtgttcaccaacggtgaggccgggatgaattttgagctgcgcccgggcagtgccgcaggggtgatgcagaccgatttgattatcgacagtcagaagctgacctacgttaaccagatgccggaatggaagcggattacctggcctgcggatacggaagcacccggagccaccttaagctggataagcactcaggccggtacacgacagtatgccgatgtgcccggcgcatggggctggatacgcctgcttgaccaggcttctgtatcagccaatcccggcgtgaacagcagcttcagtgtgagctggaaagcccaggatggcaggatgctgaattacaccctgcgcaccgaagccggtgagggccctctggcgttactgaaactgcgcaacttccgtctgccggacaccatcttcagcgtggatgcgtcgcagggcatgacagataccacggacacgggagacgccgactga

SEQ ID NO: 102482 - DNA, 1152 bp, Enterobacter aerogenes
atgagctgggaacgtcaaaaatcctcggtggttgccatgcctgaagaaccctcaatggtactctggctgattggcggccttgtagcgttgattgcgggtgtgctgatattcgttcttcacgctaatcatctactcggaatgtggcagcgctataacctttgggtgctttccgcctctcccctgtttgcctggtttgtgcttatctgcttacgtgggtgggtgtacaacgatgctgtcgataagcatgagtttgaggctaaggaagcggattactcgcagcagcagtggactgaatgggcggggcgttacctggctgtcttattccgtgaatccattctgcccgaaaaactgacccccgcgcaatttatgacgccagccgaacgggagcaacatatcagccagagtttacgtgttgatatagacagcgatggcgaagcgattaccgcattgctctgtaatctggctgagccattaacacggctgccagccgatttgtccctgaatgtattcctgctgactgattcacctgcagacaacgctgaattgcaggccctctttgaaacttgctggcgccacctgatgcccgcagagcgcccggttccggcactggatatcatgcgttcatattccttcggggccgttgagcgtcgtattaaaacaccggatatctcagcagagctgattctggttcagcaactgaatggaggtgagcgctacagcgatgcgctggcctgcctgttgctgacctctgatgatgtggcgactaaatacgaactcacccatgatgtgcgcctgctgcgtccgatgcagcttgaaggcgatgacctgctcagtgagctgggcctctatttttccactcagacccaggctgccgccacgcagcaccttatcggtgatggtgcccactggggaatgtcgctttccacactgtggaaggccagtgagccctatggtggtggctggaaagcgggtcagccgtactggctggagagctacgccggaatatgcgggccgttttccccctggatactggctgccgtggtcagtgacgtggtgcagttacagcaggcagactgcctgatgctgtctgaaagtgaagggcagcgttttatcaataccgtgacaacagggaataagcatgaaagcagctga

SEQ ID NO: 102483 - DNA, 267 bp, Enterobacter aerogenes
atgtcaaaaggttttgtattgctcggtgataaaacaactcacggtggtgaagtgatttctgcctcttcatccatgatcgtgaatgataaaactgttgccttaatcggtgacaaagtgagctgtccaaaggaagggcatggcattaatgccattattgaagggtcgtctgaatggtcatccagtggtaaagccattgttgtggatggctgccattgtgagtgtggttgtcaggttgtctccagtgtgccggattgcgcgataggataa

SEQ ID NO: 102484 - DNA, 894 bp, Enterobacter aerogenes
atgattaagaagctaataggtatcgcaatgggattctgttttctgaccgggtgcgatcagggtaatgctaccgctgatgctcaggccgcgaaggcccttgcagataagtccgtcgcgaacatgatccctgttcagggaggagggtttctcatgggggactttggccccttggtgaaagaaaaactaccgttcagtattcagcaggatgataagaagctgcataaggtagttttgagcgactttgcgatatcgaagttcaaggtgacgaatgcggattacacggcttatctgaagtctgcgggaataaagcctcccccagtcaatatattgttgaaagattatccatcaatgacaaaggatgattactctgttggtgtaacctggcaacaggctaaagattattgccagtggttgggtaagaagtcgggtaaaaatattgacctacctaccgaagctcaatgggaatatgctgcgaggtccaggggacaatatatcccatttgcaaccaacaacggtaagtttgaggaaggtaagaatatccccaacgaagatcaactggatgaatacaccgatggttacgggtttcccatctaccccataggcaaataccccccaaacccattggggctttatgacatgggcttaagtggagctgaatgggtgaatgactggtacgcatctgactattattcgcactcccaagtgaatgaccctcaggggccaaagaaaggcacacggaaagtattgcgcggatatgttggtggtgacagccaatatgccctaactatgttcagacaatcgtctcaaccagtacctaaattcggggggcgcgataactatgaaaagtatggggtgagccctttatacgtattccgttgtgtgatgaataagtag

SEQ ID NO: 102485 - DNA, 2271 bp, Enterobacter aerogenes
atggctacgggaacgcaaaccagcaaaacggataatgtgagtaaagggacaattgtccacggcgtcagtgaacctcaggtttattttcatccaggtagtgccacgctgttgtgtgtggatgcaaaggacaacagcgttatcgaacaagagcacgcgaaactgtccgcattgcttgaagctcaaaaaaaagcccagagtacactggacagccttaattatgacatgctgactcaggccggaacaaaaccacagcgggcctatgatgctaagttacaacaggcttatgaagacctgaataaagccaatcagaagctgacagcagaactgcaggttcttactgataacgtccctgaaggtgagctactggatgagaattcgaaagaatcagctattgggatcatggaactcatccccctgaagaaagtctctggttttaaaatgacgcatattcgttcagataaaataaaaagccactggaaaaaatataaattaagtgaagtggataaagaaagcggtgaagccagcttcattaagtatgagaataaagaaatctccgctcaggatgaaaatggcaatgacaccaaaaagaccgtccgttccgggaaagtggatgctgaagagttaaagaaacaatttaaagaagcctcggtcagcctgaagtttgaggatgagcttctggaagacagtaatgttgtcctgactgactgggcaaagaaaatgaataaaggactgtcatggccgggtgagagtgataagcctgatgatgactcaacttatcatcagtatgctgatatcagtgctcaggcgcagttaatgcgttacagccagggggcggggttatcagcagaatttaacccgctggaaaagaaagtctcggcaaaaatggaaggtcattcaagctttgcgctgggcgaagcgaaagcctctgcggcactgtatattcctgaccggcttgggatcaatttgttgtttccggcaaaggcagaagcaaatcttcccggtggcgtatgtaatatgggggcgctgcgttactccatcatcgcaaccctgtcaggtaatgccggggccagcctggcaatagaagtgggtattgaagctgatgccagtggtgaaatggccaaagggtatgggattaagggaagcagagctcagttgactcccccaccacaaccagggcagcgtgaagttaatattgcaactccatttaaacctgaagttcaggctggtggcgagattggtgcatttgcggggattcaggtcggcggtaatgttaagggcgctattgaatggtttgatccgcatccgggagatgttaaagatgaaaaaacagattctggaaacctggtagtacctaaagagaaaaagtttgccactattgccacactgactcttggggcgaacttccaggctggaataggtggttcaggtgttttttacataacgtacattaatagtcgtttcagaatttactgtaaagcagccctgtgttggggagctggtgcgaaaggagagttaggatttgaggtggatggtaatttatatctggcatttatgaagagttttctttatatgctccgcaatgtggactatcagaaacttgaacagatgatgaagggagatgccttccaagcgttgtgtgctattccgttagtcatggcagctcagggtattcaagctattgacgcaatgtatgaagaatcttcgaacataattgatgggttaaaattagatcttcaggatgaaaatacccgagttaagttaatgaaaagcatccttagtaatcctgaccaactgaaatataccccaccagagacaaagggggccgtaatcgccaccctgatagacagtaactgggcggattgggttgatcccagaaatcagaacaatgattttttctcggttaacagctggaaaataggccctttgaagctcagaaaacaggccgtttttaaggcgctaaaatgggtacagagccaggccgattacaacaacgtcatgcagcatctgagtaagtcacctggcgagaaaaaaggtgactacaagcgaaatgaacaggatgtcatcaagttccttggtatcggtgaacggaatctgtttttctacactcactatggtgaaaaactggcgctgttatacggtaatctgcctacctctgttgaccacgacgatccttttgtcccgatccccgaccatcaaatggacgaataccttgcgatggtggatgaacaacaccaggtaaatcccctcatgaacaacactatgatggcgtaa

SEQ ID NO: 102486 - DNA, 2517 bp, Enterobacter aerogenes
atgagcctgaccagtactctcaacgagttagcatcacacctgaccggtaaagccctcaaccgctaccgcctggatatcccgtcgtgtacggcggatatcgacgtggaagatttcagcggctcggaggcgatgagcgagctgtacagctataccatcagttttaccagcacgaataaggatattgatgcccgccagctgctgagcaaaccggccaccctgacgatgggtaccgggcaactgatgagcctgaccgaccagaaagtggtgccgggcgtggtgacgcactttgaacgcacccgcggctcccgtgaccaggcacattacactatcgtgctggagccgtttcttgcactgctgggcaatcagttccgcacccaccgcttctttgtgaacaaatcggtgccggaggtggtgtcgcaggtgctgaatgaacatggcctcaggaactgggaatacgaatttaagctgaagcatgactatcctaagcgcgaacagataaaccagtaccaggaaaacgacctggcgtttattgaacgcctgctctcggaagtggggatattctttttcttcagcgtacagccggatacacaaactgaggtggtgcattttgcggatgaccagagcgcctggacgtttggtaaaaagctgccactgagcagcccttccggtgcgaatgacaatgcggccgactctgtatggggcgtgaacgtctggcacaacgtggtggagcgttcagtcacggcgaacgactataaccatcgcgaagcccagaacatcctgctgtccgccccggcggatatgacccggggcgatggtgatggcgtgacctatggcgaggtgtatctctaccgcgcccgccacggtgaacgtggcgacaatatcgacccggtaaccgaaacggcgaacttctgggcgcgtctggaccatgaacgcttcctctgtggacagacgacggtgaacggcagcagtaccgatgccagtctggcgccggcacaggtgctcaccatcacagaatcgtctgttccccccacgctgccctcttccacggaaaacggggtggtgattgtgagcacaggcttcacggcgagtcgtaagaatgccctgcgggtcacctggtcggcgatgccctacagcgaaacccgctgctggcgtccggagccgaagaaacgcccggtggtcagcggtaccctgatggcccgcgtcaccagcgccaaagagaacgacctgtatgcctggcaggatgcgtcgggcctgtaccgggtgaaattcgacgcggaccgtgatgacaaatctcagggccaggaaagtatgccggtacgcctggcaaaaccctacagtggcgataaatacggttttcacttcccgctgatacaggggacggaagtggcgataggcttccatgagggcgacccggaccgtccgtatatcgcccatgcactgcacgactcccgtcacgttgaccacgtcaccgagctgaacagcacgcgcaacgtggtcagaaccgcgggcctgaacaaactgcggatggaagacaagcgtggtgaagagcacatcaagctcagtacggaatacgggggcaagacgcagctcaacctgggacacaatgtcgatgccagtcgtactctgcgcggcgaaggggctgagctgcgcaccgataaatacgtcgccattcgcggcggagccggtgtgtttatcaccgcagacagccagcctgcggcgggtggaaaaatactttccatgcatgaagcggtttcccagcttgagaatgcgctgagcattgcaaaaagcctgtcatcagcggccgaaaccgctcaggcgttgccctccgataccgcaagccaggatgcactgaacacggcactcaatgaactggctcaggccggcatggtgctgaatgccccacagggggtgagtatcaccagtccacaggcggtccgggtggcatccggcagtgccagcgtgggcataatgtcgcagaagaacaccgatatcagcgccatgaagcgtttcacggtggcggcaggtgaagccgtcagtatgctggcgcgaaaggcgggcatgaagctgtttgcagcaaaaggaaaagtggaaattcaggcccaggatgacggtcttgatgccatcgctaaaaaggatattacggtcaccagcgtggaaggcaaagttgaaatcacggcggcgacagagctggtggttaactgcgccggggcttatatcaaactcagcggcgggaatatcgagctgggatgcccggggaatatcctgatgaaatgcacgagtgttcagagaatgggaagtgccgattacgatgcaccaaaacctgaactgccatcaggatacagcgaaagttttgttgcacaggataaaaataccggagaagtactggcgaatacgcgttaccggatcacgacgggagatggtgctgtttatgaaggtcgcacagacgaggcaggcaacactgccgaagttttttcgggtgctaaaacagcggtcaacattgaactgctcggcgattaa

SEQ ID NO: 102487 - DNA, 231 bp, Enterobacter aerogenes
atgatgcgcttgcttctttttattgtcctggtcatcgccgggatcgtcttactcccggacgggagactggttgattttgttgtggagcacgtcccggttcccggcgacggcgaagccggaatggataacctggagatagtcgtcatgggtcttaagactctgctcagtggcgtcggagcgtatctcatcctgaaaatcgcgcgctggctgcacatacgatgtcagaaataa

SEQ ID NO: 102488 - DNA, 618 bp, Enterobacter aerogenes
atgcaaatctgcatgatgaattatgatgagctctctgctgatggcaaaaccgcttacctccattgttatggcatcgggacctttgccgtactgtcaggtcctgagcgttacatcaacaatcccgactgtgccgaccatgagaaagccgctatcccgtctggcacgtactgggtgaccgaccgccctgcgggcagcctctataaccgggtccgggctgaagccatcgatgccgcgcatcgctggcgtaatcaccatactgacgggtttgcactgctcagcgataccattaaacaagaccatatgctggtcaatgaggtggggcggggtggttttcagctacatcccctgaacagtgacgggaccggtgtctcccggggctgtatcacgctcaggaactacagtgaatttcagcacctgcgtcggctgttacttaagcgaggtacctttcccgtacccggtggtcatggcctgatggcgtatgcccggattgatgtgcgcggtacaccggatttcagtcggtgcgaaaaagagcggaaaaagaagggcctgaagggaaaggccgagaaagcacgccaggactttcatgccctgaagatgaaggaggtaaagagaaaatga

SEQ ID NO: 102489 - DNA, 2649 bp, Enterobacter aerogenes
atggaacatcattcagcagtcctgttacgtcgactgaatccgtactgcgcgaaagcgctggaaggggcagcctccctgtgccagacccgtgcccatgcggaaatcacccctgaacactggctgttaaaactgctggagcagggtgagagtgacctcaccgtgctggctcgtcgctacgagtgggacatgaatgcactctggcaggatttactggcccatcttgaccgtctgccgcgttccgttcgccatcgccccgaactgtcggataatctggaagcgctactgaaacaggcgtggatggcggcatctctgcagggggaagagcaaatccgcagcctgcacctgctgaccgcgctggctgaaagcccgacgcttgtccactgtgacggtctgtggccgttactgacaccgggaacaaaccagctggcacgcctgcgtccactgctggacaggcagtccgatgaacgccctgaagtgcagcaggaagccggactggggcacgcgggcggcgatgtggaaatggtgggccgtccggtgggggctgagatgcaggaaggcgaactgtcgccggcactgcaaaatgcgctggataaattcaccctcgacgtcaccgccaaagcgaaagaaggcaaaatcgacccggtgtttggtcgcgataccgaaatccgccagatggtggatatcctctcccgccgtcgcaagaacaacccgattctggtcggcgagccgggcgtcggtaaaaccgcgctggtggaagggctggcgctgcgcattgccgagggcaacgtgccggaaagcctgaaaaccgtggtgctgaggaccctcgacctcggtctgctgcaggcgggtgcgggcgtaaaaggcgaatttgagcagcggctgaaaaacgtgattgacgccgtgcagcagtcgccggtgcccgttctgctgtttatcgacgaagcacacaccatcatcggagcgggtaattctgcgggtggcgcggatgcggccaatctgctgaagcctgcactggcacgcggcgaattgcgcactatcgcggccacgacctggtccgaatacaagcagtattttgagcgcgatgcggctctggagcgtcgtttccagatggtgaaagtggatgagccggacgacgacaccgcctgcctgatgctcaggggcctgaaatcccgctatgccgaacaccatggcgtacacattaccgatgatgccgtccgtgccgccgtcacgctctcccgtcgctacctgacgggccgccagctgccggacaaagccgttgacctgctcgacacggccagtgcccgcgtaaggatgagcctcgacaccgtgccggaagcactgacgcagtctcgcgcgcggctcactgcgctggatatcgagaagcaggcgctgctggaagatatcgcgctgggcaacaatcaccacggcgaacgcctgagtgccattgaacagcagcagaacgacctgattgtcgaactcgatagcctggagcgtcagtacggccgcgagctgagtctgactgaacagctgctcgacgtgcgccaggacatcagccgtcagacggatatcaataacctgcaaaaccagctctccgcgctgcagggctacacgccgctgctgtcgctggacgtggacacccgcaccgtggcgaacgtgattgccgactggaccggcgtgccgctctcctcgctgatgaaagacgagcagaccgaactgctgaccctggaaaaggaaatcggtaagcgcgtggtcgggcaggacgtggcgctgaacaccatcgcccagcgtctgcgcgcttccaaaaccggcctgacttctgagaacggtccacagggcgtgttcctgctggttggcccgagcggcgtgggcaaaaccgagaccgcactggcgctggccgacacactctacggtggcgaaaaatcgctgattaccatcaacctgtctgaatatcaggagccgcacaccgtttcacagctgaagggttcccctccgggctatgtgggttacggccagggcggcattctgactgaagcggtgcgtaaacgtccatacagcgtggtgcttctggatgaagtggagaaagcccaccgggatgtgatgaatctgttctatcaggtgtttgaccggggttttatgcgtgacggcgaagggcgggaaatcgattttcgtaacacggtgattctgatgacctctaacctcggcagtgaccacatgatgcaacttctggacgaacagccggaagccagcgaaggcgatttacaggaattactgcgccccatcctgcgcgatcacttccagccagctctgctggcccggtttcagacggtgatattccgtcctctcagtgaagcggccatgcttaccatcgtgcagatgaagcttgcgcaggtgagccagcgtctgcatcgtcattacggtctgaaaacgcacattgatgaaagcctgtacgacacgctgactgccgcctgcctgctgccggatacgggagcccgcaatatcgacagtctgctgaaccagcaactgctgccggcgctgagccagcaactgctcagccatatggccgcgaagcagaaacccgcatcgctggcgctcggctgggatgaagaggacggcattgtgctggcgtttgatgcgataagcggtgactga

SEQ ID NO: 102490 - DNA, 492 bp, Enterobacter aerogenes
atggcaattccggtttatctgtggctgaaggacgacggtggtgcagacattaaagggtctgtggacgttaaggatcgtgaaggcagcatcgaggtcgttgctcaggagcatgacctgtacatcccgaccgataacaacaccggcaaactgaccggcacccgtattcacaccccgttcctcttcaccaaggaaatcgactcttccagcccgtacctgtacaaggcggtgaccaccggtcagaccctgaagtctgcggagtttaagtggtacaaaatcaacgacgcgggccaggaagtcgagtacttcaacacgaagcttgagaacgtgaaagtggtgaaggttaaccctgaaatgtacgacatcaaggatccgaccaaagagaagcacaaccaccttgagcgcattgagctgcgttacgaaaaaatcacctggacctataaagacggcaatatcattcattccgattcctggaacgaacgcgccacggcgtaa

SEQ ID NO: 102491 - DNA, 1725 bp, Enterobacter aerogenes
atgcgagacagttaccggagtctgctgacagcactgactgccgtcctggcaatgtggcttatcctcggcttctggccactgtcggtcggaagccgtgtggtcctgagtctgctggttattctcattgtcggggcgatgttctggcgacagtggcagatgtcggatgcccgccggaatgcgccgggtatgccggtggaggcatcactgccgccggaggattttcagggcgcggtggtcctggtcgtcggggacggtgcttcgttgtttacgccggaacaggcataccgtgaaacccggcagggctggtatctgcaggtgaatgacgcggcacagcttcccctgctggcgcagcatctggcaaaccagcgcccggccctgatttcacaggtgtcagtgctgctggcggtgatccctgagcggcacgtatctgtggatgattttacccgggcgctgcggggctggcagcgtgccattgttcagtgtcgcccgtggctcagcggtttaccgccggtctggacggtgtgctgggtttccccacctgatgcaggggcgacggagacaccgctctggtttatcacggcagacacccgccagggcattcaggcgcatcagcccgggatgggcaatatgccgctcacgcactggctgacggaaggcggggctgagggacggtttacccggcttacccgggtattgtggctggaagcgctgacgggctggttccggccggcggttgaaagcctgctgacaacccacctgaacgcactaccgtcactgaccccctgtgcctggggtgtttgtctggtgccagtgaaagggcaggacggcaacctgtggcagcaacatatagacgggctgacggctctgaaaccgctgccgggcacgtcttctgacgaactcccgcttcccgaactgttgttatccggtctgccccggcgcagaggcatcagccggcggatgcagttcctgcgcatggcaggtgggctggcgggtgtgttcctgacgctggcgatgctcgcctcgtttgtaaacaaccagcgtcttatccgcaatgtggatgaccatctggcgctctatcagcgcctcagtggtcatcctgcgccaccaaaactccaggcgcagcagcgtttacgggcggacgggcgtctgctggatgactgggtgcgccgtggcgagccggtacgttaccgcctgggtctgtaccagggcctgcgtctggtgccaccagtggaagccgcggtcaatgactgggcaccgcctcctccccctgcgccggttatcaaaaaaattgtgcagggaccgaagactgtgcgcctcgacagcatgtcgctgttcgataccggccagtggcagctcaaatccggctccaccaaagtgctcatcaacgcgctggtgggcatcaaagcgaagcccggctggctgattgtggtcgccggtcacaccgacaacaccggggacgatgcgtcgaatcagacactgtccctgaaacgtgccgaatcagtccgtgactggatgcgggacaccggtgacgtgccggaaagctgttttgcggtacagggctatggcgagactcgccctgttgccaccaacgacaccccggagggtcgtgctcagaaccgccgggtggaaatcagtctggtgccgcaggccgatgcctgtcaggtgccggatacacacagcgtcgcggagatccgcggcacatctccacaaccaaaacatttttaa

SEQ ID NO: 102492 - DNA, 654 bp, Enterobacter aerogenes
atgaacaaaaccgatttgagtcagattgagtgcatcttttatcccggctggctgatggcaagccagcttcggtgtggacaggaagttcaggagggcgaggcgttataccgtcgggccagccagttagtgaaaaaggccggagaacagctgacggaagcgggttacagcgacgcctgccgggatcacatgctctatgccctgtgtgcccttctggatgaaagcgtcatgaaccggggaacaaccgatgacggctatctggtctggcgacgcgatccgctgcaggcccggttttttggcaccctgaatgccggggaagagctgtgggagcgtgtccgtaccctgcttaaggagcctgcatccgatatcgccgtcatgacctgttactaccggaccctgcgactgggatttgtcgggcagtaccgggaagaaaacgacgaacgtcgcgatgatgtggtgcgtgcactcggtgagcgggtgcctgctttttcgctggcacaggatgctccgctggtgacccgggcgtcacggctgcgcagcggacgccggatgtactggctttcctgggttatcggggcagccgtactgattgcgctctggtttgtgctgtcttcctccctcaccgatatggtgacgcagactgtcaggccggggtaa

SEQ ID NO: 102493 - DNA, 1338 bp, Enterobacter aerogenes
atgaagatttatcgtcctttatggactgacggggccgagctggccccacaacagtttcagcagcaggcctgctgggatgcctatctgtcggacaccgtggcccgtaccggactggttcatccgtggggagtgatcgccgcggagtttgacgatgcagcgctggtgctgtcccggctgaatgccacccggatggttgtgcgttttccggatggcacggtggtggacacagatattgccgataacctgcctcctgtctgtgatttatcagcagcaggtggggttgattccattgaggtactgctggcactgcctttgctcagcgcgggtggtcagaatctggacgacggacgggacagtgaacgtccccgccgctggaaagcagagcgcgtggtggtacaggaactgtccggccacgagagcagtgagctgaacatcctccggcatgcggcaaccctgcgtcttgccacccaggaaaataccgcttacctcacctgcccggtggcacgtctggtgcgtaacgcccaggggcagtggagtcgcgacctgacgtttattcccccgatgctgtcgatggccgccagcccactgatggtcagcgaactggcggatttgttcgtgcgcctgcaggcccgccggaagcggctgatgacgctgcgacgcgaaagcaatgaacggatggcagattttgcggtggcggatgtttccctgttctggctgctgaatgccctgaacagcgccgagccggtactggctgagctgctggagaccccttcgcggcacccggaatatttttaccgtgagctggtgcgtctggcgggcagtctgctgacgttttcgctggagcacgatgccggagatattcctgcctaccggcacgatgcgccggaagtggttttcccgccactgctatcgctactcgataagctgctggaagcgagcctcccgtcgcgtgtggtcagtattcatcttgaacacacaggcgaattctggaaaggcgcactgcacgatgcgcgtctgcgggaaggggcggatttttacctttcggttcgctcctccatgcctaatcacgagctgcaggttaaattcccgctgttgtgcaaagccggcagcctggatgaggtgtcggaagtgctgaatgtggcgctgagtggcatggtgattaagccactgtctcacgtcccggcggccattccgctgcgtctggagaaccagtatttcacgctggatctgagtacggatgccgcaagggccatgctggaagccagaagctgttcgttctataccccggcctccctcggcgaggtgaaactcgaactctttgcggtactgcgcacatga

SEQ ID NO: 102494 - DNA, 1545 bp, Enterobacter aerogenes
atgtccgtacagaatgaaaatgcggtatccggtggcgagacgctcgtccgggaacgttccaccgataacggggtgtatgcgtcgctgtttgaaaagattaacctgaaaccggcttccagcctgagtgatttatccgtgtggcaggacgaagcggcgatggccgatgctgacgccaatgaacgtatcacggccggcgtgcaggtttttctgcagtgtctgacgaagtccggccagaaagtcgaaaagctcgacaaaacgctaattgaccaccatatcgccgaactggactaccagattagtcgacagctggatgcggtcatgcaccacagcgagttccaggcggttgagtcactgtggcgtggcctgaaacatctggtggataacaccgattaccgtcagaacgtgcgcaccgaaattctggacattgccaaagaagacctgcgtcaggattttgaggacgcgccggagattatccagagcggattgtactggcacacttacgtttcggagtacgaccagcctggtggagaacccattgcggcggtgatttcggcttacgaatttgatgcctctgcccaggatgtggcgctgatgcgtaacatctctaaagtctctgccgcagcccatatgccgttcatcggctcagccggtccgaagttcttccagaaaacgtcgatggaagaggtcgccgccatcaaagatatcggtaactacttcgaccgtgccgaatacatcaagtggaaatccttccgcgacacggaggattcccgctacctgggtctggtgatgccgcgtgtgctgggtcgtctgccgtatggcccggataccgtgccggtgcgcagttttaactacatcgagcaggttaaaggcccggaccacgagaagtacctgtggaccagcgcgtcgtttgcctttgccgccaatatggtgaaaagctttatcaacaacggctggtgtgtgcaaatccgtggcccgcaggccggtggtgcggtgaaagacctgcccatccacctctacgacctcggcaccggcaatcaggtgaaaatcccgagcgaggtgatgataccggagacccgcgagtttgagttctccagcctcggcttcatcccgctgtcgtactacaaaaaccgcgactacgcctgcttcttctcggcgaactccacccagaaaccggctatttatgataccgctgatgcgacggccaacagccgcattaacgcccgtctgccgtacatcttcctgctgtcgcgtattgcgcactacctgaagctgattcagcgcgaaaacatcggtaccaccaaggaccgccgtctgctggagcttgagctcaacacctgggtgaaaagcctggtcactgaaatgaccgacccgaacgacgaccttcaggcctctcacccgctgcgcgacgcgaaggtggtggtggaagacattgaagacaatccgggtttcttccgcgtgaagctctacgcggtgccgcactttcaggtggaagggatggatgtgaatctgtcgctggtttcccagatgccgaaggcgaaagcataa

SEQ ID NO: 102495 - DNA, 492 bp, Enterobacter aerogenes
atggcctcatatcaggaagagatacccaaagcccgcattaatctgaaactgagcctgcataccgggggcgcacaaaagaaagttgaattaccgctgaaattactgacggtgggggatttcagtcatggacgggaaacctgtccattatcggagcgtaaaaaagttgacattaataaaaataattttgacagcgttttgagtgaattttctccgcaggtcaatctgacggtggaaaatacactggccagtgacggtagcgaagaaaacatccggcttgccttccggactatgaaagacttcgaacctgagcaggttgcccgccagattccgcaattaaaagccatgctcgccatgcgcagcctgctgcgcgacctcaaatccaaccttttagataacgccgccttccgcaaagagctggagctgatattacgtgatccggcgctgagtcaggaactgcgtaacgacattgccgcactggccccgaaagactga

SEQ ID NO: 102496 - DNA, 405 bp, Enterobacter aerogenes
atggcccccactgaaccggaaacgcgcatcgaggcggtatacggcccctgtgaggagatttattgcgacgacgatgaggggcagcaaaagtatctgtttaccgacgtgctgccggagccgttcaccctctccgatgtggtgcgtgagctggtctactggcactggctggcagacctgcgttccgcagcagaggaagaactttatccgggacttctgacggaagggaccggtcagcacgtcttcgatcgtgaaaattatcttgaaggactgctggaaaccatccgaccacggcaccgggaagaagcctttgaggtgttgaagtggtatctgtcgtttgacaggtttcaggatatgggggcagacagtgatgcggtttatctgaatctgatgggtgttcatgagtga

SEQ ID NO: 102497 - DNA, 657 bp, Enterobacter aerogenes
atgaacccgaaccactgtattccacagggcatgacgtatgccggacgcgaacatctgaagcgctttatttctgcgtgcagcagcgaaggcgatatgcacagcctgacccgagccctgatgatggtcgctcactggatgcgccagcggcatcgggtgtcatttacggaatatgccagccagtggacggaggcacagaaagaccggaccgatggcaaccattccaccccggtgatggcagaggcatggcctttcagcggtaagcgctgtatccgtccggcaggctctgactactggccgcagggctgtgagcaggtgcgggtggatgatgcaaccgaaatccgccacgctgtgaccgtcatcatggctgagtatacggcgtttaaccgtgacggtctgtcactctacagccgtgaaactgcctgggagcatccgctggactcgcccgtctttatggcggccgccatcagctgcatgaactggctacgccaccatgatctgctggaagcaaagataaaatcctttccgaaggataatcccacgtcttacgggcttaagcatgatgtggaacactataaccagcggcaccaccagcacgactctcagccctgctacattcccaacggggcgatgattgcggcgatggtggcgagtggataa

SEQ ID NO: 102498 - DNA, 225 bp, Enterobacter aerogenes
atgatgagcacaccattttaccgggtactccagctcacggcctgctccggctgggagctacagctggagggagaaagcgtctggcatcccatcgccgcctgggccaacgtggaaatgcgcattggcggcgacgtggttgaaattatcctgccctgtgtggcaacgcaggacggctgtcttgagccgaccgattctgcaaccgatatcaaagaggtgacacgatga

SEQ ID NO: 102499 - DNA, 1722 bp, Enterobacter aerogenes
atgaaaaatgcgccgaacctgaaaaagctgccgaaagacaaattcaccgaggcgattatttttgcggggactgatgcctggtcacatgcgcagcactggactgaaagcgaaggcaaaaagcacggcgacgatgtaccgcctgtctatcttggtacaagccagctggtgtcgctggctaatctgcgcattgtcgataaggggcgacgctctgcccgcgtttatctggcaggcgatatcgaaccgatagcgattaacgtcattgccgaaaagctggcggtggcgggcgtggttgacgcctggctgtataagtccatcactgacccggagccggagaactggcgggagtatctggcccggttgcgtgagcaagccgcgtgcggcgtgagcctggtggaggattaccgccgggccggggggaaatcatccggcgcggatgaactcatcaccggcgaaaccctcagcccggaagagacggccatgctggaggccatcaaccgtgactttacccatgtcactattggcgggaagcacaaggtggtctcccttaaaccgtcgcagacgggcggcacgacgcatgtctttgaggacctggcacaatttcagcactattttcatcaccagccccgcattgccagaaagctggcagggacagcgtggcagtcgtgggaggggaaaaactataaacccggtggcgtgggcttttacccggtgccggagaaatgcccgccggacgtgttcaatctgtttgaccgtctggcgctcgaccccgttgaaggtgactgcaccccgtacctggaacacctgctgagggtggtttgtgccggaaatcaggaggtctttcattatctgattcagtggatggcgcatctgatacaacgtcctgatgagaagcccgccgtggccgtggtgatgaaatccgttcccggtacgggcaaggggaccgccgtccgtcccctgctggatattctcgggcaatatgctgcccacattaacggtgccgggcatatcgccgggcgctttaacgccattctggcgaacaaagtgctggtgtttgccgatgaggtgaccatccgcaaaccgtcggaggccgacaggctgaaggccattatcagtgagccgacgtttaaccttgagcgcaaggggattgatgccgaaccgatgcccaattttgcccggctgatttttgccagcaacagcacgcaggtcttactggcggggatccgtgaacgccgttatctggtgctggagccatcgccggaatacgcccagcaccgggggtatttcgaccagctgcatgcgtggatggcggacaacggcccggcgaaactgctgcactacctgcaacgggtggacctgtcagactttgacccgcagcgtgcgccgcagacggacgccctgcgggaagagatcctgcacggtctttccggcgtggagctgttcctgtacagcgaactggcgaaggtgcccccctttaacggtgaagtcagactgtttgcaggcgatatggtgaaccgctttatggcgtggtcgctggagcgtggggagaaagtgaaagacacggccgcccgttcgctggtgggcaaggcgctggccaatctcgagctgaagaagcagggacgcgctgaccggggccaggggattttctacgaactgccggatgtgcagacgttacgggcggcctttgcccggctgattgatatggaaggtcacgatgttttttaa

SEQ ID NO: 102500 - DNA, 282 bp, Enterobacter aerogenes
atgcttaacgcgttttgcatgaacgcagcaacggacccgccagtttgttcccggctggcggagcccgcgttacggcgactcatcagcatggagtgtgccctgaacaaaatcggcgcgctggcggcggcgtatctgacagcagagggcgaacgtcagctgctgatggagatcatcgatgttatccgcgataccgcacgccggatgacagacgataagccggaaagcggtgcctttcccctggctgacggagagcatcgcgatgcgtgggagggggaggaatga

SEQ ID NO: 102501 - DNA, 294 bp, Enterobacter aerogenes
atgaacaaaaaattcactggcttcactgccagcggcctctctcatcctgattacatggagacggtcggcgaaaaaatccgtttgcagtcggcgatcaccgcctcattgctggaatttatggtgatgacgtttgaccacgagtcacccgagcagaccgcgctgctgtgggatttgctggcactggcggcagaacgcgttattgagctgaccagcgccctgaacggcgtggagatcaatgcaccgggcacggtccggcgtatcgcccccgcagaaggaggagaaaaacatgcttaa

SEQ ID NO: 102502 - DNA, 222 bp, Enterobacter aerogenes
gtgcaatgggaaataaacgtaatgaaaactgaaacccgaaaaatcctgctgattggcgaagtgctgggcattatgcgcatgaagtcaaaaacgtctctctatgacctcatccataacggcggctttccccgtggtgtgcgtattgggctgaagcgtcgcggctggtatgaggatgaagtgtacgcctggatcgagcaggacggcgtgcgccgtgatgaataa

SEQ ID NO: 102503 - DNA, 627 bp, Enterobacter aerogenes
atgcgagatagtattctcaacattccgccgtatttgcgccgactccctatcatctcctctgagatggtcgcgcttgcaatggctggtgaatattccctgcgtcgcctcactgatattgacaaaacgcgaagacctgagctctgttgggcagcatattgttttcatgactgcattatgtgtgcgttaaaaattggctctcttgttgctgaacgttctttcatcagagaggataccgggaaggcttatgcaatattctattctcatattatctggccgtgggtgcaggcagaattatcagatgacaacccgtggttcggtgccaacaaagagatactcagcctgcctgcttcccggtctttgcttatcgaaccttcttcccattcgcactgcaacaacggtgatacgcaaaagtggctgacagtgagtctggtgcagatgatagtgaaaaaaaaccacaaggcttatcttcatggtcaaaagatcaatgtcagcgcactggcacgggatgcggctgcggaagcggcctctctcctttcctctgatgctgacaaaacagagtcctttcgtaaagcgatctccgaagccctcaacctgatgacttctgcaacaaccctgactgacaaataa

SEQ ID NO: 102504 - DNA, 1242 bp, Enterobacter aerogenes
atggcgcgagtcaccacccctctcaccgcaacagaagtccgcgcagcacgtccggctgaaaaggaatacaccttacaggacggcaacgggctttatcttctggttaaacctaacggcgctaaaatctggcgcttcaactatgtgcgccccggtgataaaaagcgtgcgctggtcagtttcggctcgctggacgacgtagcgctggcagaagcccgtaaacgtcgcgatgagtaccgcacgatggttgcggcaggaatcgacccacaacaccaccagcaacggcaacaggcatccgaacaattacgtcgggggcataccttccgcaaagttgccgctgactggtacgaaatgaaacaggcgcagaatcttgccgtcaataccattaaagatatctggcgctcgctggagaaatatgtgtttcctgatatcggtgatatgcctgttaccgaactgactccccgccattttgtcacgctgctggagcccattaaagcaagggggaatcttgaaacccttaaacgtgttttacagcggatcaatgaggtgatggattttgctgccaatagtgggttgatttcgtcgaatcctgcaaccaatgtccgcaaggcgtttcctaatccgctcaaaaaacacatgccaacccttcgcccggagcagttacctgaactgatgcaggcgctttcggtggcctccattgaacgccagacccgcttactgattgaatggcagttactgacagtgacccgcccggcagaggccgcagaggcccgctgggatgaaattaatttaacggcgaaaacatggactatccccgctggtcgaatgaagatgcgccgtgaccatgtgatcccgctttgtggacaggctctggcagtgctggaaagcatgaagcagatcagtgcccatcgtaagcacgtttttcccggtttccgggacccgctacagccaatgtgcagccagaccgccaatgtggcgttaaagcgtatggggtttaaggggctgctggtgtcgcatggtctgcgtgccattttcagcaccgctgcgaatgaggaaggctttgagcctgatgttattgaggctgcgctggcacacgtggacaccaacagtgtgcgccgggcatacaatcgcagcgactatctggaaaagcgcgtgatactgatgggctggtggggggcatttgttgaagcggcagccactggtgcgacaattgcctgtggttttcgggggctgaaggctgtctga

SEQ ID NO: 102505 - DNA, 741 bp, Enterobacter aerogenes; identical to SEQ ID NO: 90791

SEQ ID NO: 102506 - DNA, 1347 bp, Enterobacter aerogenes
atgacgttaatgcaatttagcgggctgttggtggtctggctgctgtcgacgctgtttatcgccaccgccacctggtttgagttccgccgcgtgcgctttaacttcaacgtctttttctcgttgttgttcctgcttacctttttcttcggcttcccgttaaccagtatcctggtgttccgctttgacgtcagcgtggcgccgccggagattttgctgcagacgctgctggttgcggtgtgcttctatgccatctactacgtgacctacaaaacgcgattgcgtccggcatcgcgcgatgttccacgtcgtcccctgtttaccatgaaccgggttgaaacccatctggcctgggggattttgatggggctggcgctgctgtgcgtcggtatcttcttcgcccacaacggtttcctgctatttaagctcaattcatacagccagatattctccgcggaagtgtccggcgtggcgttgaagcgcttcttctacttctttattccggcgatgctggtgatctatttcctgcgtcaggattacaaggcgtggattttcttcctggtgagcaccgtcgcctttggtctgctgacctacgcgatcgtcggcggtacccgcgccaacatcattatcgctttcgctatcttcctgtttatcggcattattcgcggctggatcagcctgtggatgctggcggcggcgggcgtgctgggtattgtcggcatgttctggctggcgttgaagcgctatgggatgaacgttagcggcgatgaagcgttttatacattcctctatctcacgcgcgataccttctcgccgtgggagaacctggcgctgttgctgcagaactacgacaagattgagttccaggggctggcgccgatgatccgcgacttctacgtctttatccccagttggatgtggcacggtcgcccgacaatggtgctgaataccgccaattacttcacctgggaagtgttaaataaccattcggggctggcgatatcgccgacgctgattggttcgctggtggtgatgggcggcgtatggttcgtaccgctgggcgccgtcgcggtagggctcatcattaaatggttcgactggctgtacgaactgggcaaccgggagagcaatcgctacaaagcggctatcctgcacagtttctgtttcggcgctatcttcaacatgatagtgctggcacgcgaagggttggattcgttcggctcccgcgtggtgtttttcctcgtgatctttggtatctgcttgttagcggcgaaactgctgtactggctcctggacagcgcaggattgattcataagcgggtgaagccgctttcgcaaccgcaggtctga

SEQ ID NO: 102507 - DNA, 1956 bp, Enterobacter aerogenes
atgtcagatatcaccgctaatgtcgtcgttagtatgccgaatcagctgttcacgctggctcgatcgtttaaagctgcgtcaggtggcaaaatctatatcggtcagattgatactgaccctgttaacccagccaaccaaatccaggtgtatctggagaatgaagatggttctttggttcctgttgctcagccaatcataatcaatgctggcggataccctgtttataatggacaggtttcaaaatttgttaccgtgcagggtcatagtatggctgtgtacgatatgtatggcacacagcagttttattttccaaatgtgcttaagtacgaccctgaccagtttaggcatgagttctatgagaagttagccgaattagctggacccggcggcgcgggcatgatcggcctgccttatggcggtacggttgaaagcctgatggctttcttaactccggagatgttcggcgcagtaggcgatggggtttctgacgacagggtgccaattcaactggcgatcaacaaagccaatgagctttataccctgacgggagggaggtgctcagtagtcttagggcaaaaaacttacatcgtttcgcagaacccatcatcaactgcgataaatggcgaggtttcagcgggatttggatgcattaaccttctgtccggagtgtgccttaaaggtagcgggaaaataaaacttaaggccggaacatcaggggctaaccctggagcaattatcactaactggacagggccatgcattgattctgaaatagaaggaatttcagttgatggtaatgcatcagaaattaccgcaacccgtatggttgcaatcaacctggtaaactgcaccagaacatcactatataaacttaaggtttataacaccaagggtaccgccggcggaatctatatgcgccgagacgggttctctacatctgactatggatgcgttgaaagccgcatcatgaactgcgatgtttatgatatcgcctatattgggatccaagctgagcgccctgacggaatcatcatcactggtaataatgtcttcaacactggcgataacgccattgatatagaaggtaacaacgcaagcggaagctctggttttggtaagcagatggttatctctaataacgtttgcagaaacaacaagaacggaattttcattgaatcttgctctaacgctaccatcactggcaatgatattactgaccttggcgggatcggtattgtattgaaccgtattaataccggttcatttaacaacatcatctcaaacaacaaggttacaggtctatctactcagctggcgtatggagtaagggtgatcaacaactctggtggttgtaccattacaggaaaccactttacgagcctgtattcatccataaaattcaacgggcaagcaacaagggtgtatgttggaacaaacaatcactccagcattgcaaagttccttatcgaactggaggccacggcagcattccctacagcgctatatcgttcatttgttgcccgtcagttctatcaaggaactcaaacaaccggtctgcctgcgccaatgtctcctactggatgtccgagcaacttcccaaacagatttaacactagcacttttgaaagcgctcatttctccgacctaaacagcgccggagaagagaatatggtgtacagaacggcaaatcttactctaaacgtctcatggaatgcttatgctaggttcaacaatacaacgacaggctacacagatttgaatggtaactttggtgtggttggcgatttccttgagatatcaggaaatgtttatcaggtgtatgccgcatcagctagcacgaccacgataacgaagtgggacgccacgtcatcatcctatattgcaggtaactttgtcgcagacttcccgagcgcactgctagtaaaaacccacaggcctacgtggggaactctgtaa

SEQ ID NO: 102508 - DNA, 255 bp, Enterobacter aerogenes
atgtacagcaaatacgatgaggcgcagttccacttgaggcttacgcacgaactacacgcgaagattaagcaacgcgcgaaaatgaacaaccggtctatcaatgctgaaatagtggctacgcttgaggagtcacttggtaggccttccccagtatctggttttagggatgaagcagaaagagaggctgacgttatatctcaagaggttaaaaatctggtgtttgagcggcttagtgaacattacaggaaaaaatag

SEQ ID NO: 102509 - DNA, 2376 bp, Enterobacter aerogenes
atggcaacttacagagagcttctggagcaggctggcgctcgccacggaatcccggaagggctgatgacacaactcggaggaaaagaatcctcttaccgccctgatgcggttagtagcaagggggcgcgcggattaacccaggtgatgcctgatacataccgtggtatgggatataccgatgagcagatgaaaaatcctgaatatcaggctgacgctggggcaagatacctctctcagatgtatcagagatttggcaattggcgcgatgcgctgcaggcttatcacgatggtccaggtaatgtggaaaaggcaaagcgcggtgagtacacgccaggtccagaggggcgacagtatgttgacaatcgattcagtcaatggactggagacccttcaaccaataatgatgtagagcagcgagcgacatctgcaaaacttcatcctcagcaagatccggataacccttttgcgcaaatcgagtctcaggcaacaggaaatccagttgagtctcacgttcaggacgatccaaataacccgtttgcacagattgaacaacaatcagaaaccactcaacatccggtacagcaacaaactcaacagccacagcaagggcagcagcaagagcagggtttcatgtctgaccttggcaatgctgtcgctgaaactgggcgagggcttctgcaggcaggcgttaatgttgtcaacattcctgcatcagtagcagatgccgttaccagcgccggcgcatgggcaggaaagcaacttggtattggtgatggaacttacatgccggcgccaagagtgaccactcaaggcctggagcaggggcttggattgcagcaaggaactctcacccctcagactacggaaggcaagattttttctgaggcgttgccgtatctaactccagttggaatagagagagtggcttcacaggctccaactgttgctggaaggattgctgaaggtgcatcacgacttctggctgagaacgccgttggttctttggcggcaaatagccagcaggataacgcagaaaaccttgccacagaccttggtcttggtgtcgctactggcggattagttaacgcggcaggaagaggattaagcgctgcgtatcgcggagcaagaggtgctattgcaccagaggcacagcaagccattcgatttgcagaacaggaaggcgttccactgcataccactgatgttttgcaaccgcaatcccgtgttggtcgcatggcacagactacagcggagaacatcccatttgctggaacaagcgccatgcgtgcaacccagcaggaagcaagaagccagctagtccaggattatgcgtcacgtttcggtgagtacgatccatctgttgtcattggcagcctgaaagcaaaaacatcaggaatcagaagggcggcaggaaatcgtcttgaacagattcaaaccgcaatgacgggggtgaatatccaaccgtccagagcaattcaacaaatagacgatgagatagggaagctgcaaaagttagggcaagttgccgatactgatactatcagcaaactccagtcatacagaaatgagttagctaaaggagatattgatcttgagcagctaagtcgactgagaacacagttcaggatggatgttagaggcgaacgtacacatatgccgcagccggcagaggcagcagtacagcgtgtgtacagggcgatgacaggagatatagataactccataggtcagaacctgggaaatgatacccttcgccgctacaagcaagctaatgctgtatatgccgacgaagccaataaattacagaatacgcgccttaagaatgtcttaatgaaaggtgatttaaccccggaagtggttaacaacatgcttttcagcaagaacaaatctgaggttcagaatctgtataactcagttggcagaattggcagagcgcagatgaggaacggaatcataggtaaagcaatggagaaatcagatggctctccagatcagtttcttcgtcagcttaacatcatgtcaaaccaaaccggtatcgcgttcaaaagtcaggatgcggcatacattaaaggattgaaaaactatcttgattctaccaggcaagcatctaaagctgcagttaccacacctacaggacagcagactatcccatttattctagggataggctctgttaccaacccagcattgataggagttggtggtggatatgggattcttgccagaatctatgagagtgaggctggaaggaatgcaatgctacgcctggcaaataccccacgcggctctactgcgttcgagtctgcactggctgatgctcagcgtgttatcaacgccatagcgcaaggcgcgaagtcagaagcgttaagcgaataa

SEQ ID NO: 102510 - DNA, 1338 bp, Enterobacter aerogenes
atggctacctggcaacaaggtatcaactccggcggatttcttgccggcattggtcagaataaccagaacgcgccgcaggcaagtgatgcaaatgctgctctcgaatacattcggcagaataatgagaatgagtggtctggaaggaacaatgttggtctgcaggcgcttaatggtatcgctgggaatcttcagctctacaagcaagcacagcaagcagacaggcagagtgaatttcagcaggcatacggtaatgcctttgcatcaggtgatcgcaatgcaatgcgccaacttgcagctcaatatcctgaccaaatcgacgctgttcgtaatggaatgaagttcgtagacgaagatcagcgaaatactgtgggaaatcttgcagccggcgcaagactggcatcaacctctccagacagcatgatgtcatggctgcagaacaatgctgctgatttgcaacgagtcggccttaatcccatggaagttgcacaaacataccagcagaaccctaaagcatttagtgattttgcagatcatctcggcatggctgcgcttggccctgaccagtatttcaatgttcaggacaaaattgctggaaatgcaatcaccatgcgtgggcaggacattagccagcaaaatgcagctcagaataacgcgattgcaatgcgcggtcaggacattcaggccaacttgggtcagcagagaattgacctggaccgggaaaataaccgcattaacatggaaaataagcgttatgagcgacaactgcagaatgaaaccaatgacctaaaacgccaggaacttcagcaaaagattgactcaaacaatcaagcgctacagcagaaaaagaatgatttgaactccggatataaagacagcatcaacacactcactaccagcatgggaacgcttaacgatatcctttcttctccatcattgaaaagcataaccggaattaggggggctatcccaaacatccctggctctgcagcggctgatgttcaggccagattagataccttcaaatctcaggcattcttatctgcggttgcggcgatgaaaggaatgggggcgctatctgatgccgaaggtaaaaagcttgatgctgccgttggttctctgcagaactctcagagtgaagatgcatttaaacgcaatggcaaaatcatcatggatatgtataaccaaaagcgtaacgatgccgtttccaagtatgtacagcagaacggaattcagcgagtaaccgccccgcagcagtcaatcgactatcttcgtcagcatcctgagctatctgcagactttatcaaccgttatggttatctcccgcccattggaggctaa

SEQ ID NO: 102511 - DNA, 870 bp, Enterobacter aerogenes
atggctgatgatggattaaaagaaccggtcatcattcaggccacccgtcttgatgcctctatcctaccaaggaatgtcttcagccagtcatatctcctgtacgtcattgcacaaggtgctgaccttggaaaggtagcaggaaaggctaacgaggcaggtaagggggcttatgatgctcaggaaaagaatgatgagcaagatgttatcctcgcagatcatgatgcgaggataactgcaaacacaaatgctattcaacttctcgatacgagactgacaactgctgaaggagaaattgcagtactcagaagtgatgttgattatttaatagacgaggtcatcctaattgaggatgagctagcagatcacgaaacaagaataaccaataacgaatctgagttagccaatcatgagttgagagtctccgcgcttgagtacgccacaacgcgcaagaaatctgaggtggtttacagcggaatttctcttgtcattccaactaccggcgcaaacctagttactttgctaaaagcgcttacgcctaccagtggtacgctagcgccattcttcaacacaacgacagataagcttgttgtttacaacgaaaacaagactgtcaatttcaagttgtcattgattgggtcgtggcctggcggaacgacaaaccgctctattcaattaacgttctccggggcagttcctgacacgttggttaacagcaggaacgtagccacggccacagataacgtattgctggcgacgttctttagcgttgatgtcggcgggttccttgccactaatggcagcactatgactattcagtctaacggtgcagcattcacggccacaaccatcaaaatcattgcggaacagtaa

SEQ ID NO: 102512 - DNA, 483 bp, Enterobacter aerogenes
atgtcaacgacgctgaccaagggtgagattgttctcttttccctgcgaaagtttgcagttgcctctaacgcaacgcttacagatgtagaacctcaatcagtagaggacggtgttgtcgatttagaagatatgatggccgagtggctaattaatccgggtgaaatcggatacatcttctctgctgatgatgaagagccgctacctgatgatgactctggcctgccacgaaaatacaagcatgctgttggctatcaactacttctccgcatgatgtcggattatggcattgagccaacaccgagaatcgagacaaacgcgtccaaggcatacgacgctctattgaccgatacgttggttgtgccatcaatgcgccggcgcggtgacttccctgttggtcagggcaacaagtacgacgcatacacagccgatcgctattaccctggcgacctaccgccaattgatggcgatgtgccaaatccatag

SEQ ID NO: 102513 - DNA, 186 bp, Enterobacter aerogenes
atggatcgcatgagtgtgttccttactgcagataacgaagaaggacatgtccaggccgttatcgtcgagaaagatttccccatttaccagaagctaggctttgtcgcatcggttgacgaccttaagccagcaaccaagcgcggacgcaaggcggcagataatgtcaacgacgctgaccaagggtga

SEQ ID NO: 102514 - DNA, 1461 bp, Enterobacter aerogenes
atggacaagcttccgcctcggcacaatctgagcagagagcagaagattgagctaattcaacttctcgaagaaaagcagcggcgtgaaaatgtctatcgttataaacgtttctacaagtcacgctatccatggcaaaagaaattcatcgctgcaacagcaaaattcacccaagttgcattaatcgcagcgaaccgaactggcaagacagatacgggcacgggcattgatgctatccacgcaatgggtgattaccctgaaggatgggatgggcacaagttcgaacatgctcctctcatctggtgccttggttattctggggagaagtgtcgagacctattgcagacacctatccttggacgtcgcactgacaatggatgggagggaggattaatccctggcgagttgattgttgatactgagcccatgcagggaacgccaaacgccgtccgctctgcctacatccggcacaagtcaggtcaactatcaaagattcagttctggtcatactcgcaaggccagcacgctctgatgggtgatgccgttgactggttccatatcgatgaagagccaaaggacgcgaccatctatcctcaggtacttactcgtaccgctactggcgacaagggaaatggcggccgaggcatcctgacgtttacgccagagaacggtcgaacagacctggttatagcgttcatggataatccatcatctggccagcattgcatgaacgttggctgggatgacgcgccacacctgagcgagaaggttaagaaagacctgcttgagtcataccctccacaccagagggatatgcgtactaagggcataccaatgctcggacatggtcgcatctatgaccttggcgaagacttcattaagtgcgatccgttttctatccctgaccactggcttgtcattgatggcatggactttggctgggaccacccgcaggcgcatgtgcaattggcatgggatattgagaacgaagccttttacctcactcgcgcttacaaggcccgccaggtatctccggcagaagcattcagcgctgttaaggcttgggctgacaatgtgcccactgcatggcctccagatggcttacagacagagaaaggttccggcttacagcagaagtcatattatgaagaagctggcttccaaatgcttccagagcatgctcaatgggaagatggaagcagggcggttgagccgggcttgttcgagatatacgacctgatgcgaagaggcaagttcagagtcttctctggcctgcgtgacttcttcgaagagtacaacttctatcaccgcgacgagaaaggaaagattgtgaaggtgagagacgacatactcgatgccgtccgatacgcctacatgatgcgtcgctatgcaatccgctttgcagacataaagaatcctccagttgaagaggatgtctacgttccctcatcctccggttggtaa

SEQ ID NO: 102515 - DNA, 399 bp, Enterobacter aerogenes
atgaacgaccagcaaattgaaaatgaaatcgtatcaaaaggtaaagtcgctcctcgcattactcctcagcatatcgagaagattattcttagtgagcatttctttactgcttatgacggccgtcatggttctatttcacgcaatgaatacgttggtcgtgaaaaacctgaggatacagaaagggacctgttcccgttgcaactcctcaccttctgcgtattggtactggaaaatggcttcaccgtcaccggggaaagtgcttgcgccagtccagaaaacttcgatgctgaaattggtcggaagattgcccgtcagaatgcggtgaataaaatctggcttcttgaggggtacctgctgaagcagcgacttttcgagcatcaaaaatgctggggtatctga

SEQ ID NO: 102516 - DNA, 201 bp, Enterobacter aerogenes
atgagttggttaggtctggttcttggtggaaagtacgctttaaaaaatgggctgagggttgtagcccaaaatactgagggaatggtaaggatgaacaacggttttgctctgggtgatttggctgtggtggccggtgctgatctccggcttgtaaatggactacccgtcgtcgccatggtgagctattacctcaccatctag

SEQ ID NO: 102517 - DNA, 606 bp, Enterobacter aerogenes
atggcaaagcggccgaggcgtaagtgcaaagtctgcaatgaatggttccatccggcattctcaaatcagtggtggtgcagcccggaacacggaactcaactggcaatagagcgacgaagcaaggagagagaaaaagcagagaaagcagcagataagaaaagacgacgagaagaacaacagcagaaagacaagttaaagattcgaaagctcgccttaaaaccccgcagttactggattaaacaagcccaacaagcagtaaacgccttcatcagagaaagagaccgcgacttaccctgtatctcgtgcggaacgttcgtatctgctcagtgggatgccggccattaccggacaactgctgcggcacctcaactccgatttgatgagcgcaacatccacaaacaatgcgtcgtatgcaatcagcacaagagcgggaatctagttccttatcgcgtgatgcttatcgaacgtatcgggcaagaagctgtagacgaaatcgaatctgaccataaacgccatcgctggactgtagaagagtgcaaagcgattaaggcggagtatcagcagaagcttaaagacctacgcgaacacagagtggaggcggcatga

SEQ ID NO: 102518 - DNA, 150 bp, Enterobacter aerogenes
atgcttgagcgaactgaacgcgaccatccgacaggcctgtactacggtccatgtcaaaaatgcggccataactttatgggtccgaagcgtgagcgaatttgtgctttatgttccaagggggccaacaatggcaaagcggccgaggcgtaa

SEQ ID NO: 102519 - DNA, 228 bp, Enterobacter aerogenes
atgagctctgttgatgacgaatatgcagaccgactcgctgaccttctcgaagatatggaaggtgacggcgttgattctgtaggaatgattatgaactgggtagccggatttgtgcagggaagactggaaggacaagaggccagtgcatatatgtttcagttcgatgatttcgacatgatcatccagttacaggaaccggaagagatcacgccagcgaggttgcattga

SEQ ID NO: 102520 - DNA, 198 bp, Enterobacter aerogenes
atggataagtgccaaggtgttttcggcaagatatttggtcattcattccgggtggcgataacaaaaggcgcacctgacttaaggataggcgaatatcagggtgggcgaggcgttctgttagacattatggaaaaaactaggtgcgaaacctatcacggaatttactgtaagcgctgtgggaaggttatcaatggctaa

SEQ ID NO: 102521 - DNA, 816 bp, Enterobacter aerogenes
atgagcatcaagccagtatctgacctgtatttaattacctatgaagatggctccccatacaaatcaacccgtgatgcgaaagaagctgttgatgccattggggccggatttaaggtcgaggaattcgttagccttgagaatcatcgcgccgccatgccccaggctggtaactgtcgggaaaactcaaattcgtcaaccaacaattttcgggaaatcgctgaaacgtcaaccagcaccgcaataacgccagcggcaccagacaaacaactgacggacgatgtgctggatgaaattatctccggcgctaaaacgtcgatggagcagtatctcgctctgtcgttgaaggctgagcgtgaagcgtggcggaagcgccaaccaaccgacgatgagcgcattatggctatcgaggggataaataactgcgaacggtgcggcgatgaagggtggattgtcggggaaatgggtatcacacgctgtgcatgcagtcaggatggtaccctcaccagtgaggatgccaaacaatttgaacctgtaacgacggctaacaagttgggcaactctccttttgttccggatggttacgtgatggtgccgatgaggttaacagctgagaacggcgcgaaaggcgcgctatcaggtgagttttcagaaaccaagttcgttaactgtccagaatgttttggtgatgatgagtgcgaaacatgcgacggaagcggaagaattgaaataaaagtgccagtcagctggacgactataaaagaaatttggattaaaagtgtcgagcattttgcagccgccccgcaggaggtgaagtga

SEQ ID NO: 102522 - DNA, 699 bp, Enterobacter aerogenes
atgactgatatcaccgaactggcacagagagtaaaaacagaagtttcggcgattgatgacactcagtggtatctggctaagccgtcagaaatcaggttgctggtagaggcgctggagaaggcgcagacggaaaacaccgcaggcgcagccgggatggcagaaagctacgagaccaccatttctatgctgaggtcgcgcatcgccgggctggaagaaagccacgctcaggtaatccagtctcgcgaccattacaaacgcatgtcagaggaaggcctgaagcaactggcggagccccgcaccgtcaccgtgaagctgccagaagatcttcacccagatacgcaagagttggtaattgacttctgcaccgccctggctgagaagttgtacaaggcccaattaaaatacggctacgacgcggactggaaacaggatgggtggccaagtcaatgccaggcgcactttcaccagcatatcgccaaaggtgatccgcgcgacgttgccgcttactgcgccttcatgtggtggcacggctggagcactaagcctgctgaatgcctggaaccccgcaccgtcactgtgaagttgccggactataggaatgcttacaaatcaccattagctgatgaagttgagcatcaagtgcgatttgcgcttgagttactctcgtctgccgctggcatcaagatggagggtgagtga

SEQ ID NO: 102523 - DNA, 651 bp, Enterobacter aerogenes
atgaataacgaactcacagcagcactgttaactatcgagaaatgccgcgagctgaccaactgcccggctggcgtcgacctgcaggactgggtgaagcagctggcggcggagaatgcgtacttgatacctaaagccgctagcgaactgtcaaatgcctgggtgcttcataagtacctaatcggcattcaagcggcgattatgtatctggataatggaaacaagaaggccgcgcaggaatggctgtatggaactattgctggtccgggatttgagttccctgacgaggttgacgatatcgacgcatgggcaactcatcagatgcgcggcagcataagccatccgcgcgcacttgaaataatcaaggaagaaacccccgccaccgatagcatcgtagccgggattaaggatgatggcgcagcagaacgggaaaaggccatcacattcaccgcagctaaaaaggttacgcaggatggcgtagcgttaatcgctatcggcaagccttacaaaattcacaacgatgatgtgatcggcgaattcttcatcggtgagcgtgggcgctacggcgtaatcaccatggaccgtctcaattacttcacaacgtctgacgaatacgcatgggagttttcgctgcgcgagggggccgacaaatga

SEQ ID NO: 102524 - DNA, 258 bp, Enterobacter aerogenes
atgacaaaggtgttcgtaacaaaatacgcactgacagaaggaccatttactgttgatgccaagataaccggaaagtctgcgttttggcagaataatggctatcaacaaagtgcatatggcaatgacttttggctgacagaagaagaagccctggcagattgcgagcgtcgacggctggcgaagataaaatcgatagacaaacagcgcaagaagctcgaagagatgaaattcaccatcgctgaacagaaagcaaattaa

SEQ ID NO: 102525 - DNA, 195 bp, Enterobacter aerogenes
atgacgttcatcaagataattggcgttatgtggatgcttgcatgtttcgtaatcgtattatgcgcctacgtgataaacgtcaatgctggaggcgatgttttcaaccttctgtttgcatcgatctttgtgtggggtctgatagcaataactccaatagctatcgtcaagttcggatggcaattcattaaccgatag

SEQ ID NO: 102526 - DNA, 618 bp, Enterobacter aerogenes
atgattgactcacttaaacaacgcatcatcgactatgtaaaacaaaaccagccagtatccattcccgtagcagcaaaagatatcggcattgctgtttactcgttcaggaagattaagaaagagatggagaacaaaggtcttctgttctcacgtcagggattcggtctgtttgaaagcgaagagtattacaacgaatacgtcaaggttgatggaaagaaacgtatgcaagcattccgggcgcatggattgcagaaggaaaaatacgacgttgtagatggcattgataccagaaaggccatcatgtcagttatcgatcgcgttaccactccaatgacatgcggtgaaattggaaagatgtgcggagttggcacaaaggcagcatacaggattgtatcagagctatgtgacctgggaacactggtccatgacggcggcacatacggaagaagatttatccttgcctcagaaggcggggtgagtgatttcgactcaaaagaagtatctcgccggccaaaaggattcaggaagtacaaccctaagcgaaatggtgtcgttcaggcttatctgaatagcccggcacgtcagagaatcatgatgatttatgggagagcggtatga

SEQ ID NO: 102527 - DNA, 1368 bp, Enterobacter aerogenes
atgaggcaggatatcgaagccagcgtgattggtggtttgctggttggtggattaacaccggcagcgagtgacgtgctggcaagaacagatccggatgcgttcacaataccgctctaccggaaagcctttgagattatccgcaagcaggctagaaacaagaacctgattgacggactgatggtcgccgaggaatgcggcgacgaacacgccactgacgttatgatgacggctcgttcgtgcccaagcgctgccaatctcactggatacgcagaaatgctcgctgaacagcatcagaagcggttatttctgcatgccattgatgagatgagagggcaggttagcaatggctctctggatgcttctggtgaggcaatggacgccttaatcaagcgcctttcaaccatccgcaaaccaaagcatgaagtcaaaccggtgcgtcttggtgaggttctcaacgactacgcagagacgctggaaaaacgcctgtgtaacggtgatgaatcagacacgcttaagactggaattgcggagttggacgcaatcaccgggggcatgaatgcgcaagacctggttatcatcgcggctcgccctggcatggggaaaacagagttggcgctaaaggtggctgaaggcgtcgcaagcagcgtaattcctggctctaacctccggcgcggcgttctgattttcagtatggaaatgagcaaccttcagatagttgagcgaagtattgccggcagaggaaacatgtcggttagcgttctgcgcaatccagcaaagatggacgacgaaggatgggcaagagtttcagaaggtatctgtcacctgaaagaccttgatgtctggatggtagatgcttcgaggctcagcgttgaggaaattcgcagcgtggcagagcgtcacaaacaggaacatccacagctatcgctaatccttgtcgactacctcggcctgattgaaaagccaaaggcagaccgcaacgacctggcaatcgctcacatctcaggaagtttgaaggcgacagctaaagacctgaagactcccgttatctctcttagccagctttctcgcgatgttgagaagcgaccaaataaacgacccacaaacgcagatttacgcgactccggaagcattgagcaggatgcagacagtatcatcatgctctaccgcgaagctgtgtataacgaacacagtcctgcagcgccattcgcagaaatcatcgtaactaaaaaccgattcggaacactcgggacggtttatcaacgcttcatcaacggtcacttccattcatgcgaccaggaagaagcaagacgcatatcaaccacgcaacaggcgcaaggtaaacgctatgcgaagggagcagacgtatga

SEQ ID NO: 102528 - DNA, 834 bp, Enterobacter aerogenes
atgagcaacctagcaacagttacaccaatcaggccgtctctggcggctgtggagcgtcaggtggccgatattgatgacgggtatacccgtatcgccaacgagctacttgaagctgttatggccgcagatttgacagccagacagctcaaggttgcgctggcggttatccgcaagacttatgggtttggaaagaaacttgaccgaatcactaatactcagatagctgcaatgacaggcattcatcacacgcatgtttgcaaggcaaaaaacgagatgatcgccatgaacattatcgtttcaaacagtcatgcaatcggtattaacaaggtcatttctgagtgggatttcggcattagccatgtaagcaaacaattagccgaaacagctaataaatgtttagccaacttagctaatgggcataagccaactcagctaaacacaaaagaaactattcaaaagaaagaaataaataatacccccttaccccctaacgggggcggcgatgggcaggaaaagcttgaacgtcgaaaaccagaacgaattgactacgaatcattcctggaggcttacaacgcagaggtcggtgacaaacttccacacgctgttgcagtcaacgagaagcgcaagcgccgcctgaagaaaataattccccaactcaagaccccaaacgttgacggattcagagcttacgtcagggcattcgtccatcaggccaagccgttttactttggcgataacaacaccggctggacagctgacctggattacctgctgagagacgacacgctaaccggcgttcgtgaggctaagtttgctgacagggggatggcatga

SEQ ID NO: 102529 - DNA, 210 bp, Enterobacter aerogenes
atgaacaagctacgaagcattcgtgaaaagcttggtctaacgcagggagagttggcggcggaacttggtcttactaagggagctgtaggtcactatgaaaatggtcgtcgtgatctaagtgctacacagtgccgacaaattctttctgttttaaacaagcatggagcagcagttggctttgatgatttattcccgccaaaagttgcttaa

SEQ ID NO: 102530 - DNA, 654 bp, Enterobacter aerogenes
atgaaatggtacgaactagccaaagacctcatgaagagtcgaggcgtatcacaggaaactcttgcagaacaccttggactaactaaaggtgccgttagccattggctaaacgccagaagagagccaggaatagatgatatcgccaagatactaaattatcttgggctcaagagctttgaggtaaatcctgatggtactatcaaggacaaatcaccttcaaacgtaagctatcatggcaaacacgattcgaaggggtcttatcctgtgatcagctgggtaagtgccggagaatggatggaagccgtggagccatatcacaggcgtgcaatagaccgctggtacgaaacaagtgtggactgttctgacgactcattctggctcgatgttaagggcgattcaatgacgtcacctgttggattaagcatccctgagggaacggtaatcttggttgatccagacatagagccaaccaatggaaagcttgtagtagcaaagctagacacagaaaatgaagcaactttcaaaaagctagtgctcgatgcaggaaggaagttcctaaaaccattaaaccctcaatatccaatgattgaggtaaatggaaactgccgaataattggcgtagtagtagacgcaaaaatcacaaacctgccataa

SEQ ID NO: 102531 - DNA, 324 bp, Enterobacter aerogenes
atggatgcacagtcacgccgtcgagaacgcagagcagctaaacaggccgaatggaaagcagctaatcccctgtctgttggggtaagcgctaaacctgataaccgccctgttctgtcgctgaatcgcaagcctaaatcacgcgtagaaagcgcactgaacccgattaacttaactgtgcttgcagagtatcgcgagcagctggaaaaccgcgcagaagccgttgagcgcaagaatcacaagctttggtacaaacagcctggcgagcgcggaattacttgctcaggccggcagaagatgaagggtaagtcgataccgttaatttga

SEQ ID NO: 102532 - DNA, 312 bp, Enterobacter aerogenes
atggcaaagtatgcgatttttaagcttttcatgcccaatagggggtcatggaatggcggctggtctggagagagtgataagtacgttaaaagccgtgagttacctttgaagggcagtgagcatgttaaagatggtgattaccattactacaatttcggcgatggatggggagccggagtttcagtgatagttgtcgatggagccaaagccaagattgcagaaataaaaggcagcaagggtttttgcggctatgactggatgatcgatagcatcatgaaaaatggaaagattatttacgataaggctgcctaa

SEQ ID NO: 102533 - DNA, 318 bp, Enterobacter aerogenes
atgcaagagtttaaaggtacgccagggccgtggcatgtcagcaatgaaggctgcatgttgatacgtgacgacgcatggttttctattgtggcgaaatacgtaggttacaccaacgacgaggaagaacttgcaaatgcacgactcatctcggctgcgccagaattgctggaagctctgcagcagatggttaatcgcatcgagtattactcaagcttaaaagaaacagaacaaccaaatatcgaagactgggcttatacctacaacagcggcgatatggatggtgctcgcgcggccatcaacaaagcactcggcaaataa

SEQ ID NO: 102534 - DNA, 282 bp, Enterobacter aerogenes
atgaacgcatattacgtgcaggacaggattgatgcacaacaggagtctgcgtatcaggctcgcattcagcgtgaacaatggattgatcatcgcgcaaaggaaattacagagcttgctcctggtgagccactggagtttacagctggctcagtaagcaaagttcttcgcctagcaattcaatcagaaaaatgccgcgaagcttacaacgattttatcactgcaatcgcttatgaccaggctgagcgagagtgggaagaaaaatatggatgggccgcagaatga

SEQ ID NO: 102535 - DNA, 894 bp, Enterobacter aerogenes
atgacatcaattgttgaatttgttagacagcaggagccgcttttctgcggcgcattaacagaccagagcgttacatggtcaaaggaaagccagttcgccattcagtattttcagaagaatgacttcctcgccaaaaccgccctctccaaccctaccagcgcacagaacgcgattatcaacgtagcagccattggcattacgttaaacccggcaagcaagctggcttatcttgttcctcgcgacggcatggtgtgcctcgacatcagctatatgggccttcttcatcttgctcaagcaactggttccatcaagtgggggcagtgcaagcttgtttactctaacgatacgtatgagtctaatggcctcgatacagcacctactcacaaatacaacgcattcggagagcgtggtgatgttgttggtggttactgcacggttaagacgtctgatggagactatttaacggaagagatgagtcttgcggatattaggactgtagaggcaaccagcaaggctaaaaatggtccgtggaaaaccttctgggaagaaatggcgcgcaagaccattgttaaaagagcgagcaaatattggcctaaagctcagcgcctggatacagctattcacctcctgaatgaggatgaaggcgtatttcatgagccagtaatgccgcataaatcagaggaagacatccgcgaggatgagcgccggcgtcagcaggaaatcatcgaacaggttcaagctctttgcgacgaaatggctcaagcagaaaccatggatgacctaaagcgcatcttcgctgacgtgtataaacgcactgctggcatgaaacttcagcagaacgtgcaagcgatatacgcagaatgcaaagcaaaactggaggtgactagtgagtaa

SEQ ID NO: 102536 - DNA, 483 bp, Enterobacter aerogenes
gtgagtaaactttacgaaatcgccaatgactacgcaaaattaatggatgagggtttagacccagaacttatatcagacaccttagagggcatggaaggtgaacttgccgataaaattgagcaacttcttgccatctgcaaaaacgaaactggatatgctgaacgcctcaaggaagaggctaaatcattaaatgatagggcatcatcgatactgaataaggtggaaaacattcagtcctacatagccaaatcgttaattaccgcaggaaagaaaaaattcagagcaggtctacatcaggtaacaatccgttccccttctgagtcagtagagattcttgactcatcatcaatacctgctgaattcgttgagtttgaaacaactattaaggctgacaagctggcaataaagcatcaattaaaggctggaatatctatccctggtgttcaactaaagataggaaagccatcactcatcatcaaataa

SEQ ID NO: 102537 - DNA, 258 bp, Enterobacter aerogenes
atgcgcgaagttgccggtaatatggttgcaattcgcgccgctgactcactcaacattaacattgaccagttctattaccttgctcagaaattttctataccaaccgcatttgtaaacatcagatggactgacagtgaaattgaaaaggctgtcagtcttagggctgctggtaagacaaagaaagagataggcaaagagatttgtcgcagcgaacaagcagtaaagagcttattcagaagacttaagtctaataactga

SEQ ID NO: 102538 - DNA, 357 bp, Enterobacter aerogenes
atggattacagcaaattaagtgattttgagataaatgccgctgtatttgaagcgcttcatggtggcgctccagactacaaagaaggcgatgccggcaagatgattcttatctcatatgaaggtgatgttgttggcagtgatgtcgtggaagtggaagttgagcgtggtgtattcaacccatgcaacaacccagtagatgcatggccgataatcacttccaatcgtattggaattgttcctggtaccgccactgataagtgggctgcgcatcatggtgactggaacattgctatcgccgatgttaacccactccgcgctgcaatgattgtttttctcttgatgcaggtggctaaatga

SEQ ID NO: 102539 - DNA, 810 bp, Enterobacter aerogenes
atgaacgcaatcgacagtagactgataatcttctcaacccaaaaaaaattcaatgacagaaatgccgatgatatgcaaagcggcgatattgatgttgacacactaaaaaagcattatcatcttgggcaagtatcaaatttcatcgactggacaacttttggtccttcctataaacacccctatctgaattcaatacagcccgtaagcagagaaaaagccattgcaatgctatatgatgagttaagatcgcagtcgtatgtattttcttttcagggaccataccagggtttaatcaaagatcttttcaatcatatgcaacgaaataatggaagagattatcaaaatccagcaatgaatactgcgtacagaaatttaatcctggctgataacttcccgaacagcaccagagccataataaaaagaggcatcgaacagtttgattttagcaaatcgaaactgaccaaagaaaatttcaccaatgatctatataaaagtcatttacccaaatacacaagatggaaagactgggttaatggaatgggtattaccgttcatgatgtaaacagtacagaaatttccattgagagcctcactctcgaaggaaaaaattacactgcggttgtcaaatacagggcacaggatcattttggattagacagagaagatataatgaaagctaaattcaattcgattgccttttttaggatatggtttgttctgcagcgtgcaaagcatttggctcaaaaaccattcttcactaattttgaagccacaataacactgacaggagaaaccaatgttcaaatataa

SEQ ID NO: 102540 - DNA, 558 bp, Enterobacter aerogenes
atgaccctacgtaagttgctggcggtttccgccctcctgttgccgttaatggcttcggcacataattttgtcgacggtcaacgcgtcgcgccggtaggcatcgccgaccgcggagaactggtactgagtaacgataagtttagctacaaaaactggaatagctcgcagctggcgggaaaagtgcgcgtcatccagcatattgccgggcgtacctcggcaaaagagaaaaatgccaatttgattgaggcgattaaggcggctggcctaccgcacgaccgctatcagaccactaccatcatcaataccgacgacgctatccccggctccgggatgttcgtgcgcagcagtattgagagcaataagcagctctatccgtggtcgcagtttatcgtcgacagcaacggcctcgcgcgcaaagcctggcagctcgatgaaggcagttcggcaattgtggtgttagataaagacgggcgtgttcagtgggcaaaagacggcgcgctgacccagcaagaggtgcagcaggttgtcggcctgctgcataagctgcttaataaatag

SEQ ID NO: 102541 - DNA, 183 bp, Enterobacter aerogenes
gtggaaaagagagagaaaccgcaaggtgtggtgatgaagcgtgtgcaagttgatatacctgaacagcttcacaaacgattcaaaattgcttgcaatatccgtgatgaatctatgagtaaggttcttgctgattacgtcgaggaatggctaaagaagaatgagcctaagatctggcaacagtaa

SEQ ID NO: 102542 - DNA, 357 bp, Enterobacter aerogenes
atgtacattccagtgtgggtatttatcgtcattggtgtattgatgttgatacaaacattttgcagtgaaagtaacaaacgttttaatgatcagtgcaaagaggaacagaaagcgcatgatcaggaaatgaaacgtttagaccgtgtaagggttttagatacccctgccagtgtagtaaaaattatgcttgctgatctctatcgttctgcatcctgttacaaggattacccggcacaatatgcggagatctgcaaagaaattgaagatatgcgttcagagtatagtttttatggtgctgtagagttcaccactagcaacggaataaaagcaaaggcaaaaggtaagcaacatgcttag

SEQ ID NO: 102543 - DNA, 138 bp, Enterobacter aerogenes
atggaaactgaaaagaaagatgatttcaaaatcgtatatacagatcaaaacccggcctttgattctgttataggtttctggttgttcctgttactagtgattgcttgtgttactgcttttgttgctttgttcttttag

SEQ ID NO: 102544 - DNA, 900 bp, Enterobacter aerogenes
atgaatgcattagttgaagcggttagtgaagttagtccggtacaggttacagcacaatcaatctttgaaggttgcaagaaagtagaaggtatcaaatcagtgtgggcggttatgcctaccgatgatttcatggaaattagaggttttggccttaaccgtgatgttactaaacgtgttgagaaggaaaagaatgttcacttgaaaggtgatttaaccagcgcacagcaatgtaatgttgccttagtctataccactgaggaaagcggtgatttctatgttgaaggccaaccattcatgaaaattgatggtcactcacgctgtgaagcatgggagaaaggcacacttgcaaagcctgattatgtcaatgttcaattcttctttgatcttaccagtgatgaaattatcaaagagtatcgcgtattcactaattcacttgcacaggcaaccatagccgaacagaatcaaattgattgcaagttgaatgatttcaaccctgaatcaaaatttcttcaagcctcttggaaagatgcattcaagaaatctgacaatatcacctttgatgaaggtttgaagaaatacggttcaatgctgctttccatcgttgataagtgggagataaaaccagaagtaggtaaggcaaccactaagcgccattcaacaggtatcaaggccgccattcttcgaacctatgaagccagtaaggaaagtgaagatgatttgaaagtatgggaaatgttctggaaagatttctttgcacctgcaagcactatcgcacagtgtcagaaattacgagacaaagtgaaaacgttgggtactcacaatgctggtactgtgaaagatgctggtgaggatgctttcagactgtttgaaaaggcacacgccaaagcaagcaaggcatag

SEQ ID NO: 102545 - DNA, 591 bp, Enterobacter aerogenes
atgattttttccccggctttacagcaaattaaggacgtcggaacaggctcgtttgttgcggctgaggttttggctcgttggtgctgcgaaggccagatgcttactccatcggagttgtcatcacctcctaattggggcttggtagatattgagattgccaggttcattcaagataacctttgccattgcagtgaggaatatcaggctctttttgttaatgtgtcagagcagactttgaaatctgacatcatctttcattcgtgggctcagataattagggcaatcacgaagaattatccattaaggcttgtcatcgagatcactgagggggttcaagacaaatctctagcatttagatggagctctcttactgcgatgggggttaatctagcccttgatgattatggagacaaaaactcttcaatggctcgcttgcttagctacgactggaattattgcaaattcgatgcgagaaaactgagttcatttgaagattattcagccattcttcattgccgacgtaaaggcatccatcttattgcggaacaggttgagacaccaccattggaagagaatgccaaattacggtga

SEQ ID NO: 102546 - DNA, 918 bp, Enterobacter aerogenes
atgaagagcaacgctaaactttcgctcctggcgctgtccttggcgctcggaacatcactggcttatgcctcggatgacattcctattgttccggcaagcgttatgaaaaaagacgtcccagcatatgtttcgtcagggcaagtcacaaatgaagtaatggggagtgtgaatgaaaaccccgtgctgaccatgaagcctggagtgaaccaaataatcccgattgcaattggtcatccgaatcgtgtggtcacaccgtttggcaatccggagattgtatccacttcactgactggaggaaccgatgccggtcaatgtggggaagtctgtatcaaagaaaacgtggtctatgtcgctacggataagcaatatcccgtgacaatgttcattacagaaaaaggctcagaagctcaggcgctaagcctaacgatggttcctcgtcggattccaccgcgagaagtatttctcagactcgatgggaatgtaggaatcagcggcgcattagctaactccaaggcggagagttgggaacagagtcagccttatgttgaaacgattcgctcggtgtttcgtaaggttgcccttggtgaaatcccccaaggttacacgatgaaccgtatccctactggagccgctgtgcctagctgttctcatccggggattaaggtggatttcagcaaggggcaatacatgatgggccaccacctgaacgtcttcattggcgtggcccagaacgtttctagtcagcccatcgagttcaaggaggccttgtgcggaagctgggatgtggctgcggtgactacatggccgcttaacgtacttgaaccaggccagaagacagaactgtatgtagcgaagaagcaaatgcgtggcatctcgtctacttctaagcgcccatcgctgctggggggtgcccaatga

SEQ ID NO: 102547 - DNA, 348 bp, Enterobacter aerogenes
gtgaacgtaaataaacagtttttttggttcctgatgaatgcggtactgatgtgcatcttcatcattcctgtagctgtcgcgttttggttgtcagcttttgcggcaggttttgactggggtcagtgggttaacctggctgcggatgcagccagccgagctgcaagtgacccggccaaggctttgggaacggttcagacctactggggtatcctcagtttcttcctattggctgcgtacagtctgctgttcaagtttagagccaatgccaacgagtcagtcgagcttgctgctgtggttggcgtttcggcttcgagaaaagactcggaagcagctcctcaaaatcaataa

SEQ ID NO: 102548 - DNA, 144 bp, Enterobacter aerogenes
atgtccgcacatgctcatgccagagaaagtgaaagctcatctggttcattcgtctcctggcaacttcttgtctggcaggtgatgttcgctatcggtgtcgttgctggggttaacctggaacacgcctacaattttcttggttaa

SEQ ID NO: 102549 - DNA, 663 bp, Enterobacter aerogenes
atgagcaaaagcgatttcttttttggcaaagtgtataacggaagcgatggagccactctaggacttagtgatttggagcctctggcgcgaaaggtgtcagcagcgttcttcaccgcacaactgaatagaatgttgaaagagcatggtggccggttaacgatcagcgatggaacctcatatccccgcttttggagcttcatcgacaaggttgatccggagcaggttggtttcgtcgagatctacgctcgtcaggatgttaacgatagtgttgaagcaacactggcgtgtgacatcgttttggtaaatggtgtgataaccgttaaatctcactggtgtgcctacaaagacatccgagctggcgaagtgatctccacattactcgtccctttgcatctgaaagccctacaggacaaggcttatatccgttgggataatggcgaaacggaaccgctgcttcaagatgacgatcaccaggctgagcttgagagggtatttaaggtttccaagtacccatcggctatgacctggggcgatacggttgaccaaaatgccaaggcgtacatgatggaccttgagtgcgctacggacgttggtcgtcgcggtgtctcgtcagaacaagcatgggatgcttatcaggaactccgacacaacaaaacaatgtga

SEQ ID NO: 102550 - DNA, 378 bp, Enterobacter aerogenes
atgaaagtaaccaataaattccaactgctggcactggggctgtttatggccggtagtgccatagcatctcccgatgtactgaatgacgacgcaaagctcaagaaccttgagaaggtgtgtcctgactgtgagatggttgcaagagatgtactcaaccttcgggttgaaaactgccagctaaaaaacacctccagtgcaatgatgatagccactatgcaaagtgatcccatgttttcgtttatgctggcggtacacacggcggctggtggagatgcctataaaacggtgctgggggctgctgccgcccatgttgactgcgaaaacccgttgagctgggtcaagttgacccaacaagcaattaaaggaggcaaagcctaa

SEQ ID NO: 102551 - DNA, 447 bp, Enterobacter aerogenes
atgagctactccgttatgaatcaagatggggtgcatatgtgcgacatcccattgagcgtctaccaggtgatacgtcgccaatccctatctgcggggtggctttactgggagcagggcttgaatttggtgaaggtgctcattgcttgcgtcgtcaaaatgttctttgtgatgccggtgatctggttctgggtgctggtggcgtgccgcctaattgaacctgaacgcatctctgacgtgtcaggacttttatctccggacgtgatcgggtgggccgctggcgcggccatcaccctcattatcttttccgtttttacacgccctgctatgtacggataccacaactatttcaagcagcatatttgctcaagaataaagcaagtaacgccggaactcaggacagtcactgggccactgttcttctaccgaaacgaaattagaacgatatag

SEQ ID NO: 102552 - DNA, 2964 bp, Enterobacter aerogenes
atgctgaaagccctgcacaaattatttggtgggcgaagtggagcgatcgaaaccgcgccaagcgccagagtgttgccgcttaaagacgtggaagatgaagaaatccctcgatacccgcctttcgccaagggcctgccagtggccccattagacaagatactggcaacccaagccgaactgattgagaaagtgcggaactcgctcggtttcacagtggacgacttcaacaggcttgttttgccggtgattcagcggtatgccgcgtttgttcacctgctgcctgcttccgaatcacaccaccaccgtggtgctggtggcctattccggcatgggcttgaagtagccttttgggcaactcaggcatctgagtcggtaattttttcaatcgaagggacgcctcgggaacgccgcgacaatgaacctcgttggcgactggcgagctgtttctccgggctgctgcatgacgtgggtaaacctctctcagatgtgtccattacagataaagacggttcgatcacatggaatccttattcagaatcacttcatgactgggcgtaccgtcacggaatagatcgttactttatccggtggcgcgataagagacacaaaaggcatgagcaattttccctgctggcttggcatcgaattattccggctgagacgcaagagtttctttccaagtcaggtccttccatcatcgaggcaatgctggaggcgatctcgggaaccagcgttaatcagcctgtgaccaagctgatgcttcgtgctgaccaagagagcgtctctcgggaccttcgccagagtcgtctcgatgtaaacgagttctcctatggtgtgcctgtcgaacggtacgttttcgatgccatccgccgcttggttaaaaccggaaaatggaaggtcaatgagccaggtgcgaaagtttggcacctgaaccaaggtgttttcatcgcctggaaacaacttggcgacctctacgacttgatcagccaagacaagatccccggtattccacgagaccctgacacgctggctgacattctcattgagcgtggttttgctgtaccaaacacggtgcaggagaagggggagcgtgcgtattaccgctactgggaagttttgcctgagatgctccaggaagctgctggtccggtgaagatcttgatgctccgtctcgaatcaaacgacctggtgtttacgactgagcctcctgcggctgttactggggaagttgttggcgatgttgaagacgctgagattgagttcgttgacccagaggaagctgatgaggaccaagcagaaggtgacgctggtctgaacaatgacatgttggccgcagagcttgaagctgagaaggctttagctggccttggctttggtgatgcgatggcgatgctgaaaagcacctcagacatagccgaggaaaagccagaacaagaggatacagaatcaactgaattgcctaagcctgacgcaagcaaaaagggcaagcagcagagtaaaccgggtaaagcaagagcggagaaacaaccccagaaacctgaggtaaaagaagatttgtcccctcaggacattgccaaaaacgcacctccgttggcgaatgacgatccgttgcaagcactcaaggatgttgggggcgggctgggagacatcgacttcccatttgacgtattcaacgcatcggcagaaacagcctgcactgacgcaacaaaccttgaaatcccagatataacagagcccgaaaagcaagaggaacaaccaaaaccggacttcgttccacaagaacaaaactccctgcagaacggtgacttcccaatattcagtgattctgatgaaccgccatcgtgggcaattgagccgctcccgatgctgactgatacaccagaacaaacaatacccgcgccagatatgcaacatgcgggcaaacctaaggaacttgagaaagacgcaaagaccttgctctctgagatgttggctgggtacggggaagcatcgacgttgcttgaacaggcgatcatgcctgttctggaaggcaaaacgacgttgggagaagtcctatgcctgatgaaggggcaggcagttattttgtacccagaaggtgctcggtcgctgggggctccgtcagaggttctctctaagctgtcccacgccaatgcgattgttcctgacccgattatgccaggtcgcaaagttcgtgatttcagcggggtgaaagcaattgtgctggtggatcagctttcagatgcggtcgtggcggccattaaggatgctgaggcttcaatggggggataccaggaggcctttgagcttgtctctccccctggctcgggcgtaagcaagaacaaatctgccccgaaacagcagagcagaaaaaagacgcagcaacagaagccagaggttgatgccggagccgggtctgaacaaaagacgaaagacaagagcctccagcaacagccgaaagaaaagcagggcaacgttgcttctttagttgaagagcagaagcgcaaaccggtccaagaccaagaaaaacagaacgtggctcgccttcctaagcgggaagctcagccagtggctcctaagccaaaagttgagcacgagagggaattggggcacgtcgaggtgcgagaaagggacgagcccgaggttagggagtttgagccgccgaaggcgaaaacaaacccgaaagacatcaacgaggaagatttcttgccgtctggtgttacccctgaaaaagcgctcctgatgctcaaggatatgatccaaaaacgctctggaagatggctcgttactccggtcttggaagaagacggctgcttggtcactagcgtcaaagcctttgacatgattgccggggaaaacgtcgggatcagtaaacacatcctctatggattgctgagcagggcacaaagacgccctttgctcaagaaacgtcaagggaaattgtatttagaggtagataaagcatga

SEQ ID NO: 102553 - DNA, 582 bp, Enterobacter aerogenes
atggccgggtgtgcctctaacacttccgagccaaaaactcagcccaagatcgcctctgccgaaaatgacaaaccggcccgagttagccgtgaactgtctatgtcatgggacaacatggggcgtggtggcgctgcattacgccaacctggttatatccatgtgctgggcgacggtaatgtcagcgcaatggtgaacaaggtcaaagatgactccactggttcagataaggctccagtgtggatcaaccagaacgaggatgtgaacgaagccatcaataccttcaagtccatgaataaaggcaaaggctattcgctgtacgagttgtcacgctgggaacgctattgcaatggcggcaaaggtatggatgagcacgactggcgttttgtagaagccgagggggccacaaatatccccaaggatgttgtgaccggctgcattccacccacccatacctatcaaggttatctgaatgcctggacgcatttttgcaccagccagtctgtaaccgacgcagaccgccgcattgtgcgcgaatcagtgcgtccctattcagtggtgaacccatgcaaagctctgaaataa

SEQ ID NO: 102554 - DNA, 2190 bp, Enterobacter aerogenes
atggacctttatatctgtgagaagccttctcaggccaaagatctggctggcgtaatgaaggcctctcaaagaggtgatgggtttctccatgatggaggaagccgagtaattacctgggcgttcggccacctcctggaattatatatgccagacgattatgacgaacgctacaagtcatggtcactggacaccctccctattgcaccagagtcatggcggtacaacgttcgcaagagtgtgttcaaacagtacaaaatcattgaaggactggtcaaaaaggcgagcaccatttacatctccacggactatgaccgcgaaggtgaggctatcgcccgctcgcttctggatcgtttccgctacgcaggccctattcgtcgggtttgcttgacagcactcgatgagtcaagcatcaagaaagcgcttagcaacgttaaggacggcaaggatacggtctcactctactatgccgctttggctcgacaacgcgctgactggctcgttgggatgaacgtgagccgcctttacactgtgctggcccgaaatgtaggtttcaaacacactcttcacgttggacgggttatcacgccaaccgttgcgctggtgtgtcaacgtgacagagagatcgccggtttcactccctcaccatactggacactaggagtgaacgtgtccgtccagaatgggcaatttgccgcccaatggataccaccagaagagtgcagtgatgcgctaggccggtgcgtcaataaggcctatgccgagcaggtagcgtcgcaggtcaagggtgccagtgcggttgtcagcaaagcagaaaccaaaccaggtaaagagtcagcgcccctccccttcgatctgacttcgctgcaacaatatgcgagcaaacgatgggggtataccgcccagcaggtactggatgcagcccaagctctatacgagacacacaaagcgacaacctaccctcgcaccgatagccgctatctgccagagagccaaaaggaagacattccggacattctccaagcgctcattttttccgatcagaacgtctcagggctggtggctggtgctgactctcatcgcaaggccagggtattcaatgactcaaaagtgtccgcgcaccacgcgatcattcccactccggccagaacagacataaatgccatgtctgagatcgagttcaatctttacgacgccatccgtcgcttctacatcgcccagttctacagcgagttcgagttcaccaaaaccgctatcgaagtgcagtgtgggcgtcacctctttgcagcttctggtaagaccccggccaaacaaggctggaaggttctgttttcctctgacagcgaaagcagccctaaggatgagggggaagacaccgatgcgccggttgaacaagagaagctccccagggttagccaaggcgaaccagccttgcttaatggcgcagaactggcgaacaaaatgacgcggccaccaccgcacttcactgaagccacattgctcgctgcgatggagaatatcgcccgattcgtgactgaggagaagttcaagcaaatcctcaaagacacagccggtttgggcaccccggcaacacgcgcaagcatcatccagggcgcagttgataaagggtatttcaaacgccagaagaaggtgttacttgccaccgataaggctcatgcactcattgcagttcttccacaagccatcaaatcaccaggcatgactgcggcttgggagcaggagcttgagaaggttgccacaggctcaggaaacatgtctgtcttcatgaaacagatttcgacatggatctgccaaatggttgaacagctcaaagtggcggcaccagttctgaccaaagaaggtggcgcaatggctaaagcatttgaaggcgcaaaaccgccctcgcatgaatgcttcaactgtggtggagagctccacagaatcaaagggaagaacggcttcttctggggttgtcagaatgaggcttgcaaaaagacattcccagacaacaggggcaaacctgagaagcgtatcgctgctgaggattgcccagactgcccggattgcggcagcccgatgcgccttagaaaagggaaagctccaggtaaaaaacgagcctctaagttttggggttgcaccgcttatccagactgcaaaggcacaatgccattcaaaaaatcagacttagaatga

SEQ ID NO: 102555 - DNA, 216 bp, Enterobacter aerogenes
atgaaggtaagggatctgaaagctctgcttgaaacaatgccaggtgaagcagatgtggtttggcaaaacgatgatagcactgaggatgtcattcgctgtgagagtggcatgtactcaatcgtggatagcgttgaaaagatcaccagctccagactcacgcaggttttttggggccctgttgtggtcctaggtaagcaaaggaaaaacaccccatga

SEQ ID NO: 102556 - DNA, 705 bp, Enterobacter aerogenes; identical to SEQ ID NO: 45284

SEQ ID NO: 102557 - DNA, 267 bp, Enterobacter aerogenes
atggacgagaacaagctcaacattgagacggtcgatgggcacaacgagctggtagtcagcattctgtccagaatggtaggcctgagtgacgaggagaagcagacaatgttgtcctgccttccggacaccggcaaacaaacaatcacccaactctatgagacgctgcgttctcaagggcacctggagctggctgagaaaatcgaaccatgcgtccagcagggtgcctgttgtggtcaagtttttttggacacgccgatcagatggtag

SEQ ID NO: 102558 - DNA, 267 bp, Enterobacter aerogenes
atgaaaacatcacgcttcagcgatgcccagatcatcgccattcttaaccaggccgaggctggctcccccgttccagagctctgccgcgaacatggcatcagctccgccaccttctacaagtggcgctctaaatacggcggaatggatgcctccctcatggctcgcctcaaagagctggaggacgagaaccgccgcctcaagaagatgtacgccgaggagcgcctcaaagccgagatcatcgctgaggccatggcaaaaaagtggtga

SEQ ID NO: 102559 - DNA, 801 bp, Enterobacter aerogenes
atggcaaccagggccgtagcggattacgccatctccatccgccgggcttgccaggtgttcaaggtcagtgagggctgctatcgctatcagccggtgctggccgatgaaaatcaggagattgccgattggctgctgcgcctcaccgctaatcagcgtaattggggttttggactgtgctttctgtacctgcgtaacgtcaaaggctttggctggaaccacaagcgggtgtaccggatttatcgcgcccttgaacttaatctgaggataaagccgcgaaaacggctggtacgggccaaaccggagccgctggcggtccctgaaaaacccaatcactgctggtcgatggacttcatgcatgaccagctcggtgatggccgttcggtgcggctgtttaatgtgatcgacgacttcaaccgcgaagcactgtgcatcgaggtggatttctccttgcctgccacacgggtcaaacgggcgctggagcaagtgatcgcgtggcggggaaagccggtggagatccgctgcgataatggcccggaatatatcagcgaggagctcaagcgctgggctcagcaggaagggatagcgctacggtatatccagccgggcaatccccaacagaacgcgtatatcgagcggtttaaccgcacggtacgttacgactggctgggtcattacctgtttgagtcactgaatgaattgcaggcatttgccacaaactggttgtggacgtataaccatgagcggcccaatatggcgctgggtggctacacaccaaaacagcgcctaatgcaggccgcatga

SEQ ID NO: 102560 - DNA, 519 bp, Enterobacter aerogenes
atgcgcaatcactcacctatgtacgacccacttactcaaaatgagctcaatgctcttactgcttcactctcttcaaaagagttccagcacgacatattcagagcattcctgttcgtgtgcgctacagggttaagttgggaggatgtctacctcctaaaatggacgcaagtcgatagagaaaacagcttgttggttcacgagtatgaacgcatcaatggtcatcaaacccaatgtctctcacaattcgccttgaacgtcctgcccaagcaaaaaagcagcaaagtcttccctgacttacacatccaaaccatccaggaccgatacagcaagtggggcttgtttgatctatgggtctgggggatgaagtcaaatatcaaacggagattttgtcttgagactgcgggggccaccttcgtagctcacatgagagctcagctctttgatgagcatgagatcgcgaacatgctgaacattaccgagtccgacttacgttcaatttacccattcttcatcatctaa

SEQ ID NO: 102561 - DNA, 828 bp, Enterobacter aerogenes
atgaaaacgtctctttactcggcaagttttgatacttcagggctggtagaagcaacaggcttttggtcaggtgactcgattttttttaatcagaacaaaaaccaatttgttattataaaaaaaaatttcacccccactcacctgcaggacatcattactcactatatcaatgaaaaagatcctgtaaacggcttcactcgtttcgagaaggaaacaatccagaatattgacactccagaagcccccttcccttttgttttccttaacaatagtgcaatccgtccctgttaccctcttcaaaaaatactcgattcacctgaaatcagttcatccacctccggagcctcaatttccacctggagagggttatatcactggctggaaaagcaaaacaatacactaaaagaacaaaagcgtctcttttgcagattagttcttcatgcctgcagcaataatactgaatcatccgggtttgcacatattaacgggcttcgactacttttacatccctggttacaattcaacctgatgcgctgggtcagacaaaaccattctattgaggatgtcatcggttttctggcaaacaatcattacaatcaggagctgcatttatcgaaaaaagacatgtcctgtactcctgatttttataagaatattgaacaaattactgatggagggattatcattccggaagaattctatcccggtaacaatcatgtccgggtctggtaccgcttccggaacagtatgcaaatgctgctcggaattttatgtgcccagggttatctgataatccctccatcagtaatttgttcaatattcttataa

SEQ ID NO: 102562 - DNA, 1476 bp, Enterobacter aerogenes
atgaatcgtatcgagaacacagcctggcaagtcgagtggatatacacgactgaattccctggtcgccctgtcccattagtgatacttcaggacggtaagcctggttatgttattaatcaatggatttactggcttctggaagagggcgttaccccatctacgttggaacagcatatacgctcagtcatgcaactctatgaattctgtttccgaacatatgcaaatatcccactgaatgaaacccagtcatccaggctcatttatgatttcatggaagccaagaaaaagggatcgtatctgatgggatggaagccgaataaacgctcatcaacattaaaaaaatatctttattcaattagtttatttgataagtggaatagtactttcaatagtaccagaatgctaaatcccgcagaagagctttttatgacccgatatcaggctaacctgaaatacaggcagcataaaaaattcgatcttctccttcatctttatacaacaaaaattcaaaaagaaaccgcttataaatacaatgtcaaaattgaacaccaacgtttcaaagttgataaattcaatatccctaaagtctttcctgtcgaaatgtttgttgatctcattcatgctacatcaaatccccgggaccagatgttatggttgcttatggctggcggatcattgagacaaagtgaaacattacatttgttttatgaagacgtattaggtgtgagtaaagacggtctccccagaatcaggcttgcagatccagagacgggtatcataacatggtataaagacggaaaacaaatatccggtacccgaatgcaatatatggcggaatgttaccttaatgaacagtttaaaaagacacgtccggaactgtttcagatagtccccagaacaatggggattcgggggcggaatcatgttggttataaaggcatgacattttcagatagcggtgaaaatgaaataattgatggtcggtttactgcatggaatgaactcttctggatagaaccagggatggggcatcgtttccagaaagcttatcaggaatatgtttcagaaaatttttataacaaaccccggggatggccatggcacccatggttgttcatttcacttcagaaacactccaacggcttaccgctgacacttggcgctataagaagtgcgtggaaaattgccctcaagcggattggtctgggtaatagcctgttatctcctcattcacttcgtcatatgtatggtgcttattgcgcatccgtgctgcaacttcctctcgaactgaccagaacattgatgcatcacgcatccattaattccactcaggtttactatcacattcgctctgccgatgttcgcaacgcgatcactgaagctattttaaataaactgaaaaccgaagaattccggtatctggttatgccttcatcaccacggctgaatataccgtccagttggctacaactttaa

SEQ ID NO: 102563 - DNA, 735 bp, Enterobacter aerogenes
atggataaaatattagatatagtaaatggatggatcactgctgctgtatcaagcggatcattgcagataaaacaggttcttctctttattttcattgcagggccattggctcttatcatctggaaaatacgggaaataataggattttttaatgaagtcaagaattctaaattaaacgaattgcagcatcttctggatagtcataaactatcaagtaaacttagcgcttgcataaaggaggatattaagagaatagtcagctatcgtataactggaatttctgatgtcgctagtcaaaaaataattctacgcctgctgatagaaaatagagaattaatacccaccggattctttaaaaaatttagatcgtttttattggttaaagatggttctcttatattcaagaaaggattttctttctggttcgagaacagtatgtatgctttgttttcgttgcaattcatctctcttgcaattttatccttgatattatccacttacaggtatgaccaaattcctatctgggggcatctaatattatattcagttgctgtaattatgttcttgttctttattgcctttggtagaatgataccacaacctagagaatgtaagttgctaaataagatattacagagccaatacaatgattcatctaactattttattggtggtgaaaaagtcgagtcggtcaataactctgttttaccgccaccatttaaagatgaccgctaa

SEQ ID NO: 102564 - DNA, 3132 bp, Enterobacter aerogenes
atgaacgagtctacgcttgaaacagtatgtctggggtggtttgccgaacaaggctgggaaattcatcacgggccggatattgcccctgatggcggtaacccgcaacgcgccagctatcatgatgtattcctaacgcccgtgttgacctcctgcctgcaaaaaatcaatccgcatctacccgcagacgtcttcgaacaggttatctctcttattactcgtgctgaaagcccggatctgattgccagtaacaaagccttccatcactggctgctggaaggtgttccggtacagtaccgtcgcgacgaggaacttatccacgaccacgctctgctggtggattttaaccagccgcaaaacaaccgttttatagtggtcaatcaaatgaccatcagcggaacgaaacaacctcgtcgcccggatatcatctgctttattaacggactgccgctagcggttgtggaactgaaaagccccatcgacgacaaagtagatatctgggatgcctatcaccagttacagacctataaagatgaaattcgcgatctgtttatcagcaatgaagcgctgattgtcagcgatggttatctggcgcgtgtgggttctctgacggccacggaagagcgttttatgccgtggaagactatcagcaatgaaaatgataagcctctgctggaatggcaactggaaaccatggtacgggggttcttcaaccgggagctgctgctcgactatatccgctacttcgtcctgttcgagaacaacgatgaaaggctgattaaaaaaatagccggttatcaccagttccacgcggtgcgtgaggccgtgcaggcgacgatcgtcgctgctaccggtaagcaactggtcctgcacagcaacattcagccgggcagtaagaaggcgggggtggtctggcatacgcagggttctggtaaaagcatctccatgtgttgttacgtcggcaaactgctacaacagccggagatgggcaacccgacgattgtggtcgtgaccgatcgtaacgatctggacggtcagctttacggtacattctgtcaggcgcaggaacttctcaaacagatgccagtgcaggcggatgaccgcgaagcactgcgtgaactgcttgcaacccgcgatgctggcggcattatctttaccactgtgcagaagttctccccggaagaagcggaaagcgctcatccggtactcaataggcgcagcaacatcgtcgttatttccgatgaagcgcaccgcagccagtacggaatgaaagccaatttggaccgggaaaccggcgtctataaatacggttacgctaaacatatgcgcgacgcgctgcccaacgcctcgtttcttgggtttaccggaacaccggtttcggcagaggatcgcgatacccgcgctgtctttggtgattacgtctcgatttacgatattcaggatgcggtggacgatggcgcaacggtgcctattcactacgaatcccggctggcgaaactcgatctcaatcatgaagaactggcggcgctctccgatcaagttgatgagctgattgaagatgatgagctggacctgcgtgaaaaaaccaaaggtgaatggagccgtctggagaaactggttggtgctaaacctcgtctccagcaggttgccgccgatctgatttctcactttgagaagcgcaataccgtaatggacggtaaggcgatgattgtcgcgatgagccgagaaatctgtgtccatctttacgatgaaattatctcactacgcccggagtggcacaatgacgatcctgaaaaaggacaaatcaaaatcgtgatgaccggtacagcgtccgataaggctatgctgcaaccgcatatctacaacaaacggactaaaaaacggctggagtcccgtttcaagaatgtgaacgatccgctgaagctggtgattgtgcgcgatatgtggctgaccggtttcgacgccccttgctgtcacactatgtatatcgacaagccaatgcgcggccataacctgatgcaggccattgcccgcgtcaaccgggtattcaaagataaacccggcgggctggtggttgattacatcggaatcgccaatgaactgaaactggcgctgaaaacctataccgacgcaaacggtaaaggcgatgcaaccatcaacgcagaagaagcgctggcaatcatgctggaaaagctggacattatccacggtatgtttgccaaaacagcaacgtcagcaggttttgactacactggctttgaagctcatgcacaaaagctgttggtgcctgttgcaaactacgtgctcggccttgaggacggtaagaagcgttttcttgataacgtactggcaattactaaagcctggtcgctttgctgtacgctggatgcggcgcagccttataaactggagattgctttcttgtctgcggtgaaggccgctatcagcaaatttaccagcgtggacaaaaaaataagccaagccgagaagaactccgcgctgaaacagattctggataatgccgtaattgctaccggcgtggatgatattttcacgttggcggggctggataaaccgaatattggcttactttctgatgaatttttgcaggaagtccacgatatgccgtatcgcaacctggcagtagagctgttggaaaaactgattaatgacggcatccaatcccgtacaaaaaacaacgtggtgcaggagaagaagtattcagagcgtcttcaggccgtgttgattaaatacaataaccgggctattgaaacggcacaggtgattgaagagctgatccagatggcgaaggattttcagtccgcaatggcgcgtgatgatgcgcttggcctgaatcctgacgagatcgccttctacgacgcactggcagaaaacgaaagcgccgtacgggagttgggggatgaggtactaaagaaactggcgatagaagtgacgctgaagctgcggcaatctacaaccgtggactggcaagtacgcgagagcgtgcgtgcgagattgcgtatcctggttcgccagactctgcgtcggtataagtatccgccagataaaacgcagggggcagtggagttaatattaaaacaagcggaagttatttcgaatcactggacgatgtaa

SEQ ID NO: 102565 - DNA, 1239 bp, Enterobacter aerogenes
atgagtcaattaccagataattactgggataagattccaaaatgggttagcgatttacctaagcaaagttttgttattactgctgatgaatttagcggacgaatacctgtaacccggatcgatgactggcatgattttactcatttattagaaagtgatttttttaatcaacatgatgtgcaattagttttccgaggccataggcgtttcgattggagtatgactccaacattaggaagagtcacgtcaaatggaattgtcactaaagagcttgcagaacgccaactcactctctttagaaaagctattaggggaagaataaaagatcatagcttgctagatgatggtccggaagatgatgaattatggtcaattggtcaacatcatggattgatgactcctttattagattggacatactctccatatgttgctcttttttttgctttttgcaaagaagatcaacttgaagaggatgataatccatatcgttccatttatattttaaacaaaacgtttatcaccgacaatgaaatatgtcaggacatcagactatttgagcccaaaaaagatgatcacggtcggttagtaagccaagcagggttatttacctactcaccgcatgatgcaaccattgaaaataagctggccgaaatattaagcaacgaagaagttcacggcgaagatttttctaatgcatcagaggatgaggaagcttatattttagcaaaatacatctgcaaaatttatgtcaaaaatgaaaaccaaggtgagtgcttaaaatatcttcgtcgtatgaatgtacaccatgccagccttttcccagatttaattggtgctgcagattattgcaacgtgtttatttctgaaattgagaaaagcaaagtaattaaaacgattacccctgataccacagagagccgtccggaagcaccacacctctcatttgaaagtaccattccaaaaaccaatgcttctaactcgataatagatctattattaacaccagccgaagccagaggaatagatattgaaaaattgcatttcatggctagtgaaatagctaacacccttgcaaaaggtaaattaatagactggcaagagcgtgactcattgaaagaaagtatgcttgcaaaaacaagaatcatattgagaaaagcaggttatccggagtctgcacgtgagtatgttattcaaaatatactttctattgaagatagtgatgacaaggaggtataa

SEQ ID NO: 102566 - DNA, 720 bp, Enterobacter aerogenes
atgtgtataagagacaggcaatatgctgagttaaaggccacggcagaactgtttccgtctgcaatgcaagaaagcaagttgggtaatattcctgatgggtgggaaatgtctactttagctgaaaaaattaaaataattggagggggaacaccaaagcgttctgaatcagattactggggaggtgacatctgctggtactcagtgaaagatgcgcctcatgatggggatgtatttgttattgatacggttgagaaaattaccgcaaagggactaaataatagttctaccaaattactcccagttggaacaaccataatttcggcaagagggaccgttggaaagttagctttggtcgctgtagagatggctatgaaccagtcatgttacggaatctctggacaggatttctcagggccatttcttacctatcttagagtaaaacaatgtattgatgtattaaagcggaatactcacggtgctgtatttgacacaataacaacaaatacatttgaaacggtaaatatatttactgcacacaaaacaataaatgataaattcgaagagattgtcacacctttatttaatagtattaaaaacaatttggtaagcaatacttatttatctcaactccgtgacatgttacttcccaagcttatatctggtgaaattgatttagcagatcaaactcacatttttaacataagtacggaaggagcataa

SEQ ID NO: 102567 - DNA, 795 bp, Enterobacter aerogenes; identical to SEQ ID NO: 89034

SEQ ID NO: 102568 - DNA, 660 bp, Enterobacter aerogenes
atgcagtttgactggagtgccatctggcccgccattcctattttgctggaaggcgccaaaatgacgctgtggatttcggtcctcggcctggttggcggccttatcatcggtctggtggccggtttcgcccgctgtttcggcggctggatagccaaccacatcgcgctggtatttattgaaatcatccgcggcacgcctattgtggtgcaggtgatgttcatttacttcgcgctgccgatggcgtttagcgacttacgcatcgacccgttcaccgccgcggtggtgaccatcatgatcaactccggggcctatatcgcggaaatcacccgcggcgcggtgctgtccatccataaaggtttccgcgaagcgggtctggcgctgggactctcccgccgcgagaccatccgccacgtgatcctgccgctggcgctgcgccgtatgctgccgccgctcggtaaccaatggattatcagtatcaaagatacgtcgctgtttatcgttatcggcgtcgccgaactgacccgccagggccaggaaattattgccggtaacttccgcgcgctggaaatctggagcgccgttgccgtcatttatctgatcatcaccctggtgttgagcttcattctgcgtcgtcttgaaagaaggatgaaaatcctgtga

SEQ ID NO: 102569 - DNA, 180 bp, Enterobacter aerogenes
atgagggccagaagcagagcgggaatcagcttcctcactaccaaggccacgctgtgcagccacaaagtctacttttataagtttctgcaggtgcttacgatcaatttggctagagtcagcatccagtacctggctaacgtaggtcttaattccgtccaaagggttgttatcggcatctaa

SEQ ID NO: 102570 - DNA, 306 bp, Enterobacter aerogenes
atgctgagaattttgaccggctacgatatgttcgccgtattgctaaaagtgaagaacaaaacatgcctaccactgaggtggttaatcttgggcaagtttttggtgatgataaaacgacccgtcaattcgctgaacgttattttcgtgttcaacacacagatcttttatttgccaatgctgcaatctttgtcgagggggttgctgaacgaatgctgttacctcttttcattgaaagagattttgcaaccctcaacagtcgctatctgtccttccttgatattggtggcagccatgctcatcggctaa

SEQ ID NO: 102571 - DNA, 915 bp, Enterobacter aerogenes
gtgaagcaggcggacgggtcgtggacggtgacgctgaccactgaggcggcaaataccgtttccgtgagcagtgacaaagacagtattgaaaatacgggtacggatgcggcgacactgaccgccacggtacaggacaacggtggaaatccagtgtccggggcaaaaatttactggagtacaacccgtggcaacctgtcatcttcagagcaggataccgatgccagcgggcaggcacaggtacaactgacggcaaacaacggcaccggcgatgccatagtgacggccacgctggagaacggtaactccggacaggacaccattgaggtgattgcccctctgataatgtactgttccacaaatgcacctctgaacagcggtgcgctggcctcagtggttccgaccaataaagtggcgttttatggtagtgccgggacttctgttacgttatcggtcaatggcgaagcccggttcctgagtaccggtaagtcaacggcgaccctgacgctggggccgggggggtacgctctggaagaggtctacaatacggtgggtgaagaggtcgcggtgacggcttatgcgggcagtcagcaactaacggaaacaatggcgtttttcgcggccagcccgggaggcgcagtatatgccaatgacctgacgccagcggataaccggactccctgcagctattactggtgggattatgatcaccagggagaaatgcaggtgaccgtgacgttgtcgggtcgggcgcattttgctgatggcacgcagagcaacactttcccgcttaacgaccagggagcaatgtccgccagtatcttcgatccggacaatgaaatgattgcggtgtcaggggtatgggaaaaatacagtcccacaacgttgtatgtccggtttgtgccggtatcagcgtga

SEQ ID NO: 102572 - DNA, 1059 bp, Enterobacter aerogenes
atgtcaataatttatcagaatggtgacattgccgtattaaacaatgacgcctgcagtctttatattacccggaatgaatccggtagttatgctgtcaacatccagtccgaatacatgcaggagactgtcatttttaccattgaaagtaaaattcgaaactgttgttttgttaaaaataccaccgggaacacactcatcacctgggaacaacttgtcgttacgcctgagggcgagacatatcaaacctgtctcgccgaactggacagtagataccatgtgataaacaccattaatctgagtgccatgttgggagcccccgaacattcaaactcaaaggcagtacaggctgaaaatggccttgttctgctatcggctatcgatgttgccggaaaaaaaatcaccctgaatttattcgatctcgccattcctgatgttgccgcaacgcaattcactgttgataccgtactcagtgaagcctatttttctgattattcagagcaaaacgccaatgtaacgttaaccgtctctggtgatggcagttattacattcagtttttaaccagcaccggaacgattgatacttatcagatccggatcattggcgaaaacatcgtagcgaatgtgaccttcagttttgcgtacagcaacatggggtatcacaatgcgtatatcgattcggttaacgctcagtttattattgtttactcggagatgaacggtggagacatttacttatgcagacagccacttttttctgccgggaacgtaccgaatgccagtgaaatcaagataaatcaaaccgcggggacctattatgccccggatgtgacatattataataattattactgggtgatctggcagagtgatgtattaacatacaacacggttgccgcagatatcatcagcactggaaatgaagtcagattattaactatccctcagcccggacaaatccggctgaataatgaaaccgggaatattaccacatcctgccaggtaaacaacaatgcgcagttgaactacggtatcagcttgtatcttaacaaaatagcgtaa

SEQ ID NO: 102573 - DNA, 639 bp, Enterobacter aerogenes
atggtgggtggagcggacaatcaaaacggtgaattaaggtttatatcaccgacgctaacaccggaaaacatcagtacaaaaatgcccgtcaggagcatacctgcctgccgaatctgcttgagcgccagttcgctgtgcccgaggtgcggagatattacgtatatccaggcaggaaatcgctggtgctatctggcgatcgttatggatctttttgcccgcagagttatcggctggagtctgtcagcgaatgccgataccgcactgataagcaacgctctgcggatggcttatgagacgcgtagtcaaccgcatgatgtcatgttccatagcgacaaaggctcgcagtacgtctcattggcatacacccagcggctgcaggacgccggggtgttggcatcaacgggcagtacaggagactcttacgataatgcaatggccgaaagtatcaacggtctttacaaagcggaggtgatacaccgtaagagctggaaaaaccacgcaaaagtagagctggcaacactggtgtgggtggactggtacaacaatcgcaagctaatggagaggctgggtcgcatcccaccggctgaagctgaaaaaacatattatgcttccagaaactgtaacaatctggcagcctga

SEQ ID NO: 102574 - DNA, 1002 bp, Enterobacter aerogenes
atgttgagcagagaggacgtaagcatgataaaacaaatgcgccagcaaggggtttatattgttgatattgcccgccaggttggctgttcagaaaaaaccgtcaggcgctggctcaagtatccggagccgccagccagaaaaacacggcataagatggtaaaacagaagccgtttatggattacatcgatatgcggctggcggaaaatgtctggaatgcagaggtaatccttcaggagatcaaaagccagggatatgccggcggtcgaactatgttgcggtgttacatccagcccaaacgtaaaatgcgtccgggtaagaaaacggttcgcttcgaaactcagcccggctaccagctccagcacgactggggggaagtggaggcggaggtggctggtgaacgatgcaaaattaacttcgccgtcaacacgttgggcttctcccgacgcttccatgtcttcgcggcaccaaggcaggatgccggacacacctacgaatcactggttcgcaccttccgctactttggcggcggggtaaaaacggtactggttgataatcagaaagcggccgttctgaaaaaccacaacggtaacgtgctgttcaactccggattcctgccgctggctgatcactatagcttccagccgcgggcctgccgcccgcgtagagccagaaccaagggtaaggttgagcggatggtgaaatatatgaaagaaaacttctttgtttgctaccgtcagttcgacagcttcagccatatcaatcagttacttgaacagtggctgggtaccgttgccgatgaacggcaacttcgccagttcagacaaaccccgacagagcgcttcatcgaggaaaataccatctgcaacttctgccggatacagacttcgacaccagttacttcgacatccggcacgtatcctgggatggttatatcgaggtcaggggaaaccgctacagcgtcccggagcgctgctgtggtcaacccgtctcgatacgcataa

SEQ ID NO: 102575 - DNA, 612 bp, Enterobacter aerogenes
atgcacgaactggaaacgttgctgagtcgcctgaaaatggaacaccttggataccacgttgaaggtctactggaacaggcggctaaaaacgagcttaactaccgtgagttcctgtgtctcgcccttcagcaggaatggaacggccgacatcagcgcggtatggaaagccgtctgaaacaggcgtgcttcccatggataaaaaccctggagcagttcgacttcagcttccagcccggcatagatcgtaaggtagtgagagaactggccggtctggcgttcgttgagtgtagcgaaaatgtgatcctgttgggacctccgggtgtgggtaaaacgcatcttgctgttgctctgggcataaaagcagtagatgcggggcatagggtgttgttcatgccactggacaggctggttgccacgttgatgaaagcgaaacaggaaaaccggcttgagcgacaactacagcaactctgttacgcacgcgtactgatccttgatgaaataggctatctgccaatgacccgggaagaagccagcctgttcttcaggttgctgaaccgcaggtatgaaaaggcgagcatcgttctgacgtcaaataaagggttcgccgactga

SEQ ID NO: 102576 - DNA, 180 bp, Enterobacter aerogenes
atgttcggcgataatgtactggcaacagcgatcctggatcgtctgttgcatcactcaaccacgctgaatatcaagggggaaagctatcgcctgaaggagaaacgtaaagccggtgtactgaccaaagggccagcgccaataagtgatgatgaatcggtggaaaccggacatcatcgttga

SEQ ID NO: 102577 - DNA, 2862 bp, Enterobacter aerogenes
atggcgcttaatgaatcagacaatttaattgtgaatggcagttttgattccggtaatttcgacggctggagtacgacgggagaagaaaaaacgggctacccttatatcagtaacgggaaagcgatcctgcccgatgcttcgtccatcagccagacggtgagtcttgccggggggacgacctgtgccctgtcctacgatatgagtatcctgtatcaggggaccggttatatttccgtggtcgcgaacccgtccggaacgcagattttccgggatacggccagcggtaaccagtctgacatttcgctgacggtgaccgatccggcggacaccagcgtaaccatcaccttcgcctgtaccgtcggcggggaagtggatgtggataacgtcgccctggtgaccacggaaaaaacctttgtggtcggaggggatttttccgatccggacctgcccggctgggtcaaaaccagcaccgtgactggcagtcagccttcagcggtggacgggcatctcagcctgcctgagggaacatcggtctatcaggatatcctcattgaggaagcccggcagcttcagctgacctgcagcatgtcagtgccggacggctcgaccgggagttttgtgatcatggcgctgccgtcctaccggaccctgtacacgggcagcaccagtttttccgcgcagacgttctttttctgcctgccgcagggagacacctcagcccgcctgcagttcacctgtgcttccggcgatgccatcagcgctgatgatgtggtcatgggttatgcttcatcaacggttattcacgaaggccagaccggggagcatgcgccctgggtatccccgggcaccagtggtctggtgaccttcagcgtgcagtccaacaccccggccggcagcggtgacagtattcattttactgccccgacagggaccacgctggttgacgccagcataccggggctggatgccagttattataccttcacgctgtccgctgatgcgctctcgggtgagctcacgctgacaaaggacatcaccagctggggaagctgtgacctgatactggccgtgaatggcagtgtggcggcggggacgacgctggatgatggtctggcccggtacatcatggccgatggccggcaactgggggatgatgccggtatcgcagttgtcgcggccacggtcaccatcacagagcaacagactggcggacatactccctgggtatttccgggtacgtccggcccggtgccgttcagcgtggtggcggatgccccggacggtacaggagcttacctgtactttaccgccccgacctacactgacccggacacgaaagtggtttacaactgtgccaccatcacgggcatcacgctcagtgacccggcgctggcggggaaatacaccttcacaccggaaaataacggcctgaacgcccgtctgacgctcactgcggataatgtgacctggagcgggggcaccctgaccctggcggtggacagcagcatggtcaaattcgggacgctggataacggcagtattcagtatgtcaggccggacggtcaggcgctgggcaccccggcgggggtcaccgtcatcgccgccagcaacaatccctgggataacgtcagtggggtggcagcgtgttatatcggtatgcagaccgatgatatcagcacatcctcgaataaaggtacgctgtttgtgaaccgtcaacaagacaatgacggtaattactctgcgcacagtattccggtgtttgtgggtatcaccttcaaacggttcagtaatgattttgccggaccgtccaatgatcaggtcaaaagtgcgttgtcgctggtcggcctcagtgccggcggttccgaacttgttgatttatcgcctaactttgtggtgaccggcaaccaggattaccggaaggcgtattattccctgggggacaaaggtgatatcgctccggcgccggaaacgaccccgacggccggtgcctacggtaatgaactcacgcttggcgcctggtgtgagatcaattacgtttatggcgatacagatatcccggagaacgccgaggtgtatatccacctggaagcgccgctgacggtggggacctaccagtatacttctgacgggcagacacccgcgaaactgacagtgaattttttagcgcgaaaaacctacgagtattccgacactgacgggagcagcaaatatattctggtgcagaaccgcagtatgcccgggacctatggtattgataccgatccggattccggtggcgcttcggttctgaatacgcagctatttgcggtacggatagatgggacgcaggagagtggtaagtacggattctcgttagccagcctgcagaaagaatcctatacaaaattgacggaaaacagcaaatatggttctgatgttattgactctctctggatcaaagcgaccggtactgacggcgtgatgtggaacaagtatgcgcaatttcttcgggtatataactacttcgacacacagaactccccggggggcaccggcagtgtggtgagtgattatcttctgggtaaagtaggggggcatgaggaccatggctggatgtctgaaggcgagctaacattttctggctcctttgatacgacgaaatatgagctgcactacctcagggttgtggttgacatcgaccactcgactgacccgggcgatgatacgacctgggagggtaataacagcatggacactgacggtacctcgcgcattcatctggtcgataattacggcaaccatatttacctgacaccaaatttcggtggtggtaataccgtgggtgattatcccggaatgaccgtcaccgttaacacacaataa

SEQ ID NO: 102578 - DNA, 4194 bp, Enterobacter aerogenes
atgagcctgaattactatacccagacgcctaattttatcagtgcctcttccggtgatgtggatccccgtacccgtctgtttggctttacccattccctgaccactctggtcggcaataatgagatggggccttcgctggatctgacgctcacctattctcccaccaccacggacaatatctgggggatggggatcggcatgatgtttaccctcacctggtatgataaaaatgcccgcaccctttatctgaattccggtgaaacctataaaatcgacgaatccaccgacggtagcgggaccgtctattttgacgtgaagcagtgcaaaatcaaaacctttaacgcggaaaaaatcgatgacggtacaggggagatctggtaccgcatcaccgatcgtgacggaaatgtcaccgagttgcgtgaacaggacgcggggtattttctgccgaccatcctgtggtctcctctcggacgctccctgacggtatcctggacgcgggatccgggctccagccatctctacctgtccagggtcaccgatgagattgtggatgatgtgaccgggcttccccgggtgttgttttccgcagtttacagtgacgggctgatcatgacgttgctgccgggctcggacagcgaacagacgttcacgctgaatacgaccggcgactatctgacatccatgacaaattcggcgttgaccgactcggcatcgccgccggttctggtaccctggacatttacctactgcgccgaagcggacatcggctcctccggactgcgccctctgacagccattaccatgcccaccgggctggtcaaatccgtggaatatgatatggaggcgatggcgtttcctgtcgatccagatgcgccagtgtatcgcctgccagcggtcacgacgctgaccatcagtccgggattggggtcaccagatattgtcacccactggtcattcaccagtgaggacgtaccgggcagcagtacgccctcgaaaaattatctcggatatggcggtagcaccgggggcgtggcgtggtcggatgataccgatgccggctacagcatccgggagccggactatatttatcagagcgtttccacgcagctggcggctgacggtagcggaaacgtcatgaccaccacgtatcagtataataactatcatctgctggtctccaccgtcatcacgcaggatgcgggaggccacgtgtatacggtcgacacgacctggtatgccgacaccagtaaaacctttgatgaacaaccggcctgctttcagtgcccgaaaaagcagacggaaacctggtctggtccggcaggcagccactcgcgctataccggttatgcgtatgatgactacggtaatctgacgcagcaggtgaatctggcagacagtaacggcaatgtcacgaccaacagtacgctgacggaatatacgttttatcctccggccggagaagacaccagcagtgataatactctcggttgtccgccggatccgtatggctttgtgtatcgtccgaaaaccactacggtcactccgccttcggtcaatggctacagcgatgtaccggtcaggacaacgcattaccgttatgcattgatgaacacactggccggaagcccttataccaccgcggtgatgccggtacaggacacccactatggttcagatgttctgacggagaccggaacactgctggaccgggtcaatacgtatgagacggatatcacctccccgcattatggccggcagataaaacagacgacgcaaatctacgatccggattacaatgcggccacgccgggcagcgcagcgtattatccccagacgctggataccgtgtggcacttcactgaagatggtgccggactggttcaggaggataccctgacgacttatgatggtctgagtgtggtctcgtcatccactcgttcctgcctgaccggcaagatactgtcgatcacggatgtgcagggtaacaccaccgcgctgttttacgatcccctggggcgcctgatccgggaaacccggaatccggggacagattatgaaaccagccgtttccacacgtacatgctggaaggacaagcggagcccgggaccggaaaatacggggtaacagccattatctcgacccgggcagacaacgccggcaatcaggcacagacttatcacgatggcatgggacgccctgtcgcacacagagataatgccagtgatatcggcctgtcggatgaattctatcaaaccggtgcaaccgtctgggacagttggggacgccgggttcgcgacattcagcaggactggacgcaatcgttccacaccagcccggatgccagtatcccggatgtcaacctggaacatcaggcgcaatatgacgtctggggccagcagtatctgtccattccggtctccggaggcgttccactgggaatgcagtatttctccagccaggatccggttaccctgacgacgacagcggaacttcaggtgagcaatggtacgctgttactggggcgtcaggtggcacagacggatgaaatccggatgaccgagacgttgacaacagaaacgaaacaacagacggccggtgacgagacgtccaggcagatttacagcaccaccgtcaatgaatacgacgggctggggcgtctgcgtaaaaccatctacccgcagccggacgccatcacgctgccttccgatacagacagtacggggtgggtgagtaccagttatacctacgatgcatttgaccgggtgcgtaccagtacgcagtgggatctcagtgataaggcgggaaccgtcgtaccgtcggagatagtgacacagtcatggtcgtatgcgccgtttgcacatactcacctgccgatcagcgtggctgtcagcacaggaggaacgtcgacgccggtggtgatgggcacccagacctttgacggacttggccggatgacggccagcagttgtggcggccgctcccaaattgccgtgtattccggggcccgtactgtgccggacagcaccacggatgcggccggacagacgctgaactatgactatatccctgaactcaataacgccctgaaacaactgaacagcacaacagatcgactgactcagacgtttgtgtatgccacgaaaccgacggaacccggcgctcccgataataccgggcggctgctgtcggcggcagaacgtggcagccggagtgatgcgtttacctggcttccgtcaggcaaaccggatacgcagagtgtaacaccatcatccgatatcccccgcgagactgccagtacctggagtttgcagggccgggtgctgacgcagaccgatgtggcaggtaacacgctcagcctggtgtacgcccctgacggacgattgagttcgctgacggacccgctggtcacggtgacgcccggatacgatgctgcaggacggttaatttcacagactgtggtgcagaacccccattttggtagtgatgtgttgaccaccaccctgactctggatgattacggtcgggagatccagcgtgtcatcactccgaatgttggtgaggcgttaagtattaccaccacctacaccctgaacggacaggtgcagcgcagagtcaccacacagggcggggccacgcttcgggaggaaaccttcacctacgatgtacgcagtcggatgactgattacgtctgcagcggcagtgtacctccgctggatgcttacgggaatgcgctgagtgagctgcatttcaccctggatgtgtacagcaatatcacgcactgtcagaccattctggcggatggtggtggtacggatgaagctgaatatgagtataccaatccggcggatccgtgccaattgatgtcggtcacacactccctgaccagtcattatcctgccagtatcactctggtctatgacgctaacgggcgcatgaccacggatgaagccggtcggaccctgacatatgatgaagccggacgcctgtccactatcagcgggcccacgggcagcagcgggtatgcttatgatgcatttgacactctggtgatgcagagcctgagtggggatacccgagagttgtactatgccggccaccgtctgctgagtgaggtacaggtggagcaggggcagatcacccgtaacattccgggctgctggggcacctccgccgtcagcgatgaatcactgtga

SEQ ID NO: 102579 - DNA, 1221 bp, Enterobacter aerogenes
atgacgttacagttaacgggttcgaacagaaatggctctccggagctgatgttatccgcagggaacaacaccgccatgtcatggagtccctttggcggtggtgtggttcgcaccggcgtggcgacaaagctgccgggatttaatggtgagcgtcaggatccgctctccggcgtgacgcatctggggaatggttaccgggcctacagcccggccctgagacgctttacctgtccggacaatgaaagtccgttcggtatcggtgggataaacccgtatgtgtactgtgatcacgatccggttaaccggaccgatccgagcggacatggccccattacctggctgatacgtaaagtcgttactctcggagtgcgtatcggtcttgcctcagcagagactgctgagggcatggccactggcttgtccacggcaggtgcggtggaaaccgggacagagctggctacacagggtgcaacaggtatcagtcagcaaatcgccaaagcccggggaaacctgcaggctgccagccaactgggctggatctcgctggggatggggctggcaggtgggctggggctggcggaaggggatatctcccggatggtgagacgacttcgcggtgcctcgaaaacataccgggtgtcggaggccaatacacatcgctatggccggatcaccgcattgcaggaagaaggcgttcagcctgtcagcagatccggcgagggcagtgatatagcgtcaggtatccagtattttgtcgatttaaatgattttaataccagcacgcaggcgacggatttcgggatctcacaaaaaccaagactgaatattgcggctcacggagattatattcctgtgcttgataaagcggcccgaattaccgtgaacgggagaaaactgtccgcgcgggatattgtcagcgaagtgaccagtaaattcggtgatttatctcagtacagcgaaattcgtaccatcatgtgttattcggcggactcccggccgggagcgatttctttcggacaaaaactgtcgaatctgacacgtctgccagtggagagcttccacggaacggtgtcccggtacaatcatatgccattcagattatttgagaacgcccgccttattgatgacggaactgaaaattaccggcctcagtatttttacccgcaatggaataaaatgcataaatataaaaatgactggtacggaagctcttcctcctga

SEQ ID NO: 102580 - DNA, 1038 bp, Enterobacter aerogenes
atgaattatcaaataaccggcaatgaccggatgggttccccgcagcttgcactctctggcgggaataatttgttgtttgcctggagccctttcggtggtggtgtgccccgttcgggaagcaccgctccgttcccgggatttaatggtgagcgccaggatccgctctccggcgtgacgcatctggggaacggatatcgggcctacagcccggccctgatgcgttttgcctgcccggacagcgaaagcccgtttgggatcggaggaataaacccgtacgtgtattgtgaccatgatccggttaaccggatggatccgagcgggcacgggcgacgctctttcttcagaaggctgtttgtctgtggatcaaagaaaaaaatgaaccccatgcaggagagcgcgttaccggttttcacgaccgcaaccgataccccggctccggggaccgcatcgtcgttgcaggcgaccgcagggatgtggtcacaggtagtggaagagagggagcggcccgccacgatggtgcaatcttatggggtcgatcccaccgagccaccgctgactgcagtcgggcacccgtctgaaaccataacaccatcgcgtttcagggagaccgctgaagtgacgcatatgctggaaaatgaaaagcggcaacccacatttccgttgcagaagacggccgatgatttttatgacgtcgggaataaatggggggcttccacagcaataaaacgtcagtccttacgggggcgccgggaatcgattaaagatgagattaatgcgttcatatcgcggacccggccgggtaataacctcggaccggtccagaatgctaaacgtaaacttccggcgctgcttgataaggccattgaaaacgggtatcgcatggatattcagcccgttcaggaggtatttactaattatctgttcagcgacgtcacagatggctttctgaatgagaataccacgggaacgttgattggcgatcgtactgagagtagttggggaaatttccttaatattaatgaattacataaaaaatag

SEQ ID NO: 102581 - DNA, 906 bp, Enterobacter aerogenes
atgctgaataaatcattacctgttctggctggcgtgttactcagctcatcgttttttgtccaggcgtcgactcctgccatcattgctcaccggggcggcacgggagacggaccggaaaacacgctctatgtgatccagaaatcggtgtcggcgggcgtggatgcggtgtggatcacgttacagatgagtcaggataatgtcattgtactctatcgccccacagaattgtcgtcactgacaaacctgacggggccggtctcttcccgcacggcgagtgaactggcgaatgcagacgccgcttaccagtacgaccctcccgacttcccgttacggggaaaaggcatttcggtgccgacgctgcagcgtgtgctggaaaaatggccagacaccttctttttcctggatatcaaatcgccggatgtggcgcctgagcgctttgcccgtgttcttgacggggtattaaagcagacccgcagcctgaacagagtcagggtatattccacgaatgaaaaatatctggcggcgttgcctgatgatattccccgatttgaaagccgggatctgacccgcacggcgctggccaacatcacgatgaatcatacctgtacactcgggcaccgggggacgaaggaacgatggttcgggttcgaactcacccgcaatgtgaatgttacggagaaattcacattgggcgagggggtgaccacaacgtatctgaaatgggataaggaagcgtttcattgctttaaaaatggcaatatgaataaagtgatcctgtttggcatcaattcactgaaggattattcacaatccagggacctgggagcggacggtgttctggtggactctccggctgcgttccggagcctgctttcccgccggcccccaccggtgcggcagaagtga

SEQ ID NO: 102582 - DNA, 810 bp, Enterobacter aerogenes
atgcatgcctggtgttttaatgaacgaaaggactgtttgcgctggcatgccctgcacccgggcagacacccccttatttttattcacgggatggggtgtgcttccagcagtgattatccccgggttgtcacttcatctgattacccggcgatatcttcattgctggttgatttgccgggggccggattcagtgataaaccggatgataccggctatgactccggaacccagaccggagtgttgctacgctggttgatgtccaccggggtgtcagattgcagcttattcgggcacagtgcgggagcgttcatagctctgaagctggctgacgccttaccgacgcctccccgacaactgatcctgtgttcgcctggtctgaatgactggggcgtgtctctgctgaaaaacatcaccgccatgaatgaagcggagtttgtcaggcagggctttgcagtgactgtggcgcagttaaaaaagcgggaccacaataatgtctggctgggagcattccagaacagcgatccccgggccgtctggcaatgggcccgttccgcgctgaaggatcaggcctcggactggatgcgtgcactggccgctctggccacgaaaaaaagtgtgatcctgccggcgcctgcaggggaggaggatgtacagcgctatatccgggcgggatgccggatcgttcagatcgcaaagagcggacatatgatggcatatgataatcctgatgcgctggcaaagatactcgcagaactgatgatggggggcggagtgataagggatcccgatgatgcggacacgataccctga

SEQ ID NO: 102583 - DNA, 747 bp, Enterobacter aerogenes
atgatatataagaaaattaatgtgacattagctgttttatttctgagttgtcttgccgcagctataatgaagctctctcctgccagtgcccgggaagccaaaggttttctgacacaacaaacctcaccggacagcctggcgatactaccgccgccaccggcggaaggttccgccgcctttcaggctgacaaagcccgctatgaatcgggcaaagcactgaggaatactggcagagcccgtctcgccagcgaagatgcgagttacaggcattttggtcaggcgttctcagcagcttatggcatggaaatctcagaaaaccatacgccactattgtaccaactgttgacgcaggtaatgcaggacagccatgaccacgcgatgcgcagcgccaaagaatactataaaagggttcgtccattcgtcatttataaagagacgacctgcacaccacaaaaagacgaaaaaatggccgccacaggctcctacccctcgggccatgcttccttcggctgggcggcggcgctgattctgtcagaaatcaatccacagcgtgaaacggaaatactccgccgtggttatgattttggtgagagcagggtcatctgtggggcacactggcagagcgatgtggatgccggaagactgatcggcgcagcggtggttgccgcactacacagcaaccccggcttcacagagaagctacgtgaagccagaaaagagtttgcggtattacatccccgcgactga

SEQ ID NO: 102584 - DNA, 258 bp, Enterobacter aerogenes
atgtcacgtatcacccctacagacgatatcctgttgcaggacagtattgccgtgacgcttgaacgggcgggactctggcgacgagcggctcaccgctggttgcttatttttgatcaactggaaagtgaccaggcccgggaagtggtggcgttacgtcgtgaagcatgcttactgatgtccaccgataacgcagaaggcgacaccggcgcccggcgccgggcggaataccgtaagcttcagggaaccccgcagacatga

SEQ ID NO: 102585 - DNA, 1137 bp, Enterobacter aerogenes
atggaaccgaaatattcgccactggcaataatgctgacgggttttttattatcgtgtcaggtttctgctgcgggatctgaacctgcaccttccgctgacgggaaggctgcagtgtccgcggaggccgtattgtccccggtgacagaggtgaaggaagagcagaaggcgacatcgtcgccttctgtcacgaaacatgaagatgctcatcatgtttcgtccgcatcttctcccgtgacaacaggtgatgaggatacccatcacgcgacgccagccacgacaggcggagacggtattcataacgtggcgccagtggcttcttctccggcagagggaaacacagcaacggctgcatcaggcgcgaccgcggggagtgacgtgtcgtctcagacgaaaggcctgtttccggtgacggatactacggtcacgccggcgcctgaattcacgccgcaacaggaagcccgtattggtgaagtggcgaaagcctacctgctggcgcatcctgatatcttaattgaggtcagccagaaattagccgctcagcgaaaagcgcaacagatccgcgcggtgacgacggctgttctggagcaccgggatgcactgctgaacgatgcatcaacgccttcctacggaccggcagatgcgaaagtggcgttggtggagttttttgattaccagtgcagcgtatgcgcccgggaggccccggttctgcaggcgataatgaaaaataacccccgggttcgttacgtgtttaaagagtggccgatctttgcgtcacgctggccccagtcaatgaatgcggcccaggttggcctgcagatctggcaacagaaaggggcggacgcttatctggcttatcataatgcgatcttcgcgtccgggcatgatgaagggcgcttaacgtcccgggatgttacccgtgccgctgctgctgccggcagactgaaaggcaagaaagccgatatgctggcaccgttatcacagacggatgcgctggcccagaatcttggcttccggggcacgccggcattgattgttatgccggtatcgggggcaacgatggagaatgtaacggtggtcccggggggcgtggatccggacaccttacaggcggcgatcaataaagcgaccgggccatga

SEQ ID NO: 102586 - DNA, 1578 bp, Enterobacter aerogenes
atgcgtcagactgtcgttgccgtgctgtgtgccctgatggtatttatggccgccctgctggttatcagtattcagttatggcattccgcgcaatctgccgcccgggcatcggcacatctgtccgtcagacgtattgatgccatccttgatgaagcacagcaggccacccgggcggccatgccgctggtgaaacaggcatgtacgccggatgcgcaattcacgctcgggcgggaagccacccgactgccacatattcgcgcagtcgcactgctcaggcaaaaccgtatctggtgctcatcactgaccggacatggcatgacactgccccatccggaagcgatcgccgcatcgcgactggccctgtatccgggagacgttatcgcccccggcatccctttactggtctggctgacccccgtgcccgggggggccatcgccgtcagtatcagtgacgtccatttgcgggatgcgctgattaccggtagcgggaatacgtcccccctgacactgatcgtcggccagcgccagctctcccggaacggcaatatccgtacgttcgtcacccgcgccgatgcacgctacgttcagtctttgcgtttttcttttcgcatcggctataccgccccgactcacttcagtccgggccgactgattcgtgaagggggatttctggtgataatggcggcgtttatggcctgtctttcggggggactactgtaccgctatctgctcagtctctcctctcccgcagagaaactgaaaaaagccatgatccggggcgatattgtgccgtactaccagccggtgataaacagcatcaccggcgacattgccggggtggagatcctggcccgctggctcgcccctcagggtgcccgtatccctccggatgtgtttatcccggtcgccgaaaaaagtgggcttattattcccctgacccgacagttgctgcggaccgttgagacggagctgtcaggcatcctgcccctccttcctgatcggtttcatgtcgggttgaatatcagcgccccgcactgtcagtcagaacagctgcttcaggacgccgcgcactttctggctgcgtttaaaaatcagtccatcattctggtactggaaatcacagagcgggaacccctggtactgaccggagccgtgttatcccggctggcagcattacgggaacaaggggtgatgctggcactggatgattttggtaccggctatgccggactggcttacctgaatgaatttccggtcgatatcattaaaatcgataaaagttttgtcagccgtatcaatgaggatccggtatccacgcagctggttgactgcgtgatcgacatggcccgtcggctgtcactcagcctggtcgccgaaggggtggaaacccaatatcaggcggcttatctgacacaacagggcataccgctgctccagggataccatttctgccgcccggtgccgtttatcgcgtttgccgacactctgcgttcagccggagccggaaaacgcggtgatacaccaggccattcccccacatcttgcgggacaggaaagccttttcagcaaataaactga

SEQ ID NO: 102587 - DNA, 246 bp, Enterobacter aerogenes
atgactgacacgacccggcatctgaacacagtcaacaccttcaccgggctggactttattgcccgtagtctggtacagatggaacgcaatggcacctgcctttgccctgaagagatcaccggcaatatgactgacgaacagcgaaccctgttcatgacccgggtggccttccaccgggcacaaactcagcctctggccgaaaaatcaacgtcggcgtccccctctcccgggacatcccgtcggtaa

SEQ ID NO: 102588 - DNA, 1419 bp, Enterobacter aerogenes
atgagcgcgcaaatactgtttgaaaaccttcgtcaggcgctggggctgagcgcctttcctgcggagcgggtgagactgtccggagccgatccggtttacccgacaccgtttcgcatcggggaagcggcagcggcagtgctggccctgcagggcgtgatgctggaggcgttacgtgctgctcagggcatggcggtaaatcccattacagtggactgtcgcagcgccgcggcctccacgcatggtgtggcctttcagcgccagaacgggcataactggcagtataacgatccggattatccgacgaccggtttttatctgaccgcggataaccgctggatttttctgcatggcggctatccattactgcgcgatggtattctgacggttctggacgtgccgaatcatcgtcaccgcattgcacaggccgttgccggctggaaggccgctgatcttgagagcgtgctggctgaggccggattgtgcggaacgattgcccggacccacgacgaatggctggctcatccccaggggcaggccgtgagtgctgaacctcttatccggctgacccgtttacacgacagcgcgcctttctcccgtctttatgaaccctcccggatgctggaaaatttgcgcgtgctggatttcacccatgtgattgccggccctgtggcggcccgggggctggcacaaatgggggccgatgttctgcacatctcctccccgcgccggccacgtattctgccgtttgacgtcgataccggccatggcaagcgtaatgcctaccttgacttagtctcggcagccgatcgtgaaaaggcccggaacctgatcgcgacaggggatgtttttgttcaaagttaccgtccgggcgcactggcccgttacgggctgtcgacggcggatctggtccggcttaacccgcatctgataacggtggatctcaactgttatggtcacagcggtccgtggcagaaccggccgggttttgaacaactggcgcagacctgtacggggatggcaatggcgcagggggaaggccaagggccggtgctggggccaacgtatccaaatgattacctgacggggtaccttgccacactgggcgtactgatggcgctggagcgtcagtcgcgggaaggcggcgcctggcaggtggcggtctcgctgtgtcgcacggccacctggctgcaacagcaggaacaatccgcaggctggcaaactgcggaagggccggaagaacggtggatccgggacagcatggtcaccgaatccggtccttttggggagctgcagtatttcagcactgcgctgcagtctgcgtatacgcctctgtctttcagtacaccagccatgccgctcggggcacatctcccggtgtggcgaccccgccgtactttctgctcacggatacccggataa

SEQ ID NO: 102589 - DNA, 405 bp, Enterobacter aerogenes
atgaaacgagtctgtcatccattctcctgcctgctcctgggcactctgctgagcctgagtgttcaggcgaatgaccacaaaatcctgggcgtggtggccatgccgcgcaatgccaccagtgacctggcactgaaactcccggtctgtcgggtggttaaacgtctgcaactgacagccgggcgtggcgatatccagttaagcggcgccaccctctattttaaagcggcaaaatccggcacgcagacgttgaatgtccctgcctccctgagtgaagggagttctacggactggatcaatatcaacagtgataatgataaccgacgctgtgtgtcaaaaatcaccttctccggtaatacggtcaattcgtcggatatggcgacgctgaccgtgacgggcgatgactga

SEQ ID NO: 102590 - DNA, 708 bp, Enterobacter aerogenes
atgtcttttgagcagccgttgttgtatctgaatgccgggggcgatccccgggctttccctgattataccgcgcttcgtgatgaactcagaatgcgccgttatccgggaggtccggcggtgaactggtcccgggtggatactttatgtctgtcgttgtttgctcgaaacggggtggatttgcagacgctcgcctggtacgcactggctcgcgcacacctgaccgggttgcccggtctcgctgagggactggcattgctggatgcgttgttgagagagcagtggatgtcgctgtggccgccatcaggccatatgcgaatggcgatcctcagtcatctgagtcaggaactgcaacaggtggtacaggcacagagcgtggtttacaccgatcagggaacactgtatctggctgaacaatcgctgaaccacatccgcgaggggttgcgggcattgaagctgcattctcccggccagatggaggcgttgtgcgcgcaactgcatcatctggctgtggcgcaggagcacggcaccggacaggggatatcatcccgtcagctggcctctgctccaccggctccacgaccagagggcgccccgtcaggggacgatttgtctgcctcatccggcagggaagtccctgccgcgctggggggactgaagcggctcattggtgatgtgatcggccactggcggcgctggttctgccgataa

SEQ ID NO: 102591 - DNA, 729 bp, Enterobacter aerogenes
atgatgggactggtctatcaggatgatgaggatttacattttttgcaatattgctcagaagcgcagttaaaaatgattgcggggatgttgacgcatgatgacaagggaaagcaacgtcttgccagtgaactactgaagcataaagagtttcagtcgttaacgtcgcatcccgagcaataccgtcgctgctggcggttaattgccggtgaactacagcattttggtggcgacagcattgctaacaaagtccgtggtcatggtctgcggtaccgggtgatactgctggatgtctgcaagcgactgaaactcaaagctgaaaaaacgatgtccacgacggacattgagcagagcctgctggagcattttttgcgcaacagctggcagaaaatggatgacgtgcagcgggctgagtttctggcggcggtggatgcaaaggtgacggagctggaagcattgttgccgctactgttgaaggattcacaactggccgccggggtttcgcatctgctctcggggcagctcagcaagatcctgcacacgcatgcggcggtgagtgtgattggacatgggttgctgcggggggccggactgggagggcctctgggggcggcgctgaacggtgtgaaagccgtcagcggtagcgcctatcgggtgaccatcccggcggtgctgcagatagcctgcctgcgccgtattcttcagcatcagcaggaaaatcaggttgtctga

SEQ ID NO: 102592 - DNA, 255 bp, Enterobacter aerogenes
atgaagcctgtggcattgctgatcgtcgtctcccccctgtttctggcaggatgtgccgccggagttccggcgaaaaagggtgaattatttgatgatacggaaaaggcggtgatggtctgctgcccgcagaacaatggttttgcctgtgactggatgaccgaagcggaagatggtcaggaaaaaatggcgctggccaggctcagtaagagcaccggatatcggggggccgtctgtccgctgtcgacagcagaataa

SEQ ID NO: 102593 - DNA, 195 bp, Enterobacter aerogenes
atgaaaaaactcgccatggcgttaggggcatgcacactgctcgtctggggcgcggcaaatgcagccaatggacaggcagccgaaaaagcgaagtcggcctgccaggctaatccgacacaatgctctcaggctaaatcaacggcaaaatccgcggcccaaaaagcggcctctgccgcaaaacaaaaacaacagtaa

SEQ ID NO: 102594 - DNA, 249 bp, Enterobacter aerogenes
atggtgatattcaaaaccatcataacttattttcatttcagttcgcgcaatccattctttcgtgcatttataattattgcggctcagttacgaccagaaaagctttgtccatggctttttttttgcgaaaacgtatcctgtatccgtcagtcgaaccattttttatacgtactgaaacttcatatcagcagcaaaacgggggcgataaatcgaaccgggtttatcgctggcctgctgttgtattcctga

SEQ ID NO: 102595 - DNA, 738 bp, Enterobacter aerogenes
gtgcttattgtctcagtactgaaagtcagcaaggaattcacccctggacatgcccggtggcttcataaacagctgaaagggcataattcgatctgcctgacggacgcaggccgcatttctgaggtcaataccgtccctttactgcacggctggccggggtggtggtccaaacttgaattattcaaccctgaccgccccgatatcggtcaggaggatttactctatatcgatattgatactgtcattaccggagacatcagtccactgtgtcagctggataaaataaccatgctgagtgatttttcttcagttacaccacaagaagccccactggcatccggtttaatgttcattcctgccagcgaaaaatttaaggcatggaatacgttcttgcgccatcctgaaaaaatcatgtcgcggccacgcattcctcccttccatggcgaccagggttttctgagtgaaatttaccctgacgctcaacgtttccagttattattcccgaaccaaattttaagttacaaagctgatatcgccagtgcacacatgtacggacatgatccagatatctatcgcggaaataatagcggaacattgccggaaaacgccctcatggtttgctttcatggcttcccacgcccctggaaaaccggattaaaatggatccccaaattgtcgatattacagtctgcaaaaatcggggttcgtaaagcaaaaaaatattgtcttcttcagtaa

SEQ ID NO: 102596 - DNA, 201 bp, Enterobacter aerogenes
atgctgcaacccgcccgccataatcatgtggcaggcaccaaaataaaatcagctatagctctcgtctggctgatttccccctccattgaggtaaggggcgtaaacttacataacgacccccgagggagcgcgcagttactgcccacgttctgcaagagcattatgcatacaatgacaatgagttacagtttcgggacgtaa

SEQ ID NO: 102597 - DNA, 2199 bp, Enterobacter aerogenes
atgaatcaggccgtcagcagttcatcgaccattaccgaaccggatatcatcgttaatgtggtgacctccgtcagatccaatgatacggggattatcatactttcgttcagccagccggtggataccagtgatgcgacaaatgtcagcaattatcagtttgacagcgatgtgacggtgaattctgccgttattaacgacgacaacacgcaggtgacactgacgctgacactgctttctaatgtggccagccatcagctgacgctgggagatatccatacgctggccaccacagagaacatgtctgttggtgtggtgctggatacgttaccgccggaacagatttataacgatgatgacagcgccatcacatatgaggcaaacagcggctggtcaaatgatgataaccgggcgtattgttacaataaagatgcacatgagacaacgggcaataactcatgggcaacgatggacttcatcggtacgggtatctcttattattcggaacttgtgggggatcaggggaaagctgaagtctttattgacgatgtgagtcaggggatttttgatacatacagtgagacacatgaagagagccaaattatttgtaccgcatcaaatctggattttggggtgcacacatttaagctggtaaaaatcgacggcacatgggtccgactggatgcgctgaaagtgtataatgacggagatatcgaagttgcgtcctgtgaaaatggtcccggaaaaacctttacactggtctttaaccagtcactggataaagcaagtgctgaaaatattgctaactatgctattgataatgatggctccattgtttctgccgtcctgggaggagaaaataatgatacggtgacgctttcagtggataatgttaataagggcattgtctaccgggtcacaatcagtcagctggccaaccagataaaaacaaaaacttcaacggtgatcacaaccgtttcgttgttgtctgatgaggcgcttttggatttaatccagaaaacgacatttcagtactactggagctttaataatgtaaacagcgggatggcttacaagcgggttcctgtggcatcggggtctctggggggcccggtaacaaccgggggaagtggctttggtgtgatgtccatcatcgttgccattgaacgcggttttatctcaaaagaagatggattagaaagaataaacaccattgttaattttcttaccagtaaagcatcccggtataaaggcgcctgggcacactggatcaatggcgacaccggggaaacaatgccattcagcccggaacagaccggagcagatattgtagaaacgtcatacatggtgatgggattgctttgtgccaggcagtatttcaacgagcaaaccttaactgacaatatcaatacgttgtggaatggcattgaatgggattattttacatttggcaccggagcactttactggaatattgatgctgaccttaatccggtgggctcgacgacagtcactggctggaatgaagccatgatcacctatatgcttgcgatatcatcgccgacccacccgatttcaccggacctctggatcagcggctggtcgcaaggcagttataactctaaaaatcaggtctattataatgtaaccgtgccaatcggttctccttataccggtccaatatttttcggtcagtatacattccagggatttgacccgaggaatttgctggattctgaaaataatgttgactatctggttcagaaccaggcacaggctcaggttcacaaccagcatggcatagtaaacccaaacgggtttacaggttacggggataattgttgggggctgacagcatctgatggcccggacgggtacagtgctttttctcccaccagtgataacggcaccattgcgcccaccggtgctttaagtgcaatgccatggttaccggaaaaaagcattaaagcaatgagacattattacgatgatctgggtctgatgatctggacagataagtgcgggtttattgacagttttaaccagacccgaaactggtacgcaacggagtatcttgctcttgatcaggcgccgatcatcaatatgatcgaaaactacaggagccagttgttgtgggatctgttcatgagctgccctgaaattcagaatgggctggcactcatcgggtttacacaaaaataa

SEQ ID NO: 102598 - DNA, 852 bp, Enterobacter aerogenes
atgagacatttcgtattatttcctcaactggagaatgccctgatctggctgaaagggcacagcgcggttgtcgttcagtatggctggaatatcgtcgccgcagtgatcctcttttttaccggcaagctcatttcccgcctactttccggtggccttaaccggttactgataaaaagaaaagtggatcccactatcgtgcatttctttaccgccctcacccgttatatcaccatggcgtttgccgtggtggcggtactgggacgactggggatcgaaacctcctccattatcgccgttatcggagccgccggactggccgtgggactggccctgcagagttcgctgtcgaatttcgccgccggcgtgctcctggtgtcgttacgccccttccgcgcaggggaaacggttcaggcgggggccattaccggcaccgtgcagcatgtgcatattttctccaccaccttactgaccgccgatcacaaggaggtcgtgatccccaacggaaaaatcatcgccgacagtatcaccaattattcacgccataactatcgccggatcgatcttgtcatcggcgtggggtaccagagcagccttccggaggtgaaagcagtgatacatgaggtcatcgcccgggagccccgaatcaatcaggaccgggatattaccgtccgcctgggcgaactgggggcgtcttccctgaatttttatgtccgggtatgggtccgcaatgcagaatactggagcgtgtacttcgatttgctggaaacgattaaagaatcactggaccggcatgcgattgatatcccgtatccgcaaatgaacgttcatatacagaatatcagtaacggataa

SEQ ID NO: 102599 - DNA, 972 bp, Enterobacter aerogenes
atgaaactgattgtattatgtcttctgctgatggggtattacggcacggcgctgggatgtaccggtgatcaaacgccaccggcatcagccctgacgatccgtctgcagtcgcccctcccggcggattacgcccggaaacccgtcggaacggtgctgtattcacgggtggcctcactggaaacactgaccgcctccccggggatcacgctgtgccctgataaagcgcaatcccttaccattaacgggatgctgtccacaacggaaagcggacgaaaagtttttaccaccccggtccccggggtgggaatacgcattttttacgccgaccatccggaggggagccggaccaccctcagggcgctgcccttcacgcagcaaaagtggcttcgtgcagacacgccggtcaccctgcgtgatgccctgctgaaaatcgagctggtcagaaccagcgaatcctctgccggcgaaggtgcccatctcttcagccagccggcactcctgggctttacgagcggagagacgcacgtcgtcgtcaacctgcgccagatgatccttctgccccctccggtctgtcaggtggatacacctcagatcctgtcagaattaccggcggtcagtcttaaccccgacggcgatctcacggccagccgccggctccctctgccgatcaacattaactgtaccggtcagcctcatctgatgaccatgacggtatccgggcgggccagtccggcgcagacgtccgcactggaagcggagcctgatgaaggcagcgcccggggcgtggggatcggtttctggtatcacgaccatcccgtcatcattaatcgcccgataccggtgaccgaagcccgcacgatggaagcatccggccggctcacgtttttattatcgacaggctacctctctgtcggaaaagggacgcccggtaccgtcagagccgtagccacactgcatattgattatctgtaa

SEQ ID NO: 102600 - DNA, 2556 bp, Enterobacter aerogenes
atgcgaaaccgctatttccttttgtgtctggtactgctgcagataagtgcaaacgcccgggctgacgatgattatttcgagcccgggctcctgaagtccaccgatggcgcccctgaaatctcgcacctcgacaaagccctgtccggcggcatggatgaaggtatctatcatgtccgggtgaccgtgaatgacagcccatccgcctcccccatgcaggttccctttcacaaagacgccgccggcaagctgcagccggcattcagtcgtcaggaatacgtgatgatggggatctcgtcgtcagcgtccggcgttcacctgccggaggcggaggggaatgacacgaagaaactgctcagcgacgccgtgccagcagcctcatcgcagtttgattttgcacacatgacactgaaactcagtttccctcagtcggtcatgtccgtgcaggctgatgatgagatcccgccggagctctgggatgaggggatcccggccctgctgcttgagtatcagtattcgggctcgcggaccctcagcagttcagaagcctcatccgactccgggacccagcattttctgaacctgacgtcaggcctgaatgccggtccgtggcgtctgcgcaataactcaacctggcagagcgatgacagcggagagcactggagttcgctcagtacttatgttgaacgaacgatcccgaaactgaaaagtgaactgacggtcggtaatatttacacgaccgccgatacctttgacagcatcaaactgaaaggactggagctggcaacagacaccggcatgctgccttccagcctgaacggtttcgctccggtggttcgtggcattgcaaaatccagtgccaccatcaccatccgggagcacaacaacgtcatttatcagaccaacgtgtcgccgggggcatttgccattaccgatctgtctccggtgtccacgggcggcacgctggacgtcaccatcaaagaaagcgatggctccgaaacgcattatcagcaggcttatgccaccgtcaccagcctgcagcgccaggggcagtttaaatacagtctggcggcaggccggtacacggctgaagaagatgacagcacacaggacaccaccccatccgacacatttcctgatgatctcacaccggaaacgtccctgcacaccgggcagtcaggtgatgtgatccagtttgactctgcctggggcctgcccctgtcactgacgctgctggatggtattcagtatgcgggccatgattaccaggcggagaacctggggctgggtgtcgatctgggtttgctgggggcgtattcactggacagcaccgtgtcccgggcagagactccccgcacagacaatgcccgacagcggggacgacaggatcgcttttcctgggcaaagcacctcgatttttcagatacggatcttcaggtgagcgtcaagcattacacatcgtcgtggttgtccctggacgatgccatgaccggcaacggcgacgacgccgatcttaaaaaatacgaatcgaccctgtccgtgaatcagaacatcctgaacagccagagtgtgtatctgtcactgagcaatacgtcttattacaacagcagtactgcggtgaactggcaggtgggctggaacctgccactgggaagggcacagctctctctgtcattcagtgccagcaaaagcagcggaagcgaggagacggataaacaactggccgccaccatttccctgccgttatccgttttcacgggaaaagccgattccacaggcacattgtcaggtatgtttaaccgggatatcagtaatggcggctcctccttccaggaagggtattccgattccgcgttcagtaaccagctgacctggaacgcccaactgggccaggaaaccgggagcgacagcagtaatacacagagcggcggactcaatatgacctggaccggaagagccggtaccgcctcactggggtattctcatgatacagatcaggacaaagccacctggggtatgaacggcggcgtggtcctgcatcagcacggactcaccaccgggccgtactcgaccggcgcgatggcgctggtcagcgcaccggggatcgccggtgcgccgctgaccaacgggatcggcctgaaaacggaccggcggggatatgccgttgtgccggatacctccacctacacgaaaaacactgtcggttttgacagccagtccattcaggatccctcgctgatggattccttctctgccaccgtcatacccacgcgggacgcggtggtactggcccggtttaacacacacgccggacagacctttgtggccacactgatggatcacggtcagccggttccgtttggggcgctggtccatgtctccgacaccgaacgagcattttatgtcggtaatgatggtctggtgtacctgaatggcgttccggaagtcgccactctgaccgtcaccacggatgataaccgtacctgccatgccacctatgacacccgtaacgtgtcccggaaggggccggtgaacatggtgacacttgattgtcagtaa

SEQ ID NO: 102601 - DNA, 714 bp, Enterobacter aerogenes
ttgaaactaaaacccgtattttcttttctgatgctggctgcctcttttctgccggggctcagccaggccggtgtggtcctgagtgccaatcgcctgatttatgatggacaaaaacaggatgccgtgctgacggtgaataacaacgatacccgagcatttttgatccaggcctggacagatgcaaaaggaaatccactgcttgacgggaaaaaactgccgttcatcgtcactcccccgctgtttaaaatggcaggtggcgccgaaaacgtcattcaggtggtgtataccggcagcggcctgcccgccgatcgggaaagtctgctgtggctgaatatcaaatcgatcccgtccatcagcaaggaagaaaaagccatcagcagtaagttactgctggcaatcgataaccgcatcaaattattttaccggccggctggcctgcagggtaacccggcagaagcccctcagaaactaacctggcagaaaaccggcgcctcgctgacggcccgcaatgattcgccgttttatgtggtactggataaattgtcatttaacggcaagccctacaccatctccatcgaaaacaataacactgtgatcccgccattcggatcaaaggatttttcggccggtgcctcaggcgcggtcagtgtggcctggagtgcggtgaatgattacagtaccagctccgcccagtatcacgcggatgtgaagtaa

SEQ ID NO: 102602 - DNA, 600 bp, Enterobacter aerogenes
atgcgcaaggctaaatcattattgtcgttatgctgtttcgtggcactgccggctctggccggacatcatctgcaccgtccgggtgatgacgccccggtaaccgggctgagtataccgattaacatcagcggtacggtcaccggaggcggttgcaccatggagctgaccaacagtgctgcggtgttccctgatgtggatgtttctgaactgaaactgggttcagaggtgaccacctctgatgatttatctgtgaatccgacaagcggtgagccggtggtcaaactgactgcgtgtgcggcacagcagcagtataccattaaggtaaccggtgtggcggatgcgaatgagtccgacatcattgccaacacggcggggacaggcaatgccaccaatgtgggtctgaaagtattctataagaacccgattgacaattcatttatccctctggcggctaacacggtttcaaataccatgaccgccggcacggacggtacgaacggtacaggcgataccctgatgattggcctggttaaaactaccgacaccccgaccaccggagctgtcagcattacgtcaacggtggaagtggattacctgtaa

SEQ ID NO: 102603 - DNA, 564 bp, Enterobacter aerogenes
atgaaaatattaaaaccgttttatatggcgctgcttccgaccctgctgatggccggtgccgcccatgccaccggaacgccttccacccagaatttgtcggctaccggaaatattactgaacgctcctgccagctgtcgctgcaggatggccaggctgtcgtctttaatccggtgcagtttgataagcttgcgccggtcagtgatcatccttccgctaatgcaacctttattgttctgcatgcggataactgtagtgtgggatcaatcagtttgtctgtgatagggcaggctaatgacaaaaatccaacacttctggcgacggatacggctgctgcgggggcggcacagggagtcgcgattgcattctggagcgaggacaggacatccagtactacgagtagactggatttgaattccggaaaatcggtttcccagcatgcggatggttccggctcctctctgatttttccaatgaatgttgatccggtgatggataacgccttcagtactgtgacgccaggtacgatttcggcgactgcgaatctgcagattaactatatctga

SEQ ID NO: 102604 - DNA, 582 bp, Enterobacter aerogenes
atgcattttgctcagaaattcttttttgtttcactaatggggatgtcggctgtcgccggtgcccgtcccgtcgccctgaataacgcggcgccgggccaggccaccctcaccgcatccgggaaagtgacgaacgggggatgcaccatgtcgctggataatgcggattttacctttccggatgctgatgtgaccagcctgccggacggcagcagcgccacacaggacaccatgattcaggctaacgccagtccgaccgtcagactgacatcctgtccggatattcagcagtatcaactgaaaatggtgggagcggcagatgaccatgaaaccgatgcctttgccaacaccactggtgggggatatgcgacaggggtcgggatggtggtgtattaccaggatgccagcctgcaatggcagcgcctgtcaccgggggctgacagcactgtcttcagtacctctgcggatggtaataatggcgccggtaacgaattacaggtcggattagtcagaacacaaagtggcgttgacgcgaccgccggtgatatccgaataaccggcacggttcaggttgattatctgtaa

SEQ ID NO: 102605 - DNA, 591 bp, Enterobacter aerogenes
atgaaaaaattttgtaagacattcatttacttgtcccttctgtcaggcagtgcgcatgttctggctgcgccttcggaatcctttgccggcacggggagactgaccagtaatctggtctgcacgctgtatgcgccggcagaaattgcactttatccgcagaaatccgatgaagtggtgacaaaacacgaacgtcaggcctatcagctttcaacggggaactatttttcgttaagcgggagcgggtgtggtggttttaaaaacatcagtgtgacatttgtgggggcggcagatgcggttgacccgacgttgttatctgttggtgctgatgccggcgcggcgaagggcgtgggactggcgctgtgggttcagccatccatctatgatgctcagtcggcttcctggcgcgtttccgatcccgtgctggttgatgtgaactcggggaaaggggtggcttatgcggttccgggggggaaccctgacgatgtttctgtgattgagtttcacattggccaggtgaaggagagtgcgggcagtgtggtgagtcccgggaccatatcgacgtctgttaatcttaacgttaactatctgtaa

SEQ ID NO: 102606 - DNA, 543 bp, Enterobacter aerogenes
atgcctgcgctggcagcaccttccaaaccgtttaccggaacagggaggctcaccagtcatccggactgttcgctgtatgcaccgtcggaaataacacgcttttctctggaagagaaccagattgtgacaaaacataatcgtcaggcctggcagttttcaacggataactcttttctgctaagcgggaacgggtgtggtagctttaaaaatatcagcgtgacgttcgaagggcaggcggatcccattgatcccggcttattatctgtcgggaccggtgccggagtggcgaaaggcgtggggctggcgctgtgggttcagacctcaattgatgatgcaccgtcagcctcaggtcacttgtccgatccggagctggttgatgctaataccggaaagggtgtggctttcgcgagccagagcacggtaaatccggacaatgtggtcatgatcaagtttaacgtcggtcaggtaaaggaaagtgaagagagtgtggtggtgccggggacgatgtcttccacgatgaatctgaaagttaattatctgtaa

SEQ ID NO: 102607 - DNA, 537 bp, Enterobacter aerogenes
atgaaagtattaaaatttttgctttctgcagtaccattttgcgccctttcggcacaggcagcgacaccaggaacccattctctgtcggcgacgggtaatgtcaccgcgatcacctgcaacattgaagcaacatcaaataccatacagttaaatgatgtctcagcgacaaaactgccttgggctttaatagacacggtcagcccactggccactcaggggacactgtccgccactaactgcaacgccagctatgttgcactcagcgccgcaggcgatcccgctcctggtgacaagcgtctttttaataacacggcaacagataaccctgcccagtacaccgggatcgcactctggatcaccgcgtatgacgggagtacacctttaacattccccaatacatccagtgtttcggttaaaggtacaggaaccgattttgacattatttattatgttgcccctgcgcataatgcaaactactcaaataacacccccggcagcattcagggaagcattaccttccaggccgattttctttaa

SEQ ID NO: 102608 - DNA, 558 bp, Enterobacter aerogenes
atgattaaaacaggtataatttcgggtttgtgtctggcatcacttttttcaggctgtgtctttgccagcgcgtccccctccacacaggagctgacagcaacgggcaatgtcacgcaaaatggctgtcaaatatcagttcctgacggagcgctggttttatccgccaggatttccgatattcacggtgaggacgatgtcagcaatatcgacaatgccagtacactgaccataaccggtgaaaattgtaacccgggtaatattagtgtaaaaatcatcggtaccgcggacaccagaaacaatcatcttcttgggatccgcaccgggccggttgcggcacaaggcgttggtatcgggttctatgaacaatatcagccaggcgtgtctaatgcttataatttagtggatgtcaattcaggacagaccacgccggtggaaatctcatctcagggcacttttactatttctctgaaggtgacacctgttgaagttgaggagcataattcagctacagccggacttatacagggcgaagcagaaattcaggctaattatatctaa

SEQ ID NO: 102609 - DNA, 228 bp, Enterobacter aerogenes
atgatcaaaacggtttgtacaggaacagtactggcggtaatcgccatgatttctttttccacaatggcgcagcctgatcgtactcagatgcgccagcattttaaccagaaaatggtggagccctgccagggaaagaaggcaggtgatgaagtcacagtcacaacccgcagtggtgagaaaattcaggcgatttgcacgttgacggcgttaccgaagccacaatcctga

SEQ ID NO: 102610 - DNA, 480 bp, Enterobacter aerogenes
gtgagtaatattttacttttcagcgaagattttgaaagcaatgtggaattaaactggtatttagaacatgctgaaattttaagtaaccagtttggaaacccgtctcattttttaaccaatagccatgacacgcatcctgctggtaccgtaccgtatactgcggtttataaaaaatccattgcatatcaggacctgggatcgcttaattttaacattaccgttgatgccatcgctaccagtccctccccggcagtagggtttgtcgattgccagattacaatttatgatgcaaacggaaactggattgctgcttgtagtgacagtgacggtaacattacctctgagtggacaaccataacactggatacatggtcgtttgatattcatacaggtgatgtacctgcatatttaacttttacttttatcgggaatcttgacgctattgataacatcaatgtttataatgttgttaatgcttag

SEQ ID NO: 102611 - DNA, 216 bp, Enterobacter aerogenes
atgaacaagaaaactaagcgtactttcccccccgagttcaggctggaatgtgcacagctgattgttgataagggctactcctgtcgacaagccagtgaagcgatgaatgtcggttctaccacgcttgagagctgggtacgccagctcaggcgagagcgccaggggattacaccctctgccacacctattactccagaccagcaacgtaccgtctga

SEQ ID NO: 102612 - DNA, 252 bp, Enterobacter aerogenes
atgcatgaagcaatcaatatggtaccgacgtccagtacgcttcagactcgttcaacttatctgagggtattctcattctttatcgcagaaagacagcttacgttttacgagggactgtccaatgtccccgttgttctgaactatgtagcgcaagcggggatgaaaaggaaggccctacaccttcattcgatactggtgcagcttcaccgtctgggcatcgggaccgcggggctgaatgtgctgctggcctaa

SEQ ID NO: 102613 - DNA, 441 bp, Enterobacter aerogenes
atggtgcgcaatagcctgcggttcgtctcctggaaggactacaaagccgtcacccgcgatctgaaggccatctatcaggtgcccacggaagaggcaggtcagcaggcactggaagcgttcgcggctgcctgggacagccgctatccacaggtcagccggagttggcaggcaaacagggccaatctgtccacgttcttcgcctacccgacggacatccgcaaggtaatctacacgacgaatgccatagagtcgctgaacaacgtgatccggcatgcgataaagaaacgtaaggtgttcccgactgatgactcagtgaaaaaggtggtgtggctggcaatcccggcagcttcacagaagtggacgatgccactgcggggctggcgtatggcaatgagccgctttattatcgagttcggtgaccgcctggacggtcacttctga

SEQ ID NO: 102614 - DNA, 1338 bp, Enterobacter aerogenes
atgcaacaatggctttcaggctgtgtgattttgatgggatgtgcgctgatagcgatggggattattcgccgcttgtcaccaacggtgcaatggtttcctgtgattgcgacgtttctggggatcttgcacctgcagattggctgttaccttttgatgacccggcagtgttatcgtgaacgcgactggctttttcccctggttgtcgcgtttaccggttctggtgtgatttttatttgtgcgttgtcagtgtattccggagctaccagcgatcatgggacacagtaccgtgcgatcattttgtttcacctcttccgccatattttgttgagtagcctgttcattgtcgcgttatgccgtttttatcgcgagaccggaaaaaaaatggtgaggaaatccttgcttaaacaggggggcctgttctggggggccgggttagtggtgggtgctgttttttgtgtccattacgctcggtggctgatgcccgtcggtcatactgaagcgatactactctggacgcatggatccgttatcctttccggtattttgtggggactgacaaccgcaatgatattgctatttacccgtcttcaggacgtattatggcgttgcatggcagtgattgcgatatcgagtctggtggggcttgtcttcattgctggcaaacaacccgtgttgtcctggggatggtatatggcccggttgtgcgaaagcctcagtacactgggggtaatggtggtactgatggcggatatttttcgacggtaccgggatgcgcaacaggcgtatgcccgctcacatgaaaatgcggtcagggatccgatgacggggctgtacaaccgcggctatttttacactaccttcacccggagtctgagagaggccgggccagagaacccggtcagtctgattttttgcgatatcgatcatttcaaatcggtgaatgatacctgggggcatttgcagggggatcgcgttattatccggacgggaaatctgttgctgcaaaatgttcgggagcaggatacggtggccagaataggtggtgaggagtttgttgttgtgctgccgggcctgtcggttgatatggctgcagcctgtgcagagcgactgcgcgagtgtttgtcactggcaacgatacagagtactgacggtgattttccccgggcaattactttgagttttggcgtttactgtacgtacgataaccgtgtctctgctgatttttgtactgaacaggcagatcgggcgttgtatcaggcgaagcgtcggggaagaaaccgagtagagatctgcaatgataccggttctgaatcggtgaatagcctggtcctctgttga

SEQ ID NO: 102615 - DNA, 471 bp, Enterobacter aerogenes
atggcctccctttctggtgcgatacccagccatcacgcccgatgttgtcgttcagttaccggggatcgcgccagttcctttatgagagtggtacaatgcaagcaaccagagcaccgggctcaccgaccggaaagttccaacagtatcagtactgagaatgtttgcggggccgaaggtaccggtttcccccagagtcccctgcccgataaaaccgggtaccgtgccagcccccggggggatgaggccaaccagaacgtctcaaaatggaaattgggcccaaagaacgtggcggcttgtttgacacaggcgggcaaagctcagattcttgaggcaacagggaatggctttcctgcggtgaaggtattcccggacatggaaagccacgatcagtgccgccagatcatcacatttagttactatttaattaataatctatttgtgcgtatgcgtttcatcttaatccttccttaa

SEQ ID NO: 102616 - DNA, 1200 bp, Enterobacter aerogenes
atgagcaacacaggtactcccgtattcagtaaaaaaattaatattccggccaaatctgcgccaattattatcctccggtattacgcaccacctggtggtggcctagacgaacaatggaaaacgacattaccgtcgctggattttgtttataacaacagcagtgtaattatgtatccctatttttcttttaatagtgtggatgcccccgtccccgatggatttaatgaaactgcttatataaaagggcagcagaatggtggatttgatcaacatgcacaatattaccagacgcaactggcgagtaatgatgttgatgctgagctcattatctcaggtagttacccggctgtaggatatgtgagtgtggttttatacttcaatccgggcgaaccatcaatgtatcagttgcagatacttgatagtgatatgctgtgcaaggccgaaggggtaagccctgttatacctggaaatccaagtgtgttttcgtatacccagaggaatatgtgccaggagcacaatcagacagatgccccccgcattcagcaatcggtatcagatgtatctcgtgaaggagagatctatttttacagaccagatgagcgtacatcagcaaccagatatactgaagatatcgctcccgatgggtgcagtcgttcttatttgtatgcccatatggccactgaggatgtgttaattctgagaattaaagttccttcaacgttcgtgtcatctgatgagccggatatgatatttaatcaatatcagtgcagagagctcagtattagtgcgaatattcctggtgatgtcactccggtattaaacttctggactgtcagtagttttatgctgaataaattaaaagatgttgatggttacgcttatgtattttttgctccgaatgattacgtaacgaatcttgttgcaatgacaggaacccctgattttgtacctccggtactgacctggggcctgtatacggggtatgttcttggtcggcctacagaggctttacctgtgcgctatcggggcccggctaatgactggctcggaaatccggaaaatgcactgccatacccgtctccggtgactgctgacatgttgggtgagtggcttcccgagttgtttggtggaagtatgagcgattttctgaatggttccattggtgccgtcaataaagatcaaccgtggccgttgcaataa

SEQ ID NO: 102617 - DNA, 648 bp, Enterobacter aerogenes
atgatagatcctcgctaccctttaacagatctccatcgtcatctggacggttgtcttcgcgtgcagacgattctggatctgggataccagtttaatgttgcactcccggcctgtgagcttgaaggggagcatttcagggggcaggcctgcaggaatgagccagatttgggacgctttctagcaaaactgcaccgcggtaatatggttttgggttctctggatgcctgtcatcgtgtggcatacgaaagtgttgaggatatggcagcaaatggcctgcattatggcgaactgcgtttctcgccgggagagatggcagtgatgcataatctttctttacctggtgtggttgaagctgtgaataatggtgttcgcgagggttgcagagatacgggaatattggttcgtctgacaggctgtcttaacagaacaagtacatgcaatcaggaaaccatcggaaggagctcaactcgctgctggagtatagtgagcacatcgttgccctcgatcttgcgggagatgtgcagttctggtttggagcgtggttcagggagtattttactcgtgttcgtgacgccggttggcatattaccgtgcatgccggaggggcgaccagccctgaacatatctggcaagcgatacacgggctga

SEQ ID NO: 102618 - DNA, 723 bp, Enterobacter aerogenes
atgaccccggatacggtatttgcgcagaaaaaggctgcagaggactttcgatttgatgaaaaagtggccggtgtgtttgatgatatggtcgaccgttccgtgccgttttatcaggaaattcaacgtatggtggcggagctggcggcggattatgctgtgccggatagtcagttgtgcgatcttgggtgtgcaaccggcacgacgttggcgcggatggacagtgttatttcgcccggtgttggctttaccggtattgataattctccggatatgttggagaaatgcagaatcaagtttgagcagttgaattccggacgtttatctggttttttgtgtcatgatctgagagagatgcgcctgccggaaaacctttccgtcgtatcgatgctgttaacgctgatgtttatccgtccggtacatcgccgtgatgtgttatcgacaatatatcaggggctgaatccgggaggagcattcattctggtggagaaagtggtttgtgattcaccggatctgaatcgtcagtttattaaatattattacgatatgaaacgtcgtcatggttacagtgaactggagatcagccagaaacgcgaagcgcttgaaaatgtattgataccctatacggagagtgaaaaccgtaagatgctgaacgatgcaggattcaggcgcgtggaagtgtttttccgttggtataatttctgcggtatggtggcagtcaaatga

SEQ ID NO: 102619 - DNA, 702 bp, Enterobacter aerogenes
atgatggtctctgttggtaattttttatttcgcacccgtaatggccttttccccttgctgtatctgacattgtttgcggggggagcacatgtcaacgaggccagcgcaatcatgctgattgccgggagcataattgcgctggccgggcagggggttcgtattctgactgtgggactggattatattgtccggggcgggcgtaaccgtcgggtttacgctgatgacctggttcagaatggattgtttgcacattgccgcaacccattgtatctgggaaatttgctgatgattatcggttttggtgttgcgtcgaataatcttttgtatctggctatctccctgccactgttctttctggcgtatgcctgcattattgccgctgaagagtattatcttcgggggcgttttggcgatcgttactgtcattattgttccagcacgccacgtctgttaccacgcctgaatggaattatacggacgctgcgaattttttcgtttaactggcgacgtgtggtggtaaaagaatacagtactgtctgcattacgttgctggtcctggtactattgagtggtcgggtgctgaatcaggattcaatggactggtgggtgtccggcggggtgatagtattaatactgctggcctgtgtggttatccgtatgttaaaaaagtcgggcaggattagtgccagatcggtgcattaa

SEQ ID NO: 102620 - DNA, 816 bp, Enterobacter aerogenes
ttgcgctctgctgatattgtacacgttctcggcggtggctatatcaatgccaattggaaagaaaattatgccatcctgttcgcttgtcaggccttaaagcagatctcacatgctaaaacctttgctaccggcattagtatttatccgcacgaagagtttctccccgccgaaatttttaacgatgcggtaacctcttttgattacttttccgttcgcgatcgcgtcactgccagtcgatttacggttgaaaatacccaggatgatgtgctccttggatatgacttaaatgttgtacacaaaaacaacagccccgggctgcccgatattttatgctgtattcagaatgaactttctgaggacgatatatttcaaaaacttgtcagccaggttgccgtttaccttcagcaacagcatcaatgcggcaggaagataggttatctggaagccataccaggtgccgacaatacggcttatgttgaactgcggaagattatcccggatattactttttatcctttctcgcatgtctggcatggaggtatcccggtacaggctgatggggaaatcattagtacatgttttcatcaccatctggtaggtgcttgtcttgggctcaaaggtaccgcacttaatattgatcgtgaatattacaagaacaagcacgaatcattgagccagtcaggtaccggctggaacatgcaatcggcagaaaccctagccggcaatttacactcaaccatcaacgaagattttcaaacacaactcggcgtcattacctcagccaaattaaataaggcattaaccctttatcagtaa

SEQ ID NO: 102621 - DNA, 1047 bp, Enterobacter aerogenes
atgaaattgaaagatgataaaaagcgcttgcgccgtctttatttgtcactgattgcaaaggctgaaaaagagaatccacctattttacatagatacggtgataatagaaaccctatcaagggctatgaattacatcacaagttagctgaatcatggggaggatcacaccatcctgaaaacctcgtgagattcacagcaagacagcattttgttgcacatcacattttggctttgctttgtggcggtggaatgtgggtagcttatttccgtatgtgtcaaccttcacagggtaaaacagggcgtagctatagagtaacaagccgcaactatcaagaagcgcgggagcaattcagagaagttcaaagaatcaggaatacgggtaaaaaattgtctcaagaaacacgagataaaatgtctgcgagcaacaaaggcagaaagcgcacggaagaaacaaaagcaagaatgagtgaagcccaaaaaggaaaaataatctctgaggaaatgaaagaacatcttaggaaattaaattctggcattaaaaggaatactgttgtttgccctcattgtaaaaaagaaggtggtgaaaatgttatgcatttgtggcatttcgacaactgcaaaatgaacccggataaacccgaaaattcacaaaaacataaagagtataaaaccgttacgtgtcctcattgcggtaaagaggggaaacacggaattatgcaccgttggcattttgataactgctctaaagttactggtagaataagcaaagaagatgctgttattttgttaaataattcccttagaatcaaaccggaaagtaacaaggtacagtgtccacactgtaataagattggcgctttaatacctatgaaaagatggcattttgataactgcccagctatcacaggtaaacaaagatctaatgctgattcttcatgccctcattgtggtaaatctggaaaattccaccatttacaaaggcatcactttgataattgcaagatgaagccgccagaatcgacagaaacggcggctatgtggttttag

SEQ ID NO: 102622 - DNA, 963 bp, Enterobacter aerogenes
atggctacttacagaaaattaccttccggcaaatggcaagcacaaatccgtgttaagggctttcctcaaaaatccgccacccgtgatacaaaggaagaatgtgaaatttgggcaagagaacaagagcaagcaacgtttaaaaaggtgaacaatgttgagaatctttctcaagaatacttaaatgaagtgatggtaaagaatggcaaacagcgcggaggttatgaagcaacaaaatttagattggtgactattagccgcgctcttaatggcaaggcattagagacactgacaaaagcagatgtgttatccctccgtgttgaacgtctggaaagcgtttcaggcggtacagtacgtctagaaattcaattactctctcgtttcctccgttgggctagggatgaaaaagaggttcagtgtagtgacgttacagagggtgttaagttaccagatcccggcaaggcaagagaaaaagtaattgaaccattggaattatcaatgattctggaaaatgtgagcgacaaagcaagaccgatagttgagcttgcctatgaaacagctatgaggcgtaacgagatcttagcaatcacaccttacatggttgattttaagaatcgtgtgatccgtcttatggatacccaaaccaaaaacggacatgcgcgcaaagtcccactttctgcgaaagcggttgagctactccgcgtactctgtgacggtaaagacaaacatcaacggctattcacattaaccccgtatgccgtcacacaagcttttagacgggctgcaaggctatcaggtgtgaaagattgttgctttcactcactacgccatacagccatttctaacgctgctgaaaaagggctttcaaatgttcagcttatgacattttcagggcatcgcaccttatccatgctacagcgttacacacatttgaaagctgaaaacatcgctacactgttagactaa

SEQ ID NO: 102623 - DNA, 495 bp, Enterobacter aerogenes
atgaatgatgtattgacctggagcggggatattcacgatatatttaaaagggaatcaagggaaatgaaaaataagaagttgatagctttgataatatccgctgccacatcatgctcgtcagtttacgcagctacattaccggacaatgaggtgggctcatatatacttgcaatgaacactatgtcaccgatcactgcaaagtacaccatccagtacaagcaagcagttgagcagaaatgcaatacggttcttggtgttgaacaactcaactcgacggcattcaccaatgttgttcaggcaatggtgagtagtgagactgtcgatagaatggggctggatgctgctggtggctctctccaagatactttgtctatgatcgggaaaaacgtcacttgtagcgacctgaacgcgccatttaaagctcttctggatgataaagacttcactagcaagcatcagcacttatcgggtgatgctgccaacttactgatttag

SEQ ID NO: 102624 - DNA, 861 bp, Enterobacter aerogenes
atgattaagcagcattttcaaaacgaactggtcaaatgcggataccctgatgacctgaccattgagtaccgtcttgggtactgtcagggtgatggagtggcattctacggatgtttgggtgttgatcatgctcaggcgttgatgaagcgcttgttaagcaccacaaaggggcgagttgatgctgtcagcagagtgaaaaacctgatagcacaaaaagacattgacaatatgtttcttgtccttcgtgagtatgctgagctccagttctgcgaactggacatcaacagaaacagctacggccatcattacagtcactggaacaccatgcgtattgatagcaacgtagacttcactgggatctttcctgatgatgacaccatgcttggaacaggcatcgaagggattgaccaagcgatgttagagcgttggcaaggcatctgggagcgtttcgtgttggaactgtcgggtgatgttaaacagctttccaagaggctcgaatccgacggttatgcgttgatagaagcctcgccacacgaagagaaagtggtttgggaacggactactcaaaattacttggtgcgagtgacagaactccctgaacgggatttcgacatggaccactgggatgacgacatcagagaccaaacgattcgttctatcctggagggaaaagagcgagtgcttggcctacgtgttgaggtgctctctcgtgaaaacgagattgttctgggtgaagagagtctgcacggtttgaccgttgccagtgatgacaagagctacgctggctacagacgagaactcctccggggcgctatccagcaaaccagagattttttctctcgccacctcaaagcggcataa

SEQ ID NO: 102625 - DNA, 273 bp, Enterobacter aerogenes
atgactaatccaatcgctggcgacatcaagattaagaactttggccgtgaccggaaatttcgttcggttgatgagcttcaaggcactttgtctgaacagtacaaaggtcagcatgtcagtgtcgtttaccctacaaagcctcacggattactccgtaccgtctttgtcagtgttgatgatgccggtggcataaatgagacttacggaaagcagtctccagtcgattttaatgccatcaaagatgacctgtttgtaccaagtgtactgaattaa

SEQ ID NO: 102626 - DNA, 261 bp, Enterobacter aerogenes
gtggtttgtgagatcgaagcagagtacccattgctgaacactcattcgggtgttgtatggactcagctcgatgaactcaacagttacaccatcaaaaaaaaccaatcactcattgatcacattgataatgcgatcgctgaactgttgaaacacaaggctcgtctacagcttgatattcaaaagctgcgagacggtgacattgatctggtgaaacaggccaagcagcaatacgaagacaaccagatgtcgagtacccgctag

SEQ ID NO: 102627 - DNA, 540 bp, Enterobacter aerogenes
atgtctatccttgaaaagatgaaagcagaaatgcttaatctctctcaaaagctcaagttaccggaggtttatgccggtgatgtagagcaagatctaaccctgattgagcagttcagtggctatcaaatgttatgggtgctcagaacctgtggttcggcattgataccgttaaaggccggagttcaccctgttcatgttactcactggatctggggtaattcagggcaacaaatctttgtgtttcatgtcaatacgcagcacggaaccatagagaaagttgacttcgaggaagctgaacgtctcatcatgcagcaaccttgccatttgagctcttcaatgaagcgcgaagagataatcagctatgttgatcgtgttctatctaatggctgcaaccttcgtatatggggtgtttttgactcaccgaaacactcttgttcggtcggggactggtcacaatggcaacagtatttcagatcgtcaggtaatcacctgatggccgattttattggtaaagccattcgattcacgaaccctcgataa

SEQ ID NO: 102628 - DNA, 333 bp, Enterobacter aerogenes
atgaaccaattccatcggttggatttgtatcatcagaacaagggtagaagagcatctgagcctgatacacctttcttactgcttgccaaacgcatccctccaatgtactggagactgttccagggtgtcacactggatagtcgtatggggtacaccggccagcggcagttccacggtcttgggcaagcaatcaactgggcaaaatcatcagttggttattcctggtcaaacaagcactttcataagcccgtagacctcgatcttttgctggcctgtactgcgagtcagttgcctgaacatctggtcgaagatctgaaaagacggggcaattga

SEQ ID NO: 102629 - DNA, 489 bp, Enterobacter aerogenes
atgtctgtacttacttttaaaatccatgatgtgaaaaagttgattgaagagcttgatgcagcaagcagtttttcaccatcaacggacgatttgttcaatcctgaaatgtactctgacggcatagtcagggataaaaatggaaggactgagcaggaagctgaaaaacatggcgggatgttctggccttcagaagactttattgaccagagcaaagttaaacccgccttgattttggtaggagatcatggagtttacctcatcactaatgcaaaagctgatgggtctccaagctctcgcggaacagtcgcttatgctaagggctgtaatccagggctcgatgatgatttctacgaaaataaatgcaacttgtttggtggtgatgatggttcggttcgcatcccttctgaatgggccaggtgggctatccagaaccagaaggcgtttcggatcaaattgaccacaaactcggttgagctgatgcaggggtaa

SEQ ID NO: 102630 - DNA, 996 bp, Enterobacter aerogenes; identical to SEQ ID NO: 52327

SEQ ID NO: 102631 - DNA, 369 bp, Enterobacter aerogenes
atgcgtactgacagcggttatgagcttggggttagcactgggctaggcgagaacactatccatccagccacgctggaaggcgctggtgaactccgcccggaacatggtcacaaacccctgctgatgctggtttacctgcaacaacgtttcgcggatgacttttcaaacgtagagaagccgctggtggcattctgtgatgaacagggtgataccttcgactacgagcgttttgattcactaaaacccctcattgaacggtttggtttcagctatgacgaagtaagagcagatgcagaaaggcttggccttgtatctgagctgattcgcctagcagagatcgacgccgaacaagaggatctctttttttaa

SEQ ID NO: 102632 - DNA, 2739 bp, Enterobacter aerogenes
atgcgaagtcacaccctagtcatgagaaccgtcgcctcattgctttccataaccatttccgcgttgccggtacatggttatgccagtagttcgagtgcggcggatatagccactgtaggcaaagatgctcaatcatttggacagagcttatctaactcattcaagtcaaactctggaactgttcaggatggcactatttcaatgcccacgttgaaagatggtcagttccaaatgaatggtggtgaacaagttaatgttaatgatctgttcccagggacaagtagtaaaaataacaaaccagacagctattattttcccgacgccaataagccaaacgttgataacctacagggcatgtatgattctggtagcgacatggataatgttggcaactcttctcaggggacactctggtccgatgctaatagctctaatccatcaatttcgggtgctgcatataaagtcctgcttgatgcaacaaatcgttctcgcccggacttttctaatgatccagttttgaatctaagtaaaaaaacatatgaaaatatggatcttattgctggtggttttggtgattgttctgctgaaacaactattaatgaaggaaccataaatgctcacgtccctgagtatgagcgttgtcagcgagtagtaaaacctgctggtgattgcgatattatccattccttgggaataacaagtgatgttcaatatgtatatgtcggttctgtaggtcgaacttgggtcactgttaaatttgaccttaaaaatggtacgtgggaaccaattgcaccctctgatggtgctcaaaaagtcgcgcaaataccaaaagtagatttcaatgccatgtgcagtggtgccgttaattttaagaccgatcttgttggttcttgggattgggctgagcatggcctacccggaaagatcgactcgactgttatctatagagttaaccaatatccaacttgtgagaatggtttggttggggttgtacagatccaggacactacggaatcagatgacctagagtggattcttggtgggaagtttgcttttcgattcaccaagcaagttgaggaccaatggactccgcagacttgtattgatgatgcaaagaaattgaatgatgggttttgtaagggaacgataagtgttactgagggggccagaaatgaaaacgactgtattacagttaatggctccagcatttgccctggtgatccattcttcaattcactgaaaccatcgccgttgccaggtattccaaggctcgcacagaaagtcagggtatcaaaactccagtgcgactttaatgtggggcaaatggaatgctggactgaccctcaaggggtaaaacattgccctaacaatgatggtggaaatgtaaacagttgcgcggcactagaaggcaatcctaaatgtggcttcatcagctctgagtgtattggtggtgcccaaggcccatcgggccaatgttatgtatttaaggatacttacgattgtggtgtggatgtcaaagtcccaactctcgataagaacactgagtacaagtgtggtggtccgatccgttgcatgggggatgattgcttagcaataaataaatctcagagtaccgatttcgccagagcaacagccttacttaatgctgctcagtttttgacacaagatatgaagtgtaccgatagcgcaaccgaagaggggggggatggaaatattgatcaaggatgtacggtttttggcggcgaatccggtgaatgtaaaatagctgtaggtggtgtatcggattgctgtgaaaagccttcaaatatatctctagctgattacctaaacttgatcatggctgttcccaagctagatggtgcggtaatggggttacaagatggtaatgccatgaagggcgcttatcaggttcttcgagatcctgtaatggaaggttggactgaggtaacaaagccatttacgagctatattgaaaatatatccggttctgtggactcatttatggaaccagtgaaccaggtgatggatcaacttattgagcagctaaaagagcaggttaaagaagtcatgatggacgtctttaaatctgctgggcaagatgccgcgacagagcaagctgctgctgccgcatcggaacaagccgcagaacagatgatgcagaccgcaacgacatggctcagtacagcgatgacaatctatacggtctatgttgtcacaatggtaatgatccaaatgatttataaatgtgaggagtctgagttcacaatgaacgccaaaagggcgttgaagaattgcacttatgttggttcttattgcaaatccaaagtattgggcgcttgcatagaggagcgtgaggcttattgctgctttaactctcctctttccagaataattcaagagcaaattcggccacaactcggccaatcttttggtgatcccaaaagtccccagtgtggtggtatttctctggagaaaattgcagacatagattggaacaaagttaatttggatgagtggttggggattttgcagcaaaatggcaagttccctacgcctggatcaataaatattgactcgctaactggcgctggtagtgacttcaatattaatggggatcgaaagaatgcccaagagagagcgttgcagaggcttgatggaatagacatcgacgccaagaggaaagaggcaacaaatcgcgttaatcctcaaacaggcgcgccaaataataatggtggataa

SEQ ID NO: 102633 - DNA, 798 bp, Enterobacter aerogenes
atgcaaaacaaaattaaagaacttcgtactcaactatcaatcactcagcgtgaattggcggatatggttggtaccagccaacaacagatccaacgtatcgagacagggaaagttgcggccaagttgggtctggcgcaagcgatcagcgcggtcttaaaaaagccattgagtgctgtttttccagatagcgataacttgctgaagaaactgcgcaatcaaggtagccgtagtgacaatgagctggaaaaaatcgccgctaatggcattgaaatggatggttgcatttggacggtgaaactctggctacgaggacagaaagattatttgctgttatctatttcctcggctgataagcgtcgtttttactcatactttcaggaaagcgcagtaccagaccgtgagcttttttttgttttcgactctgagcagcatcggtatgctttaaatgcccgagaggtcatttttcaccaatttttgtttgagattcttcctcctatcactgtcgaagaaggtaacgacgaaaatgaagggagctatggaaatgttcatatcactatggtgaacggtggcccggtcattgagctgtgctgtgaatcagaagagccggaggacgaagaattcggcgatctcggtcaattgaatgcattttttgacattcttgaatcagagccagaatcgacagagcgatatcagttaaccgacatagatggagaagatgcttttatccgtattggttctatcgcgatggtgcgagtcgcgcttgacgcgttagagcctgtggaagatgatgaggagtaa

SEQ ID NO: 102634 - DNA, 249 bp, Enterobacter aerogenes
atgggttcgcttactaaacaaaccatcagcgcacagatacccgttgagttggctgctgctgttgaaaatctggcaattgagttggaccgttctaagagctggattattaaagaagcgttgaccagtatgctggccgaaagagaacggcgtcatcagagcattcaggccggtcttgccgatgtggatgccggtcgcgtggtgagccactcggacatggtggattttgctaattgcttaaagaaatcctga

SEQ ID NO: 102635 - DNA, 339 bp, Enterobacter aerogenes
atgaaaactcttcctgcaagtaagcgggcggcaaagccatgcccgtcgcctgtggtcgtttggcagatgttacttacccgtctacttgagcagcactatggtctgacccttagcgatactccattcaatgatgaaagtattattcaggaacatatcaacgccggtatcacactagccgatgccgttaactttctggtggaaaagtacgagctggttcgtatcgatcgcaggggatttagctggcaggaacaatcgccttatctgcgagctgtagacattttgcgggcgcgacaggcaactggtctgttacaacaaggccataatctttcgacacgctga

SEQ ID NO: 102636 - DNA, 351 bp, Enterobacter aerogenes
ttgtcgaagaaaaccacgataaccacgcatgatatcagtgaaccgtggtggggactcagacgcgatttctcaccgtgttttggtgcccgcctggtgcaggaaggcaaccaactgcattacctggctgaccgcgccagttttaacggtcagttcagcgatgcggatttacgccatctcgacctggcttttcctgtactgatgaaacagctagaactgatgctcaccagtggtgagcttaatccacagcaccagcactgcgttacgctgtatcacaacgaactgacctgtgaagcggatacgcttggtagctgtggctacgtttatctcgctatctatcccacccaacgctaa

SEQ ID NO: 102637 - DNA, 483 bp, Enterobacter aerogenes
atgaacacaacaaactcattatctgttgttgctgagctggctcccgccacgcagcgtgccattaaacgcgccttaactttgctggaaagtcagttgcgtgagcccggcgtgtcatttacatcgagcagttcagttcgggactggttgcgcttgcagatggcattactcgagcgggaagcgtttatgctgctctggctcgataaccagaaccgcctgattgctcacgaaactctgtttaaaggcaccatcaacagtactgaagtccatccccgcgaagtagtgaagtcaggcctgaagcacaatgcggcagctgccgtactggcacacaatcacccctccggtcaggcggaacctggtcatgccgaccggcagataacgaaacggctgaagagtgccctgactctcgtggatatccggctgctcgaccacctggtggtgggcggaatggatatcgtctcgtttgctgaacggggctggttgtaa

SEQ ID NO: 102638 - DNA, 213 bp, Enterobacter aerogenes
atgatctttttgaaaatgcttgtaaccgctatggcccaggtgctgacctggtgcggcggacatcaggcccggcaatatattgaaatttgcttccgtcaggcaggctacgatgacagcagtattgatacagccagagaagcggtcacgcaattggtcactgcactcatcaccaccctgatggcgcagatattaaagattctggatacgctgtag

SEQ ID NO: 102639 - DNA, 678 bp, Enterobacter aerogenes
atgtccgaacagggacaccgctatgaccggcttgccagccgtctcgccattctggtcagccgcctttttatgggggagtcgctcagcgtcaggcagcttgctcaggagtttggcgtctctgaacgtaccgtacagcgcgacctgcgcgaacgtctgcgctaccttgacacagaatacaccggaggcagctttcgtctccgggatgcccggggaccattccgcaccaacaatgacattttgcgttttgcccggcttaccagtgtggcgcactacttcccggcgctggaccctaggctgctgtcggtcctgctggacagcggtcaggacgctccctgcatcatctggaacgctccgccgcgtcaggccccaacgttgttcggcggttttcagaccctcattcaggccattatttgcaaacggcgcatccatttcctgcatcacgggagtcagcagtcctctgttgctccctaccggcttatctgcctggaaggcgagtggtatctggtggcagtatcgaaagaacgtattcaggtatttacgctttccgctattaccgatgtggtgatgaccatcgggggcttcaccagaagaagtcatatccggcggatttttgaagacccacgatttattcaggccctgccgcattttcagtacatcagtgggctcatccgggaatga

SEQ ID NO: 102640 - DNA, 1113 bp, Enterobacter aerogenes
atgctgattatggaacgttttttccttgttttttctgctaaaaaacagtgctttttatacgataaatctttattgatacctgattttaagttaccgtggaaggagacgcgagagagggagttggacatgaatgatgagcgtgtaaaaatgatgagaattaaatctgcgcaggcactgacaggagatgccacggagctgataaaggaatatctttcaaccgtaccattgcacatactcaggcgcgcattaatctctctcaacctgacggtagctaactccctttttcctcagatagccaacaatgctccgaaaataataaattttatctgttctggtgtcgcttatgataagaataaatattcttttgataaaatagtaaaacttattaaggatgcaggggatgacgctttctcagacggctgcattacatggcttaaaaatgataacgaggcatgccattatttctggtgggctctgatacatctcgaatggaaggatgtctttaagctacttagagcggataacatccaccgctacagtgatgtagaggatcagcgtcgggcggtattggtttctgatacttttgaaatcaacaggctgacagccgggcataaagaacgttataaatcaattttgacgatattaaattcattaccgtttgcaaacactgaacttaatattctgacgtcctatttgtcccgtgactataaggagaggaaagaaatatgcagaagtgaggtcaacatgacctctttgataaaaagtaaagagtcagtttctttttcaatccgctatttacagaaaaagaatatgttctcagctgatttagtacccctaactgagatcgataacaaatatgctttaaccacacagctttaccttttgagtagagaagacaagtttgaaacactggtcacctcactgactaaagcctggtcacaaaagaaaatgcgtgaaaaaagaaaagagacggataaaaaacagactgccgtactttccggcctgagcaaagaaagtatcagaatgctcaaggaattatcaaaaaaacacagtatggaccactcagaactgatggaactggctgtacaatatttgttcgaacaaatacgctag

SEQ ID NO: 102641 - DNA, 570 bp, Enterobacter aerogenes
atgaactacacctctaaccctttctggcaacagcgtattaccgacatcttcctgaacgcccttaaggtttatccacgaattttaatgctgagggttgatctgcggatacctgatattccggctgcgacagatgcggcagtaatatctcgctttaccgactcactgaaatcaaagatttatgcctaccagaaacgtaaacaaaaggaagggaaacgcgtacatgccaccacgctgcgttatatatgggccagggaatatggcccaaagaacggtaaaaaacactatcacatggtcttattgctgaatcgcgagacgtggtgctctgccggaaattacaacgacccgggctctctcgccgggcttattaaacaggcatggtgtagcgctttgcgggtagatacgcaggaatatgcaacgctggcccattttcctgaaaacccggcgctgtggattgaccgtgataacaacacccagatccaacaggggctggagcgggcctcttatcttgccaaagactataccaaaatcatcggtgacggggagcgtaacttcggctgtagccagggctga

SEQ ID NO: 102642 - DNA, 447 bp, Enterobacter aerogenes
atgaattttaagaccattaccagtgaggaacagaacgccggaattcgtatgctgaaatgctacctcgccagtgaccaccgtgggcattttgtgacaaccagtgaagcggcgaacatgccgggacgggtatggagctgcgtatcctgtggctgtcgactcatattccataccggcatgcacgctgattcaccctggttcgaacatgaccagaagacagtagctaccagtacgctgatgagctgtgcgcatattgacccggcagtgaaagcggaggaacgcagcagaatattacgcagtctttccaacaccctggattccccggtaatgtcgctggcttggtactgcgtctggtgcgctaaccattacagaggggaaaaacgctgcactacctgcgggaccggtatttacagcattgaggaagccagctggcagaataattacacctga

SEQ ID NO: 102643 - DNA, 978 bp, Enterobacter aerogenes
atgactactctcgttttttcctattcccatgcggatgaagcacaacgcaatgagctagagaaacatctttcctcgctgaagcgaacggggaaaatcaccacatggcacgatcgaaggatcgttccagggcaagaatttgaacatcagatcgaccactatttttcgcaggcagatattatcctattgctaattagcagtgatttcatcgcttctgattactgttatcaggttgagatggccaacgcactggagcggcataaaaagggcgaggcggtggtcattccggtgatattaagagagtgcgcctggcatcagttgccatttggcagcattatggcggctacaatcgacggtaaagctataagcaagtttaccagccacgatgaggggtatgttcaggtcgtcgacgctgtctcccgggccattgccaatttggaaacgaaaaagccgcagcagattgtgcacgccccagctccggctaacccaatgtttcaggcaacagatacagtttttacgccgcgttccagcaatttatctctaccaaagagttttactgacctcgataaagatcgcgcccgtcgcgagggttttgagtatgtagctcgttattttgcaaactcgttggacgaactcaaaaagcgccatgcagggctagacgtcgatttccatcggcctgataccgattcctttacatgtgctgtgtatgtcaacggtagcaaggttggtcagtgtgggatctggcgtagcaatcaacatcatgggatgggagatatctgttatagccaggatagtgttgttcgaaatagctataacgaatgcctgaatctctctgataacggtcaaacacttggttttcgtgctctgatggggggatatagccgtagcaattcacgagaacagttactaacgaatgaagggatgtcggaacacctctgggaaatgttctttgaagtagtcaaacaacgtatgtcccgatga

SEQ ID NO: 102644 - DNA, 1707 bp, Enterobacter aerogenes
atggacaacgctgaacagcaatttctaaacgatctggatactaagttctggaaagcagcagataagctacgcgccaatatggacgcggccaactacaagcatgtggttctggggcttatctttctgaagtatgtttcagatgcctttgatgcccgtcagaaggaactgagagggctgtttgaagacaaatccaatccggacaacatttacgcgctttctcgtgatgattacgatacggaagaggcgtaccaggaggcgatcgcagaagagctggaagtaaaggattactacactgaaaaaaacgtcttctgggtaccaaaactggctcgctgggaaacgctcaaaaccaacgcagctctgcctgtagggacggttctggggaaagacgatagcggcaaagatattgtcataacgtcagtatcgaagctgattgacatcgctctggatactatcgaaaacagcaacccgaaactgaaaaacatccttaaccgtatcgggcactatcagcttggcaatgacctgctaatcagcctgattaacgttttctccgataccagttttagcgagcctaaatacaatggcgtgaagctcaatctgaagagcaaagatattctcggtcacgtttacgaatatttcctcggtcagttcgcactggcggaaggcaaacagggcggtcagtactacacgccgaaaagcatcgtcacgctgattgttgaaatgcttcagccctataatggccgtgtttatgatccagcgatgggttccggtggtttcttcgtttccagcgatcgctttattgaagcgcatgctgatgaaaagcattacaacgccgtcgagcaaaagcgcaatatctccgtttacgggcaggaatccaaccctaccacctggcgtctggctgcgatgaacatggtgattcgcggcatcgattttaactttggaaaacaaaatgccgatacgtttctgaatgatcagcacccggatctgcgtgccgattttgttatggctaacccaccgttcaatatgaaagagtggtggaatgcgaagctggaagatgacgtccgctggcagtacggcacaccaccgcagggcaacgccaactttgcctggatgcagcatatgatccatcacctggccccgaaaggttcaatggcgctactgctggcgaacggttcgatgagttccaataccaacagcgaaggtgaaattcgtcgggcgattattgaggcggatctggtggaatgtatggtagcgctgccgggtcaactgttcaccaacacccaaatcccggcctgtatatggctgctgaccaaagataaatccggtggtaacggcaaagcgcaccgtaaaggggaagtgttgtttatcgacgctcgccagattggctttatgaaagatcgcgtactgcgcgacttttcgtcggatgatatcaggaagattgccgatactttccatgcctggcagacggataaaggttatgaaaatgaagcaggcttctgctttgcagccacactggatgatataaagaaaaatgattttgttctgacgccagggcgctatgttggtgctgccgagcaggaagaagatgatgagccgtttgcggagaaaatggcgcgattgactgagcagcttaaagaccagttggaagagaatgcgaagctggaagcgcagattaaggcgaatctgggggggcttggatatgagttttga

SEQ ID NO: 102645 - DNA, 906 bp, Enterobacter aerogenes
gtgaagcaggcggacgggtcgtggacggtgacgctgaccactgaggcggtatccagcacggtgattcagtcggtggtggcggacccgaccagcattgaaaacgacgggaagagccagtcgactatcacggcaacggtggtggacagtgtgacgcagcagccagtcagcggagtgacagtgaactggacaagttcgctgggaagcctcagtgtggggtcatcagtgacggcagcggacggcatggcgacaacggtactgacggccaccggcaataccggcacggccactgtgacggccagcatcagtagtgacaatggtaccgcggatgtggcgatttcggattccactccagtggccagactctgttgtctgcagaatgggcaaattaacgcaacacattcaaatctctacagtcttgtcggtatatatggctctccggggcaggtagttgttgctttagtttcaggaagagctttatttaaaaactcgtcatccaatgaactggtcgttacgcttgatgggagtgggtttgccaaagttgaagtcacagatacacaggctgaaacagtagaaattacgctgctggacaatacgatgaaggatatcctggcttcagggaccatgaattttatggatcatatgacccctggatacaacaatctttattgtacatctggtgcgctggccgacgggaaaatgccaaatctggtatataatgatgtcaatagtgaaacttcactggttagtgtgaacggttccgcctatttttctggtggcacaaatatcacatcgattaaaatgtttgatttggcagagttttatgacaagacggcacaaaccgttacagcaacaacaagtgattatcggtttagcaatactgcaacgttcatcgccgtaacttactga

SEQ ID NO: 102646 - DNA, 168 bp, Enterobacter aerogenes
atgaacaacaataacacgttgtacgtcggattagatgttcacaaagaatcgattactgtcgcttatgctatcaattcagaacctgtcgaactgatggggaaaattggtgcaaccccgctgacattcagcgtctttgcaagtgtctgggtcaaagtcatcgcaggttag

SEQ ID NO: 102647 - DNA, 723 bp, Enterobacter aerogenes
atgatgttaaataaattaaattccggacttagctctcagtcctctcatcagaattatctgaaaaaagtgctatccatcaggaaagatggctgtcttatgctgcctgacatcgtccgcccgatagaggctattcatcgccttcatgatattctgctgccacaggctaaaatttgtgaacaacttccgcgacgttttcgccatgagcaactggagaaggcaaatgctgtctggctggtatccagcggatatgtcacaattttccggatgtctgatgacatgaaaatcacctcatctgcaggtcccgcgctcattggactgcaacaattatttgccccttttgaccgccatgtttttcaattttcgcctgcagccagggtgtcttatattcctgtcaaccacgcccgaagtctggttgatgcacacaacagctggcgcgatgtggctgaaatactggattattacgcccggatgatgacttatcgggacgaacatatggtcagccggaaatcttatgatactatccgcgctaagttactggaatatatggctaaccgtgagctacacattcaaaaccggacaggcattgtaggttatatccaacaaaccacgaccttttcccgtagccttatctacaatattctctcggaactggtaaaaggtggttatatcagcatgtcagaggggtcactggaggcaattcaccgtcttccggacagattctga

SEQ ID NO: 102648 - DNA, 555 bp, Enterobacter aerogenes
atggatcagcgtaaataccttacccgttatgaaattgaaaaaattgtcaccgcagccggcatcgggctgaacggggcccgggacgcatgtctgttccggctctgttttgttcatggtctgcgtgtcagcgagttgcgccgtctgacgctggttgacctggatatgcaccagaaagtgatttatatccggcgcctgaaaaacggattatcaaccattcacccgttaactgatgaggagtatagcacgttgcagaactggctccaggttcgcctgtcacatcgcgcagcagacgaaccctggctgtttttgtcccggaagggaggaccgctgagtcggcagcggatttattcgctgctccgggcatgtggcgaaaaggccgggctggacattaacccacacccacatatgctacgccacgcctgtggttatgcactggctgacctcggggtggatacccgtctgattcaggattatctggggcataaaaacattcgtcatacggtgatttacaccgccagtaacgcccgccggtttttcggcgtgtggcaaaagtag

SEQ ID NO: 102649 - DNA, 402 bp, Enterobacter aerogenes
atggatggagaacagaatattcgtttatatggcgaattgagagagggaccggttgctggcgaacgcgctgattgtttcgatcctctctttgcacaacgtgtgatggatgaggtggagtgtgccggccggctgaatgcccgggaagtggcttcccgggtacagacctcgtgccctctggccctccggatgttacagcatctggaactggccggactggttagccaactgaacggctactggtcgttatgcccggaggtgtttctgttcattgatatgcccgtttcccggtcgcggcgggcgcgccggcgagagggggctgcatccggaaatgatgttgctgttgttgagttgtgtggtgatgttcaggggctgattatccgtcgacagcgggcgcacgaatga

SEQ ID NO: 102650 - DNA, 657 bp, Enterobacter aerogenes
atgaatgtgcttattcaggatgacgatggtttttttcgtgacggattatgcgtcctgctgtcccgggaattcggtcccacagtatcgttcactgccagctttagccctgcgacggtacttcaggcggacttgattatttttaaaatatttccggggcgtctggcatcctgtcatccggccctgatgtcccggcgacgagtaccgatgattggcgtactggatacacctcaacgcgtttcccggcagatgttgtccacctgtataaaagatatggtgtttattcatcgtcaggaaagtatcgcttcgatcagaagcaaagtggtaggggggcgagacacaagaatatccggagcgttaccggcgcatgataaggtcagctcgtgtctgcgctgtccgcgacgtttactgacccgactgcagcatcaggtattgcaggggttaatgcaaggaaaacgcgtacgggaagtggctgtcgaactcgggttatcccgtgaaacagtctacacacataaatacagcctgatgcgtaaatacggactggagaataaccgtgaactggcgttattcgcattttatcgggatgcctggttgaatgatgacggaggctgttgtccggaaacagcaaaggtgaacctgatgatggataaaggagcgtag

SEQ ID NO: 102651 - DNA, 564 bp, Enterobacter aerogenes
atggggttttcaatgaaaaaaacgattttagcggctgttgtggcaggcgcctctctgatggcaggtggtgtacaggcggcttcgtccagtgccaccgttaacggggggaccatctattttaccggcacggtcgtgaatgcggcctgctccctgacgacggggatccatggcgacggtcagaccgtggcgctggatcaggttcgtaccgcgaaactggccaagaaaggggatcatgtcgggaaaaaggatttccagatcctgctgaccgactgtgattcaagcatcagccagaacgtggccgtgagctttaacgcgacagctgatggcagcgtcgcgggggcgatggcgaacaccgcgggttccggctctgcgggcaatgtcgcgctgcaactctatggtccggatggtaatgccctgccgctggggaccacctcatccacggttccggttgtggacggcaataccacgatcccgtttgcggtggattatgtcgccacggctgacgatctggtgacaccgggtaatgttgccgccacggcgacatttaacattgtttattcctga

SEQ ID NO: 102652 - DNA, 558 bp, Enterobacter aerogenes
atgaagaaaacgattttagcagtattactggccggctctgcgctggctgccggaagcgcacaggcggcgtcatccagcgccactgtgaatggcgggaccatctattttaccggcacggtggtggatgccgcctgctcggtgaccaccggtattcacggtgacgggcagaccgtggcactggatcaggtccgtacggcccggttctccggaccaaaaagctacgccgggcagaaaaaggatttccagatcctgctgaccgattgtgacacgagcgtcagtaaaaatgtggccgtcagttttgaggccacggcggatgcctcgggtacggtgacaggcgccatggcgaacaccgcaggctccggctctgccggtaacgttgcgctgcaactctacggtccggatggcaacacgctggcactgggtgacacctcttctccggtcgcgattgtggatggcaataccaccattccgtttgcggtggattatgtggccaccggcattaccgtcactccggggaacgtggcggccacagccaccttcaacgtggtgtattcctga

SEQ ID NO: 102653 - DNA, 549 bp, Enterobacter aerogenes
atgaaaaaaacgattttagcagtatttatggcaggctctgcgctggttgccggtggcgcccaggccgcatcatccagcgcgaccgtgaatggcgggaccatctattttaccggtacggtggtggatgccgcctgctcggtgaccaccggtattcacggtgacggacaaaccgtggcgcttgaccaggtgcgtacggcaaggctgcagaccgcgggtcagtatgccgggcagaaaaaggatttccagatcctgctgaccgactgtgataccagcgtcagccagaatgtggccgtgacgtttaacgcgacagaagacgttggccagccgggtgccatggcgaacacggccggctccggttcggcgggtaatgtggcgctgcagttatatggtccggatggtaaaacgctggccattggcgccacgtcttccacgattcctattgttgacggtaataccacgatcccgtttgcggtggattatgtggccacgggcgcatccaccccgggtaacgtttccgccaccgcgacgtttaacgtcgtttattcctga

SEQ ID NO: 102654 - DNA, 561 bp, Enterobacter aerogenes
atgaacatagtcaggtatagcagccgtaaggccgccggggggcttctttttttcctgctttccgcaggcgcattcgccggtaatcaccatgcggccaccctttttggcggcaacatgcggtttctgggagaggtggtgaatgccgcctgttccgtgagtgctgacagtcgggaacaggtggtgcagctgggccaggttcgcagtaaccagttctctttcctgggggaatggggcggtgcgacaccttttcagatccggctggaggattgttccacgaatgtcagccagagtgtgggggtgttattcagcggaacatctgacgggaaggatcctctggtctttcaggcggggtacggtgcgggggcggcacatggcattggcatcgggatatttgatgcgaatggcaatttactcccacccaacacgtcaccgccctggtttgcgcccttacaggacggcgaaaccgtgctgcattattcagcacgatacagagcaaccagcatgcctgtggtgagtggtaatggtgacgggcaggtgtggttcacattgatgtatcagtaa

SEQ ID NO: 102655 - DNA, 720 bp, Enterobacter aerogenes
atgaaatcagtcaaagcagttgccgggatgatgtgtgaacagtggcgtcgcgggtttttactggcggcagggagtgtgatgttatccatgagtgcgggcgcgcaggctgatggtattgcgttaggcgccacccgcgttatctatcctcagggagataagcaggtctcgctgccgataaccaactcatctaaatcggataccttcctgatccagtcctgggtgtcaggcgtggatggcaataaatccgcggattttattctgacgccgccattatttgtgatccacccggggaaagaaaacgtcctgcgtattatgtatgccgggccggatctgccgtccgatcgcgagagtgtcttttatctgaacagcaaagccattccgtcggtggataaatctaaaatccagggcagctccctgcagattgccacgcagagcgtgattaagttattcgtacgtccgaaaaaattaccgacgccgtcgctggatgcgccgaaaaccctccgctgctccgtggccggcggaaaggtcaccatcaacaacccgtcgccttactacgtctccctggtgcagttctatgtcggtggccggaaattaccgaattccatggtgccgccaaaaggcagcctgacacaaagcgtgccggcggacggacaggggaaagtcacgttccagacggttaatgattttggtgccaatacgccgactcagaattgccagtaa

SEQ ID NO: 102656 - DNA, 2661 bp, Enterobacter aerogenes
atgagcgaagtcaaaacattaccttatcgtggtgatatgcccaaatggcgattatctccattagtggttttcattctgtgtgcatggcctttacgtgagggatgggcggacaattattttaaccctgcgtttttatccggcgattcgtctgctgttgcggatctttcccgctttgaaggcaatggccaggcgccgggaacgtatcgtgtggatgtgtttctgaacgataactttatcgacagccgggatgtggtctttaaatcgtcaaaagagaccgccagcccggctacggccacccgtcagacgaaagatgacagcgggttaacggcctgcttatcccccagaacgctggatgcaatgggggtgaatattcaggcgtttcctgccctgaaaaagaaagaatcgcttgaccagtgtctggacgtgtcggctgccattccgatggcgacggcggattttgattttgaaaaccagcgcctgagtctcagcattccgcaggcggcgttgaaaaacaacgcccgggggtatattccgcccgagttatgggatgaaggtattaatgccctgttactgagctataacttcaccggctcgaacagcagtgacagcagcgccggcggcacggcggataacagttattttcttggcctcaatggcgggctgaatatcggcccctggcgactgagggaccagtctaactggaactacagcagcggcagtgattcacagggggggaagtggcagcacatcagcacctatgcggagcgcacgatcacaccgctggaaagtgaactgattatcggtgacagctacacaccgtctgatgtctttgacagtctgagctttcgtggcatacagctgtcatcagatgacaatatgctgcctgacagtatgaaggggtttgcgccgacggtccgcgggatcgcgaagagcaatgcgcaggtcacaattaagcagaatggctataccatttaccagagctatgtgccgcccggcgcctttgagattaacgatcttttccccacgtcctccagcggcgacctgattgtggaagtcaaagaaaccgatggcagcatcaaccggtataccgtgccttattctgccgtgccggtcctgcagcgtgaggggcgcatgaaatatgcgatcacggcggcaaactacagaagcagtaacgatcagcaggacgatgacagctttggccagatgacgctgatcagcggcctgccacacggcttcacgctctatggcggtacccagttctcggataagtacctttccggcgccctgggggccggggtgaacatggggaattacggggccctgtccatggatgtgacccaggccagcagcacgctggccgacgggagtgaacaccagggacagtcagtgcgctttttgtatgccaagtcgttgaacgatgtcggcacgaactttcagttactggggtaccgctattccacctccgggttttataccctggatgaaaccacctataagcatatggatggccatacttccgatctggcgcatgacacggatgatgataacaatccgccttactgggtggattactacaacctgtattattccaaacgcggcaaaattcaggtcaatatttcacagcagcttggccagtacggctcgctgtttctgacggggaaccagcaaagctactggcacactgataaaacggatacctccatgcaggtgggttacaacggcagtatgggcggggtgtcttacagcctgacctacagctataacaaagcggccggccagccggaaagcgatcagatttatgcctttaatatctcattacctctcgggcagtggatgcaccccggcggcgtcagcgatatgacgcagaacgtcaacacggcctttgcgacctacagcgcgagcacggatacgcacggcaacatgacgcagaatgccggcgtgagcggtacgttactggatgacagcaacctgagctacaacgttcagcagggttaccagaatcacgatggcggcggggccagtggcgacgtgagcctgcagtataacggggcttatggcaacagtaatgtcgggtacaactacagcaacaacggcgactatcagcagataaactatggcctgagtggcggtattgtggcgcatcgtaacggtatcacactgagtcagcctctgggcgatacgaacgtattgattgccgcgcccggggcggatgatgtcaaagtggacggtcagcccggcgtccggaccgactggcgcggctacgcggtggtgccgtatgcgaccacctatcgtcagaaccgcatggcgctcgataccaattccctgagcgataacgtggatattgatgacgccgtggtgaatgtggtgcccacacagggggcgctggtccgggccagcttcaaagcgcaggtgggcggccgggcgctgctgaccctgacgcataatggcaaatttattccgtttggcgccgttgtgtcccgtgacgataacggcagcgacacgattgtgggcgaggacggtgaggcctatctctccgggctggctccggccggcgtgctgaacgtggtgtggggaaccggggcggataaacaatgtcaggcccgctaccagttgcctgaaagtaagctaccgctgatccgacaaaaaatggagtgtcactaa

SEQ ID NO: 102657 - DNA, 1020 bp, Enterobacter aerogenes
atgcttaaattcgttctggccattgttgtcgggtgtctgagtctgtcggcgtgggccggcagttgtgaaccggcatcgacgcaggcttacacttttggattcaccaaacaaattaccgaccccaccaagaacgtggccggttacacaatgaatggggtttataactgggatagcggaaccggatttacggcaacgtgctcctgcaatacggatacttaccatggggtctattataccacgcagacctctttgccgctgggtcataatgatggtacggcgcagtggtataaggtgggggattatcttgaagtctcttccgaggtgtggattgcggggggcttacaggcctacgtacctacccccattaccgcgttgtggaaccaggatacgacaagtgtcagccactgcaatactgcaattggtggttttaaagcgggcgcaaaagggcatctgaatgtctatatcgccaggccgtttgtgggtaatgcgtattttaataatgtgttgctgtttgcactgtacgggacaaccgctgcgacggaccctctgggggggaaagcgatgtcatccgtatatataaatggcacgatcaccgtgccacagacctgtgaaattgacgccgggcaggtgatttccgtggatttcgggaccatttacagcggtgattttaatgccgttggccagaaaccaaagggcattccggtgaaaaccttcaatgtgccggtcaagtgcaccaatatggatgccccggccaacctgacgctccgtcttcaggccaacacggccccgggatatacacaggcggtggcctcggataatgtggatgtgggggtggtggtgaccgacagtcagggcaccattcttaacccggatgatacatcgagtttgattccgtttgtgacggatgcttccggcaatgcgaatgtcactctcagggcttacccggtgagtgtcaccggcaacactcctgctgagggggtctttactgcgcttgcctatctgagggtggatttcgcatga

SEQ ID NO: 102658 - DNA, 582 bp, Enterobacter aerogenes
atgaaaaagcacatcatgacgttgtctgcggtttcccggaatccgtttgtgtcagggcttctggcgctgtcgtgtgtctgggggggcgtgccgtctgcgtttgccgacctcccggtggcgaacctgcggatgacggggaccatcatcgcccagacctgtgatattacggtggacagtctgaaccaggaagtgaggatggggcagttttccactgcggaatttcctgcctccggcagtactaccagggcaaaggtgtttaacatcgatttaaccgggtgcacgcaggggatagccgggacgcaggtctggttttccgggacgccagacagtgtggatccggcgctgctggcgttaagcaataccggaaaaggattgccgggagcgctggcgaccggcgtgggagtggaaattctggatgcgggacagaaccccattccgatcaataacaccagctctcaggtgtacccgctgcaaccggggaataaccgtctgtcgtttttcctgcgttataaatcaacatcggcgacggtggtggccggtaccgccacggcggtcatgtattttgatatgcaataccagtag

SEQ ID NO: 102659 - DNA, 543 bp, Enterobacter aerogenes
atgaaacgaatcaccgcagggtgtatcggactgacgctggcgctgctgaatctgcctgccggggcccgcgacagttcggtggatgagcatgaaggcacggtgtatgtcaccggcgtgattaacgataacacctgcattgtttcgccgggatacggggatttcgctgtgtcgatgggggcccagtccagtaagcagtttgataaagccggtgatggcggagccttcgtcgccttttccattcagcttgaaaaatgtggcgcggctgcccggggggtgacggtgtcatttgtgggcataccggatccgctggcgcctgatttgttaaaactgaacccgaccagtaccgctacgggcatgggggtggccatttacaatcaggataagagtttcattcccttaggccgacagagtatccagacaccgctggaggcggggcaggcgacggtcacgctgaacttttttgcccgttatctcggtaacggggcgcaggcggcttccggaacggcggatgccaccgccacgtttttactgacgtatgcgtga

SEQ ID NO: 102660 - DNA, 756 bp, Enterobacter aerogenes
atgtcctgtcgttttttgtcacggccggcgctgtgtgcggccctgtgtgcgggactggtgttgtggtccggccacggccgcgccggcgtggtgattggggggacgcgattcgtgttcaatgaacaccgtcagagtatcacgctgagcgtcagaaatgagtctgacacgccttacctgataatgacgaaaattcagcaggggggaacctggcccggggccggtacgcccccggggccccagtcgtcgctggtcgccacgccgccactgttttcgctgggaggcgggcgggagaataaaattcgtcttgtccgcagcgggggcgagttcccggcagaccgggaaagcctgttcacgctgaatatctctgctattccgtcaggcacggcagaaaacaacagcgttcagatggcggttcgttccaggctgaagttgttttttcgtccggcagggttaaaaggcgagcccgggaaatcgtacacccggcttcgctggtcgcggcaggccgggcagctcagtgtggaaaacccgactccgttttatgtgacgttgtttcaggtcagcatgaacggtcaggaggtggagaaccctggtatggtgccgccgttttcccggcgggatctggacgggtgccgtcaggcagcggcctgtcgggtgcagtggggcaccatcaatgattacgggcgggttttgccccggatagtcgtcaccctgtcggacgccttgccggacgccgacgccggccatcaggaaaaataa

SEQ ID NO: 102661 - DNA, 882 bp, Enterobacter aerogenes
atgctgctttcattattacctcaaaaattaccgtcttttcgccgccgggtgctgggtctggttatgccgttatgtctgaccgggggcgtctgcgtcaatgcctttgccgggccggcagagacgccgccggtgcagcaggatgaggtcggaaaaatggccgaagcgtatctgacggcgcacccggagaaactgggggaagcggtgggggcctatctggcagaacaccctgagtttctggtggcggcaggcgaaaaccttcgccagcgtcagcaattgtcccagcaacaggctctcgtgcagatggcccttcagcaccgggaagctctgctggatcaacggagtccgtcggtggggccggaaaatgcgaaagcgacagtggtgatgttttttgattaccagtgtgcgtattgcagcaaaatggcgccagtggtgagcaccctgattcaggaaaacccggatgtgcggtttgtctttaaggagtaccctgttctggccgcacgctggccggcatctgctctggccgcccgggtcggggaagctgtctggcaggcaaaaggggctgacatgtatctggcctaccataatgccctgtatgccaccggaaaaaccgaaggacaactgacgacgcaggatattcatgctgtggctgccacttatctgaaagatgacgtgttcagccagctggagaaaaatcaggataccggcccggcgaatgagcgtctgcaggccactcaggagctggctcagcagatggggctgaccggcacgccggtgtttgtggtcctgcctcagggaaatacggatgcacgacgtgtcacggttattccgggaagcacgacagaggagatgttgcagcagtccatcaataaggcacggggataa

SEQ ID NO: 102662 - DNA, 1746 bp, Enterobacter aerogenes
atgcagaaccgcctgcgccggcaaaagcctttttcgttaacggtcgccgggcctgcctgcgcctgggtactgatatgcgccggggtgtactggttatgtcttctgcctgttccgtggatctctaacgggggatggggaacggatctaccggctaattttgtgggggcggggctggtttgtgtgctgattgccggagtgtggctggtctcgtcttcctgggattttcgcatgtcccggccttttatagggctggccagcggtgcgatgctgatgagcctgccattgctgtggtcgcccgacgctgcattccggatgaatgcgtttccccgggtggctggtatgtggggcgcggtgtgcctgtacctgacgttgctgcgttgttcgttaccagggcgtcaacggctgttgctaacgggcatgctggctgcagccggggggatccagtcactctatgtggtggcagagttatttgtcccacgagcatggctgcctgagatggcgcggctgttgtccgataaatatggtcactacagtgccggtgtgttcgggcaggccaatgttacggccagctttctggcaatggcgctgggcgccatgttgtttctgctcggattacgcagtgctgtactgaggtcggtcgtttgggaacggcttcgcgtctgtcttctgactggtgggattgtgctgacctccgtggcgctggtgttattaaaatcgaggatcggctggctgagtggcgccgtgatcgttatcagtatgtcggtgttgtttcgtcttcaacggtttcgttttctggcacaccggacgcccctgctactgctgttgccggtatccggtgtgcttattgccgtctggttgctgaatttttcgttcacaacggcctggcaggcacatgatggctccaatcatcagcggttactgacgctgaagtacacgattcatatgctacagcagcatcccttactgggatatggggcggggacttatgaagcagtgtttcagaataccgtggcaggccttccgggggggaaccccggtcgtgagaccatgaactatccgcataacgaattgctgtatcagtatgccgaaggggggatactggccgtcaccggagcactggtgtggtgcggagcctggttgttattgtttttccgggcgaagcggctgcgggcaatggctggattattgtgtacactccccattctgctacatactcaggtggagtacccgctgtattattcggtggcgcatttttttgccttaatactgttatgcgtcatggcggaacccggttccccgcggtcacgccggagagggcccggcggaaagaggcgatgcgtcgccgtggccggacggctgctgatcccggtgctggcggtgtatgccggcatgcagtcctggcagtcgctgcaggccgggcgggtactggacaggtttgaggcttccactctggctgatcctgaaaccattgtgcagcttgatgtgccgtggatactgcagccccgctggcagcacgatatcagtctgctgcgcctgatccggttcagaaccacacccgataagtcgtcgctgcgtgctttcacgcaggaaaacgcacagtggctgtccgttcacgcggatgtggacgcgtatctgaatcaggttctggtgttacagtttctgggtgaaacgagcagtgcggaacgctggcgggaaaaagcgcttctgatgtttccgtgggagcgtcaccggtttggcagggactga

SEQ ID NO: 102663 - DNA, 186 bp, Enterobacter aerogenes
atgatttcaatctttatcatcagtaaaaaatataattatctttccgggagcgccttctgtgtattcatccgttgccccggcgtgaccaaattaaaaatgggcaggtacacgtttatgattttcgtccgggaaaacggtaacttcttatatcacgcagataagaaacaaacgaccatatcgaaatga

SEQ ID NO: 102664 - DNA, 1200 bp, Enterobacter aerogenes
atgaacacccagtatcccgtcggacagaatgtttttttcgatggcagcgatggtaacgacaacgtgtgcgcagtcacacataccgacctttcaggtcatttagtaggtctgtacaccgcaacccgcacaggctcgtaccagtccgtatatggcaaagtgatcaccgcagccggtgcccagcctcaaccctttcttatccctgatatcaccgattacaatcagaaagacgccgatattacaccggtaaccggcactgacgatttcgtggctgtgtatgcctcttcttcttccggctattaccggacctgtattcgtcgtttccgggtgaatgcgaatggtacggtgacaccactgtcaggtggtgtgcagttttgccagagtaacggcgattatgtggccccgcgggtggtgtacctcgaagcactggatctgttttttgtcctgtggatttcaacctgggatcagcagattcagtgcaaatttatgtcttatgatgcaggtacgcagacatttgtcgaccagacatatcaggggtatctcaatgataccatcaacagcagctactataatggtaaccttgatattcagaacagtaccaccctcagccttgtactggccaaagccggcaatcatgttatcgtcggactgaaccgggcgacaaacgaggtgggactgtatgagtgttccgtgtcactggccaacagaacggtaaacattgcaaatctccccgtttattcggcaactaatattgctaaatttgatatgctgtatgacaatgccagttatatcaagattgtatttaataccggaacttatagcccagtattcggtgataatatcacctattttggcagaagcaactcggttggctcgccggttcagttaaaccagactgccattcccggtatgcgccctgtgatccgttccaccccgacaccaccaccggcaagcgatgatatcaccagcacctattttgtcgcctgggaaaccagttcttctggtaccgtttacaataaatttgatacctcgttcatcgcactggcggctgaaaccgatgtgaattccggtgatgataccagcgataacccgagattgaccgttactgataaccagatggcgatgctttttaatgcatccaaaaataacagcgtcatgctgggtggtaatcgtggcattctgattaatgttgctgatatataa

SEQ ID NO: 102665 - DNA, 885 bp, Enterobacter aerogenes
atgatgaatgtgttgtggcattttaaagtcttcgtgttagccgtcacacttttatatcatatttccgcactggcaattccgtcttataatctggtatttcgtacggatgacagagatattgcggaaattatttctgccggagggatgttcccctggagtgatggtacaccggataacgatttatctcatcattttgaaggtgaatccattgaagggcatgtaagcgtttttgtgtcgactacatcaacaatcagttccgcggtagatcacgcggcatcactggcccgccctaacagtgaagaaccctttgacagtgagttcagaacctttatttatgttatcagacccgccgataatttctatgatgtcgaagagtcttttcgggatgcaataaacacatcgcaggataatcctgaacggtattccagattaagcagtctgctggccacttatggtggcatggaggaggttgtggcattgaatggctttaacgccgaccgcatcctgcagtatgcagaaatcacaggtgtcatgctgaatgaatcttatgcttcaggtgcaatgtattcaccattttactgggacggacgatggagcagtacaggtacaatatataatactgcttacgacaatgatggaagcaatactctaccgtataccatcatcgataccccccggggttatactgatgtcgtcaggaacggctctcaggaagaggttccactggcttttacctgtgcggcgattaaaccgtcatcttcttttcgaacatacagtacatcatcctgttcagaacatgactacatgaacctgtcccgggatttttataatacaggagtaaaggcagcattaattaaactgagtcttaatcgatcgtcgttttaa

SEQ ID NO: 102666 - DNA, 330 bp, Enterobacter aerogenes
atgcataaatataaacaaatggcattaatactgttatcagcatgtactctttgcatgccttccatcagttccgctgtgttgagttccgggatcacggtgaaagacttatgggtcgggacaagctacaatggcatcgtgtactatcgttttaatggtacgctcgctggcgcatgtggtactgctgaagcggaaaatacctactgggccagaacgtcttatattgccattgcaaacagcctgcaaattgcgtatatgatgaatctgaaagttgatgttgatatcaacgaaaccgattgttttatcaaaagtgtacagctgaaagccctgtaa

SEQ ID NO: 102667 - DNA, 192 bp, Enterobacter aerogenes
atgtcagtgtttatcctggcgctgtgggtggtcacggagacgtcagaacagatgagtgaacgcgcggaactgacgaacagaaatggtatgagtccacggatcacgccatcgatgctcacagccattgcttccgtacagacatcccgcagacgtgactggtgcctgcatagcgatcgccacgtgataacataa

SEQ ID NO: 102668 - DNA, 363 bp, Enterobacter aerogenes; identical to SEQ ID NO: 80769

SEQ ID NO: 102669 - DNA, 432 bp, Enterobacter aerogenes; identical to SEQ ID NO: 28367

SEQ ID NO: 102670 - DNA, 561 bp, Enterobacter aerogenes
atgccgaaactgagcgttgaccagttcagccaacgctgtcgagtacgtttcgtcgcgggtatgccaggcttgcagccaagcgagcttcgcgtaggtcgtgccggggcaggactcggccatcttggtcaggcccaggttgatcgcgtcggccaggatcgtggtcaacaacaggttcttgtccttggccagatcgcccgatttcaagtgcgtgaagtgccgggtgaagcccgtccactcatcgacttcgagcagcagttcggtgatcttgacgtgcggcaggaccatggctgtctggtctatcagcgcctgcgcggtgtcgggcaccgccgcatccagcggcgtgatcttcaagcccgactcggtgatgatggcatccggcaggtcgttggctgccgccatgcggttgacggtggcaagttgtgcttccagcagcgtcagccgctcatgcagatattgttcgcagtcggtggccacggccagcggcaattcgctggactgcttgaggctggtgaacttctcgggcggtaccaggtagtcctcgaagtccttgaactggcgtga

SEQ ID NO: 102671 - DNA, 246 bp, Enterobacter aerogenes
atgggcgcggacgtgcttgatgttgagcgtgccgccgatcatcggcttgagcgcgtcataggcggcatcgcccttcgggatgtagagcttggtgtcgcccaggtcgcggatgcgcggcgcgaagcggaagcccaagaggtgcatcagggcgaagacgtgatcggtgaagcccgccgtgtcggtgtagtgctcctcgatccgcaggtcggattcgtggtacagcaggccgtcgagcacgtaggttga

SEQ ID NO: 102672 - DNA, 216 bp, Enterobacter aerogenes; identical to SEQ ID NO: 52322

SEQ ID NO: 102673 - DNA, 282 bp, Enterobacter aerogenes
atgacccgtgaggaagccagtctgttcttccggttgctgaaccgtagatatgagaaagcgagcatcgtgctgacgtcaaataaagggttcgccgactggggagagatgttcggcgataacgtgctggcaacggcaatcctggatcgtctgctacaccactcaaccacactgaacatcaaaggagaaagctaccggttaaaggaaaaacgcaaagcaggagtgctggcaaaaaacgccacgccaatcagcgatgatgaaatggcggaaagcggacaacattaa

SEQ ID NO: 102674 - DNA, 465 bp, Enterobacter aerogenes
atgagtttacgccaggcctgcaggacgttatcgctgagcagggcggtctatttttatcagcccgatacccggcgtgatgaaccggtgatccatgcgctgactcaactggcagaacactatccgcgctacggttttaagaagctgttccagctgctgcgcaggcagggcaatacctggaaccacaaacgcgttcatcggatttactgcctgctgaaactgaattttcgtcgtaagggaaaacagcgactgccagtgcgtaatccagcgccactggcgacgccgcaagcgttaaaccagagctggtccatcgattttatgcacgacgccctggtctgcggcagacgattccggaccttcaatgtggtggatgattttaaccgtgaagcactggcgatagaaatcgacctgaatatcctggctcagcaagtcatccgggtgctggacaggatcgtggcaaaccgctga

SEQ ID NO: 102675 - DNA, 1530 bp, Enterobacter aerogenes
atggcaagactgagaacgcggatgagtaaaattaaagaactgctgcgcctgaaatttgactgtcacctgcccaacaggagcatctcggcctgtctgaatatcgggtgcagcaccgtctctgatgtggtcacccgcttcaggggaagccagctggcgtggcccctgccggaagagatgacggaatcacagctcgaagcgttgctctataccgggcgagccagcgacagccataaacggatgccggacttcccgctgtgccatcaggaactgaagcgtaaagggatgaccaaaatcctgctctggcaggaatatcaacaggatgccggcgaaaacgcctacggctacagccagttctgcaacctctacaacgactggctgaagctacaaaaacgcagtatgcgccagcatcatgtcgccggagagaagctgttcctcgacttctgcgggccaaccatccccgtcatcaacccggatacgggtgaagtgagacaggcgcagatcttcgtcgccacactgggtgcctcaaactacacctacgtcgaagcctgcgaaaaccagcgccaggaaagctggctgatggcgcatgtcagggcgttcgagttcttcggcggtgtgcctcagcttctggtcccggataacctgaaagcggccgtcagccgcgcagaccgctatgaaccaatcctgaacgagaactaccgtaagctggcccgccactacaacacagcggtgatcccggcccggccacgcaaacccaaagacaagcccaaagctgaaaacgctgtcctggtcgtggagcgctggatcctgatgcggttacggcatgaagtgttccatacgctggccgcgctgaatctggccatcagtgagctgctgcaggagctgaatgagcggccgttccgtcggttaccgggttgccggaaaagcctgtatgaacaactggataaacccgcactgaaagctcttccgccataccggtatgaatacgttgatatccgccgggcaaaggtcggcccggactatcacgtgctgtatggcaaacatgcgtactccgtccctcacgcgctggttggcagccatatcgatatcgaggcaggcgcccggcttgttcgcctctatcacagggggatgctggtcgcccagcacccacgggcgcagcaacagggcggcttcaccacgcaggcagaacatatgccggaatcccatcgccgacagcgatggagcccggacaggctgctgtcctggggagaaagcatcggcagtgccacccgtgccgtggtggcctggcatctgcaccaccgggcacatccggaacaggcttaccggacctgcctggggctgctcaatctcagccgggaatatggcgatgcccggctggagaatgcctgccagcaggcgctgttactggagcgaccatggcggcaggttatcctgaatctgctgacgaaccaccgggaccggctgaaagacgaagcgccggatgaatcccctgtagagcacagcaacgtacgcggtgccgggtactaccactga

SEQ ID NO: 102676 - DNA, 744 bp, Enterobacter aerogenes
atgcacaacaacctgctggaacagatacgcgccctgcggctggggcatatgagtaacgcgctggagctgcaatggtcacagcccatgacctacacctcactgagcttcgaggagcgtctggggcttctgctggagcacgaactgctacagcgtgaggtctcgaaggtcaatcgcctgcgaaggcagtcaaaactgagactggatgcgcagccttcacagcttgactaccggccggaacggggactgaaccggcagttactggttcagttgctgaccggtgcttatgttcaccgtcatgaaaatgtgctgatcaccgggccaacgggatgtggcaaaacgtatgttgcctgtgctctgggagagcaggcctgtcagcagcatatccaggtggtgtactaccggctgacgcgattgcttgatgatctgaatatcgggcatgccgacgggagttaccagaaacagctactgcagctgtcgaaaaaggatctgctgatccttgacgactgggggcttgaaaagctgaacacccggcagtcctcagacctgctggaggtgatggaagacagataccagcggggaagcaccatcatcatcagccagctaccggtgagtgaatggtacaaactggtgggtaacccgacggttgccgatgcgctgatggaccggcttctgcataacgggcaccgcgttgagctcagaggtgaatcaatgcgtaaactggcacaaaccgatcagacgagttaa

SEQ ID NO: 102677 - DNA, 426 bp, Enterobacter aerogenes
atgaaaatcagtgacagcggccttgcatttatacgtaaccatgaaggggagaaacttacggcatatcaggacggaggtggtgtctggaccattggcgttggtcatacccgtggtgttaaggccggacaaaaaatcacaccggcgcaggcaggagcgtttctggtggaagatctggaaccggtagaacgctgtatcaacagccacgtttcggtcagattgaatcagaatcagtatgatgcacttgcgtcatttatttttaacgttggcgaaaatgcttttacaggctccacgttgctgaaaaaactgaacggtggcgattacagtacggcggctgaccagtttacccgttgggcctacgataaccgcgtgtttgttcaggggctttacaatcgtcgatgtgatgaaaagcaattatttttgtcttga

SEQ ID NO: 102678 - DNA, 540 bp, Enterobacter aerogenes
atgtttcagacgattaatgtcagccggaaaacgaccttattgcttcttgtgtgtgcagcaatgatctgtcagttcattttgctggtcaacacccgtgcagatttaagaagggctgaaactgacgcagcggtgctccgcagcgataatgccctgcaagaacaggttatttcctcgcaggctttcaatttcggtcgattcaatctggctgctgctgaaactgaacggctgaatgttctgactggcgtgagtgcggaaaaaaccatcatcgaataccgggagatccttcgccgtgaaaaaacatgcgattttcctgtccctgctgatatcgctcgtgggttgctcgagtatgcgtaccatttacgtgccagcgcaatgcgtgccgatacccgcaagtctgacgaaaccgatgatcgtgccactgcctccgccacgatgacgtattgtcaggcgattttgtgggtgaagtcactattgatggttatcgagcaaggcaataataattttgccggtatccggcaaatcgaactggaacgaaagtaa

SEQ ID NO: 102679 - DNA, 501 bp, Enterobacter aerogenes
atgattcgcgtaattgttttcttttttattattcttttttcttcaacttcatttgcttttgttaatagtgaattaaaaaaatgtgagcaaggcttttcaatcctcaacttatctgttgattttaatgcagcaggattaaagcaacgcattatgcgggagtactcctcctggaaaggaacacgatatcagtggggcggagatagtcatcacggtattgattgctctgcgtttacccgccgggttttatcgtcggttgtacattttaatttacccagaaccgcggaagcgcagagccacgcaggttatcgggtttatcagcgacaactccgagctggcgatcttgtattttttatgacgaaaccaaatgttcgccatgtcggaatttatataggtggtgggaagtttatccatgcatcaagttcgcagggagtaacgctctcgagcttatctgaaagttactggcaggaacgctttctgacggcccggagagttcgagcctga

SEQ ID NO: 102680 - DNA, 141 bp, Enterobacter aerogenes
atgacacacgacccggagcgtattgtatcaatacgtccagtacagatcagtgtccgcaatgcgttactggtaagtacgattgtggccttcagtaaagtgctttacctacaaattcggacacatccgaaaattatggtatga

SEQ ID NO: 102681 - DNA, 234 bp, Enterobacter aerogenes
atgagcacgatcagagttgttggtattgatatcgccaaatcagtttttcaggtctgcgtctggatggtcgatggctccgtcgcatggaacaaaaaaatctctcgttctaaactgctggataccatccgacaattcgaacccggaactcttgttgctatggaggcctgcgccacttcacacttctgggggcgaaccttatcctgctgttctgtggtttttacagaaacaaagtga

SEQ ID NO: 102682 - DNA, 849 bp, Enterobacter aerogenes
atgccttcacttaagacgcttttgcaactgccttgcgggtggcaatctagccgacaggttgttagtcctgatgcgataaccctccatcttcgtgccacacgtaaaacggcactatgtcccgaatgccttaagcgcagccactctgtccatagttgtcggcggcggcggatacaacacctcccatgctccggccggacgctctggttaatctttgcagtccggcactggtactgccgtaatccgtcctgttcacgcaaaatttttgcggaatcgctggctccttttgctgatccgcagcagcagtcttcagcattacttcaaaatctacagcatcaactggggctcattgccggcggagaggccggaagacgggcagcggtagcctcaggaatgcagaccagcccggatacgttgctgcgcagagtcgttcaggctccggagcagacagagagccggacccgacatgttggtatcgatgagtgggcatggctccagggccacaggtacggtacgctgaatgttaaccttgatacacatcgccctctggtactactgcctggtcgggagcagcgcactctcgctgcatggtttaaaaaatacccggagatacaggtcgtttcacgcgatcgtggcggtatctatgcattagctgcccgcgatggtgcacgacaagcagtacaggtggccgatcgctggcatctgttgaagaacatcggcgatgcgctggaacgcatgatgtacacatatatgccattgatacgactggttgcgactgagttgtcacccaaaaacaggacgccgaagcgtctctggcacctgaaccgtaccggttttatgggagagagttaa

SEQ ID NO: 102683 - DNA, 888 bp, Enterobacter aerogenes
atgccgttgctggataccctcagcggtagtcacggggtcggaccggtatgccatgagctggatatcgccccgtcgacatactaccggcaccgtgaataccgccagcatccggagaaacgcagccagcgtgaacgccgtgacgaccaactgaaagtggaaatacagcgggtgtatgacgagaactacagtgtctatggcatccgcaaggtctggcgccagttgcagcgggaagacatcagcgtggcaagatgtactgtcgccagactgatgaaggccatagggctggcaggtgtgcgccgaggtaaaaaggtccgcactaccgtcagccgtaagtcagaagctgcacatgaccgggtaaaccgtcagttcgtggcagagcatccggatcagctgtgggtggctgattttacctacgtcagcaccaggcagggcttcgcgtatgtggcgttcatcatcgatgtgttcgccggtatgatcgttggctggcgggtctcatcgtcgatggaaacaacattcgtgctggatgcactggagcaggccctgtgggcccgtcgtcccacaggaaccatccatcacagtgataaaagctcgcagtacgtctcactgacgtacacgcagcggctgcaggatgcggagttgcttgcttcaacaggcagcacgggtgactcgtatgataacgcgatggcggagagcatcaatggcttgtacaaagcggaggtgatacacagacagagctggaaaagccgacaggaagtagagctggcaacactggcgtgggtggactggtacaacaatcgccggttgcttgagcgactcagccacactccaccggctgaagcagaaaaagcatattatgcttccctcagggaaaaggatctggcagcctga

SEQ ID NO: 102684 - DNA, 333 bp, Enterobacter aerogenes
atgacatccaaacgagccaaccgttacccacctgaactgcatgaacgggctgttcgaatgctgctggaacagcgcaacgaataccgctccgaatatgccgctatcaactccattgcgccaaaaattggctgcagccccgacacgctcagagcctggctgcgccagcatgagcgcgatacgggggccggtgatggtggcctcacaagcgacgagcgtcagcgtcttaaagaactggagcaggaagttcgtgaactgcgtcgcagcaacgatattctgcggcaggcctcagcttattttgcgaaggcggagttcgaccgtctgtggaaaaaataa

SEQ ID NO: 102685 - DNA, 288 bp, Enterobacter aerogenes
atgagcatgatcagagttgttggtattgatatcgccaaatcagtttttcaggtctgcgtctggatggtcgatggctccgtcgcatggaacaaaaaaatctctcgttctaaattgctggataccatccgacaattcgaacccggaactcttgttgctatggaggcctgcgccacttcgcatttttgggggcgaaccttcacatctatgggctattgcgtcagactcatccccgcacaacacgtaaaagcttttgtccgtagccagaaaaatgatgccaattgtcaatga

SEQ ID NO: 102686 - DNA, 3189 bp, Enterobacter aerogenes
  misc_feature (556)..(565): n is a, c, g, or t
atgttgtcacggtttttcatttacagaccggtttttgcatgggttattgccatccttattatggctggaggcggaatggccatttattctctgcctgttgctcaatatccggatatcgcgccaccaacaataaaaatctcagctacgtaccctggtgcatcggccacagtgcttgaagacagtgtcactcgcgtgattgaacaacagtttgccggactggacaatctgctttatttcagttcatcgggaagctctgatggtacagtggacattactttaacttttgcaccgggaaccgatcctgatatcgcattgatccaggtgcagaataaagtccagcaggcacagacacagcttcccactgaagttcagcaacagggcgttgtcattaccaaagctcgctcagattatcttcttattatggccctgtatgacaagtccgaccgcgccagcagtacagatattgcagactggcttgtaaacaatatccaggatccgatctcacggctgaaaggggttggtgattataaagtttttggatcgcaatatgccctgnnnnnnnnnngatcgcaatatgccatgcgcatctggctggatccgaataaattattatcatactcactgatgccatctgacattcaaactgccctggaagcgtggaacgttcaggtcgccgcaggaaaaataggggggcagccatcgtctccaggtcagcaactcatagccactattcaggctcgttcgcgcctccagactccggaagaatttcgtaatatcattatcaaaacacgtcagaatggggccattgtacgtataagagatgttgcccgggtagagcttggaagtgacagttataaagccacctcaacccttaatggtcatcctgctgccggactggccatcatgctggcacccggggctaatgcgcttaatactgcagagcgggtaaaacaggaagtgtcagcatttcgacgagaattacctgcaggatatgaagttgcctggccaaaagataatacgtcatttatccggatgtctgtacgtgatgtgataaagactcttctggaagcaattgtgcttgttgttgtcgtaatgtacctttttttacagaatatccgtgcgacactaatacctgcactggctgtgcctgttgttttgttgggaacattcggtattcttgccatattaggatacagcattaacacacttacattgttcgcgatggttctggcgacaggattgctggtggatgatgccattgtggttgtggagaatgtcgagcgtattttacaggaggaaaagcatcttactgcccgcgaggcaacagcaagatccatgcaggaaatatccggagcgctgatcgctataacccttgttttatcctgcgtatttttgccaatgaatttttttggtgggtctacaggtataatttacaggcaattttcagtcaccattgtatccgcgatgtcattatcactgatagtggcccttatattcacgccggcattatgtggatcgttactgagaaataacccacatcataccaaaaaaaattttttccattattttaatgcccagtatagtcgtgcagagtctggctatcagaaaggaatcctgtgggtattccggcactcggttcgctttatcatggtttatgttatggctgtgatagcgatgttagtgatgctgtggatgctgcctggaggttttcttcccgtcgaagatcaggggcttatgatgatacaatatcagcttcctccgggtgccacactgaaccggacaaaagaggtcggaaagagaataaatcagtggttccgggacaacgaaagaaaaagcattaatacgctttataccgttgatggtacaaatttcagtggcacgggagataatgcaggaatgatgtttatttcgcttcggtctccggagttccggaaagaggaccagtattcagccctggctattgctgccagagcccggaagggcctcagtgatatttctgatgccgttgtaactgtcctgcttcccccggcagttgaaggaatgggagagaccaacggttttacgtttgagctgatggcaaatggcagcacctcccggcaaacgttgcaaggggtgagggatgaattaatcaggaatgcagaaaatgctcctgaattacgtgctgtacgtattaatgaaatcccgccgatgccgcaactgaaggtcgatatagacacgaacaaagccactgtccttggagccagaatcagcgacgtcacccagacactgtctgctgccaccggtgggatttacgttaatgacttcaatgatcgaggacgagtgaaaagtgtttatattcagggagacaagcagttccggtgtcaccctttcgatttgggtaaatggtatgtgagagtcagccaccctgatggctcagtggctatgacccccttttcggtcttttcagaagcccgttggggatttggggctgaaacgctgaatcgttataatgggctggcgtcttatgagatagtgggtgaaaactcatccggttacagctctggcgcagctatggacaggatggcgcggctggctcaaaaacttccgccgggcacgtcatggcagtggagtggtctttcttatcaagaaaatgtggcaggtggtcaggcgaccccgctctatcttatctctgttatcgtgatatatctgtgtctggccgcattatatgaaagctggataattccgttgcctgttattttgattattccattagggctcactggtacggcgttagccagcacactgagaggtttgaataatgatgtgtatttccagataggattgctgactatcattggactgtcatgtaagaatgccattctcattgttgaatttgcagaaagtgaacttcgtaaaaataaaacggtgattccggctatcgttcatgccgccagaaagcgacttcgtcccatcgtcatgacatcgctggcctttgttatgggggcattaccgcttgcactggcatcgggccagggggcaaatagccgtatcagcataggaacgggaatgattggtggaacactcactgcaaccattatggctgtttattttgtcccgtttttctttctggaagtgaaatatttagccgtaagaataaatgcattgccggagtttatcaggaagtacatcaaacgataccggtcagactga

SEQ ID NO: 102687 - DNA, 627 bp, Enterobacter aerogenes
atggattttttttctgcatatctgaacgcgctctatcctttgttgctggtgattaatccgattattatgacggctatttttattgcctatacacgtaatatgggcgagcgggaacggttgcatactatcagaaaaacgcttctggctgttatggtgacacttttaatttgcacctggtccgggaatcggttactgagtgcccttggtattaatttacctgttttacaggtggttgggggcttgtctctactgatgtcttgtctgaatggtattaaaacacctgataaggccatgcaggaagatatatccattgttccgctttgtatcccggtgattgcaggcccggcggcaatgtctgtggccttttctcttaatgaaacatcaccttctgccccccattttttcctcctgtctgtcaatacacttgcctgtctctctgttatttttttattatggattgcattcacttacagtcaacgaattgcaatggtgttgggagacaatggtgtttatattctcagtcgcgtttccgcactgatattatcctgtatcggtgcggggcttttattcagtggtggggctcgtctgatatgtacaatgtttaccaggcagaatgtttcgatgtga

SEQ ID NO: 102688 - DNA, 1236 bp, Enterobacter aerogenes
atgtacgcgcttatcaaacatgtcggtgtgttcgatggagtacacaatgaaattaatgtgaaagatattttgatcaaaggaaatatttttgagcatgtagacgacaatattgtctcggatgataaaaatattaaaatttatgatttgaaagggaaatttttattaccagggttgattgatgctcatgttcacattactgcaaataccatcgatcttaatcaatccggtgaacatcaggcagcgatttatgcacacagtttcagtgtgctggagtctatgctatttcggggatttacttcagtccgcgatgccggggggtgtgatgccggtattgttcacgttgtaaaaaataaaatcgtaccatcccctcggatctttccgtccatcagggctttgagccagaccgccggccacggtgattttcgggagcaggtggaaccaacggcgttttgtgcctgtactgtcaacagtggatcatccatttctgtgttgtgcgatggtgtttctgctgtgcgtcatgccgcccgtgaacagttcagaatgggggccgcccaaattaaaatcatggctggcggaggaattgcttctccggttgataatgtagaaaatttacaattttcagacgatgaaatcagagccattgtggaggaagctgagcgtttcggaacgtatgttatggcgcatgcctatacacctgagtctatccggcgatgtgttgaattaggggtgaaaagcattgaacacgggaatcttctggatgctgaaaccgcttgtctgatgagcgaaaaaggagcttatcttgtccccactctggccatctatcatgcattcctgcatcatgtgaagaatgattctgatattcctgattcagtcaaagctaaactggtggaggttcagaaaaatgcggcagaagccgttgcgacagcgcacagatatcatgttcccgtggggctgggtacagatttgttgggagacctgcattattatcagatggatgaatttatgctccggcaggagatcgagtcaccttaccagacattacgttcggcaaccagcatcaatgcagaaatactgggaatgaaagataagctgggcgtgataaaagatggcgcactggctgattttattgttacaagctttaaccccctgacaaatatttcttcattttctccatccggtgaacgcattgaaatgatttgtatggatggagtgattatcaaagataccactgcctga

SEQ ID NO: 102689 - DNA, 309 bp, Enterobacter aerogenes
atgcgccagtcgctgatacacgggcttgaaccctggaaggcatcgggctgcatacactttgccaaatctaatcgtattaattttaaccccccttcaagagacaaggaaggcagcctcacagccgttgccgcaggtgaacaggttgtgcccgcgtcggagctggcctctgcgatgaagcaaattaaagagctgcagcgcctgttgggcaagaaaaccatggcaaacgagctgcttaaagaatccgttgaatatggccggcaaaaaaagtggatagcgcacgtgcccttgttgccggaggatggcgaataa

SEQ ID NO: 102690 - DNA, 969 bp, Enterobacter aerogenes
atgagtcagccaaatccactttgtgtgggcattgatgtttccaaagctacactggacatcgctgcctgcagtaatgttactcagtttacaatcagcaatgactctgacggctttgatgcgattattaccgcactgagacggcactccgttgctctgattctgatggaggccactggtggaccagaggtcgctgtggcctgttcgcttcaggccgaaggttttgaggttgccgtggtcaatcccagacaggcccgtgacttcgcccgtgcaatgggatatcttgcgaagactgaccgaattgatgccagagtcctcgcgcagatggctgaggttattaatcgtcaccctgagcggaaacgctttatcagggcactgtcggatgctgagcgtcagatccttgctgctatggtggttcgcagacgccagctgattgcgatgttggtagctgagcgtaaccaactgcatccatcccacccgcagaacaagaaaagcattaatactatcattaaagcgctggaagatgagcttgcctggctcgaggaagacatgaacagtcacatccggaaccactttaaagagattgctgagcgcctgagcagtatcaaaggtgtgggcactatgaccgtttccgcgttgttggcggagattccagaactgggaacgctatcccgacgcgaaatcagtgcgctcataggtgttgctcctgtcaaccgggactcagggactatgcgtggtcgacgaaccatttttggcggcagggctggcgtaaggcctgcactgtacatggctgctcttgtggcaacccgctttaatccggtgataaaaacgttttatgtgcgcctgcttgccgccggaaaggccaaaaaagtggcactggtagcctgtatgcgtaagctgcttaccatcctgaacgcaatactcagaaagaacgaagaatgggatgagtcgtaccaccacgttgctccataa

SEQ ID NO: 102691 - DNA, 240 bp, Enterobacter aerogenes
atgttaaacggtatatggcggtccgcaattgcttttacccataagctgcaggaaatcaccgatcgctattccggtgattctgaactggccgcgctgctgaatgacctttttgttgaaaaattacttcagccggtgaaaagtaaagcaatggaaggcgatcccgaaaaagtcgccctgctttattcactgacagacaaactgcagaagcctggtgctgccattactaacatcaaagcataa

SEQ ID NO: 102692 - DNA, 387 bp, Enterobacter aerogenes
atgctgatgctgcatcgggatgactgcgtaagcgacgttgccagaacgctctgcttttgcccgttcctccggaggccgcgaattaaccggttctcactgtcgggtgttgcaggaccaaaatcattacctgtcagacgaactcctttgttgaaaaggggccacctgcaaccgggtataatgctttatgcggcatcggaaatggcgatgtttttggcttttctatttttttgtgccgataaaaatgatcatcgcgtcgggccggttccgaacggacaagcgtcccaggccccggatattgcctttgattttgatgtggtctgtaaaatcctgtccagcgatttgatattcaagggccccttacaggagaacctctcagtgcagtcgtga

SEQ ID NO: 102693 - DNA, 192 bp, Enterobacter aerogenes
atgtcaacactcataaccactgtgctttttgaatgtttctgccttttcattctggcaagaaattactggatattcagaaacagactgagatatcaacgtattttcggcataaaagcctgtgaaaggttaccatcctataacagaatgatgtttaaattctgggtctggaatttttataaattaatgtactaa

SEQ ID NO: 102694 - DNA, 183 bp, Enterobacter aerogenes
atgattaactttacactggcagatgtttctgcccgcagcagtgcagctggaagtaagctggctattggtgaatttcttgatgataaaccgatggttgatgaagccaggcaggataaacaattcattgagcttatgtcccgaattatatatgacaccggagaatataaatgtcaacactcataa

SEQ ID NO: 102695 - DNA, 336 bp, Enterobacter aerogenes
atgaaaaacatgacatttgaacttgctatatcaaacagcgatcacgaaaccgaaatggctgtttgtctgctggaacaatcattgcgttccggcgcaaccagtatcacgtttgaacgtgccgggataaaccatctgattatttcttcatgggtcagtgaacaatcagtccggccgcattcagctggccacaacgaaacctcacgctgtcattttacaaccagcagaccagagggccatgaacacaaaattatgcacctgcagaaaaaaagcattgagcaggaaaagggacttcagcaacctggtgatgaattatgcgaggtttccctgcatgattaa

SEQ ID NO: 102696 - DNA, 129 bp, Enterobacter aerogenes
atgcgctgtgtcattacttgtgtaagtaaaacagccgtgttctatggtaaactatgtgagaggctggtgatgctgccgatgtttcatatggaaaactgtggtgcgtctgataacgagtttggtaagtga

SEQ ID NO: 102697 - DNA, 264 bp, Enterobacter aerogenes
atgaagaagcgtttttccgacgaacagatcatcagtattctccgcgaagcggaagccggagtttctgcccgtgaactctgccgcaagcacgccatttccgatgccactttctacacctggcgcaagaagtttggtggcatggaagttcctgaggtgaagcggcttaaatctcttgaaaaggagaacgcccgcctcaagaagctgcttgccgaagccatgctggataaggaggcgcttcaggtggctctggggcgaaagtactga

SEQ ID NO: 102698 - DNA, 258 bp, Enterobacter aerogenes
atggttgttacgttgaatgatttgaaaaataagtacctgaagttgaatgaagtcagatggagattgcgggaaaacctgcagggtaaggctggggaacttctgcatgagtatattgattcattatccattactgaaaattcatggcttgatgttggtgcgaacgagcatctgtatgttgagactggaacgttatcagcgacagggggggtcaacctgttccctatccttgtcttgaaatggacgaaaattacgggctga

SEQ ID NO: 102699 - DNA, 396 bp, Enterobacter aerogenes
atgttaaatattccggtatccatatgtctttataatggaccaacacagacccagtatcatatcgaaacaggtatacaagccgaaaatgcatatcgtatgctgagagcagcatacattgtgggtatcagaaacaaatatcaaaaaataattgctgctgccatattcatttcagacatcaatgacaacaatgatccacgtctggctgatgtcgcttgtgaaatatttaaaagacataagccaaccagaaaacttatcaaccatctccactcactgccaataagcaggttaagaatcaatctggaaaacggaacaatacaggaggcatttgccgacgctgagacgacccaattatatatggatttttttatgaaaaacagcgttgaaggcagagcatga

SEQ ID NO: 102700 - DNA, 123 bp, Enterobacter aerogenes; identical to SEQ ID NO: 49034

SEQ ID NO: 102701 - DNA, 1530 bp, Enterobacter aerogenes; identical to SEQ ID NO: 49035

SEQ ID NO: 102702 - DNA, 639 bp, Enterobacter aerogenes
atggggaaaattaatactaatatttttaaacgtgataatgacccggcccaaaagaacgttgttgctatttgtgcatcaggtccatcattaaccagaacagactgtgatgcattgatctcagccggaattcctgtcattgctgttaattcaacatggcaaatgattccggcgtgtaagttcatttattctggcgattttcagtggtggcaatattattttcatcaactccctgataatgctgaactctggacttgtaatttgcgagccagccagaaatttaatattaattacttcgtgcctgatttcaggacttcctataactccggacaacgagctattttttttgcttctagccttggtgtgagtgaaataattttacttggttttgattgttctctaacaaatggaacccattggcatggggatcataaggtactgggaaatccgactcccgggtgcatcaataactggaaaaaacaattcagattaatgtcagattatctagaaggaaaaactaaaataataaactgcagtagatatacggagctcacctgttttacccgctgttctctcgaggaagttctggctgttggtggattaggatttattgaacaacccaaagaacaaagggatatttaa

SEQ ID NO: 102703 - DNA, 2832 bp, Enterobacter aerogenes
atgaaaaaaaacctcaaagaaaaaattaacagagtactggtttattctcagataatattccagtcacttattcctgttctaccttatgccgcaagtttcagcgttcatggcagcaccacgatgataccttcacaatctgtatcgtcgaatctgtcatcatcggaaaaccagaaaacgcaggcaattccctggtcgtcagaatggggaacactcgccagcgccacaagcggaggtaatgtggccggggctgccgcgtccatggcttcaggatataccggtgatgccatacaacaatggctggcacagttcggtacagcacaggtccagttaaacgtggatgaacatggacactgggataacagttcagtggattttttaaaaccgttgtacggaagtcggaagtcttttgtctttactcaactgggtctgcgctcaccggatgacaggacaacaggtaatatagggctggggttacgtacgtttaccgactataactggatgtttggcgttaatggtttttttgatgatgattttacgggaagcaatcaacgggcaggctttggatttgaagcctggacagataatctcaaattttcagcaaacagttatgtaggtatatccagctggcatgattcacgggatttcagtgaatacgaagagaagccggcaaatggatttgatttgcgggcggatggctacctgcctgcctacccacaactgggggccagtattatgtacgaacagtactatggtgataacgttgccctgtttgataaagatcatttacagaacaacccatccgccgtcactgtcgggctgaattataccccggtacctctcatcacagccagagtggattaccgtcgtgggcagggagatctggatgaagccttatttagcctgaatttcaactatactctcggtcagcctttatcgcagcaactttcaggggatgcggtggcagtacgtcgcagtctggccggaagccggtacgatcttgttgaacgtaataatgaaatcactttgcagtacagaaaaaaagagacctatccggtcttgtcagacatgacattgaccacaacaaaagataacagcccggcagatggctcaacaactaatacggtgatgcttcatgccctgtcatccgataaaaaatctgtggctaatgccgctattgcatggtcagtatcaggaggagcaaagctaagtagccttactggtgtcaccgattcgaatggtaatgccaccgtcgatatcaccagcacgacggcagaacaggttcaggtcaccgccacctcaggcactgtctcccggactacaaccacaacattcaaccagtctgttgccgcactcaatctggcgataaccaaagacaatagccttgccgatggaaatgaacaaaatgccggtcaggtaacactgaaagattccagcggaaaaatcctgtcaggggtggcagttagctggcaggtgaataatggcgcagtgataaccagtagtgatgcaactaccgacaacaagggtatcgcaatgattcatttctcagacaaaatacctggtaaagtcaaactaagtgccagtgctggcgggaaaacagaatcggttaacgctacttttgtcagccagacagtatctgcagtctccgtcactatgagcaccgacaacaagccggccgacggcacctcacagaacatcgctcaggcagtggtgaaagatgcgtccggaaaagccatgtccggggtcagtgtgagctggtccctgagtggctcttccactgcgcaggctgtcaccgcaaccaccgtgacaacggatcaaaatgggggggccacgctgggcctgatcgataccgtggcagaaggcgtcaccatcacagccagtgccggcgggcagtccggtaatacacaggccaccttcaccgccgttcctgtcagcagcgtctccgtcactatgagcaccgacaacaagccggccgacggcacctcacagaacatcgctcaggcagtggtgaaagatgcgtccggaaaagccatgtccggggtcagcgtgagctggtccctgagtggctcttccactgcgcaggctgtcaccgcaaccaccgtgacaacggatcaaaatggggtggccacgctgggcctgatcgataccgtggcagaaggcgtcaccatcacagccagtgccggcgggcagtccggtaatacacaggccaccttcaccgccgttcccgtcagtaaagttacagtgaccatgaccaccaacaacaagccggccgatggcacctcacagaacattgcccaagcagtggtaacggatgcatccggaaaaaccatgtccggtatcactgtgaactggcgcctgggaggcactggtgcacaggcagccacggctacaaccgtggcaacagatcagaacggcatcgccactctggggctgacagacacaaaaatggaaaatgtcaatgtcaccgcttacgccggggaagtttatggtaatacacaggccaccttttcacgggcaccgttcgttgtgggctcaattacccttgaagccaccactaatggacaaggaatgagcactgccaatccagatgttgttctggcaacagcctatgatgaaacaggacaaccaatgcccggagtacaaattaagctatatgactactcccaggctaatgtgaaatattatccttcagcaacacaaattacggacgcaaacggcaccgctacgttttcagttacggcagacatacagggaggtgctctggtttatggggaaacattaaattcaaccgctgaccagaaaaaggctgaggtttcgctgacatttcttccatga

SEQ ID NO: 102704 - DNA, 1491 bp, Enterobacter aerogenes; identical to SEQ ID NO: 91419

SEQ ID NO: 102705 - DNA, 846 bp, Enterobacter aerogenes
gtgcctaactttttaaaatctgctttaaatggtgctttagactctgttaagtctcctatgaaagtaggtaaagatctattacatggtgactttcacaaagcttttgcagatttaaaacacttgcccggcaatcaagaacgggcaaataaacaaacattacaatcattaggtatacgtggttgggttggcaaccatccgggagaaacagcagccgctgtagttggtactgtctttggtggttgggctgcatggggtgcttatggagctggtgctacaggtacagcagcaggagcggctacagggggtggtactgctgctgctgctagtgcaggtagtgctatgtcttttggtggtgctacgggttcagctatggcctattcccctacatcctccgctgtattaggtggtagtgcaggtggtttatctggtggtgttggtgctgctggtatcggttcaacaggtgttggtatcggtggagaatctacagcctcattaggtattagtggtgctggtgctacttcttttccgggtcttacttatggttctacaggatctttaggcagtggatcaggttggttaggatctgatgcagcccctatttctaatacccccgcttcaagctggcaagattggattcagaaatcaaaccaatcaggacaacaagagcaacagaaaccagcaagaccacacgcaaacagtttactaaatgagtttatggggcgtggatcttctagggattttggtacaagcaaaccaacacaacaaccgcaaacaactacagaacttttaggaggtaataccgggttatctggtacttcctttagtaacaattttgggagtctataa

SEQ ID NO: 102706 - DNA, 549 bp, Enterobacter aerogenes
atggctatttacctttcacacactaaccccgttgcacctgttacttcacctactgctgatgattggcataatttataccaaactacaggccaccaaatcagcaatgtatccgaacagaaacacagtcagggttttaatccatacgatgcgcctcaagacacacagcaacggcaacaggatgaacatgcagcagctatacagcaatatcaatcacctgttccagtgaaccacgttgattattcaggtagtgagcttactgatgaaaatcataaccgttttcttcatcaccttgccaatgatccagctatcaaagaagtaggtgatcagattgatagtgttcttgaaacacttcaagcagaaatggcaaacggtttaccagttgaagaagcaaggaaaatccttgcacagtttggtgaagaagtcattgaaccagctattcaaaaacatcacggtaaacactcacctactcacagaacatctttccatgatccaatagaggaagaattaccagccgttgtaaaacgtgcagcatctaaggggcgtaaataa

SEQ ID NO: 102707 - DNA, 771 bp, Enterobacter aerogenes
  misc_feature (738)..(747): n is a, c, g, or t
atggcttatcaagtatcaccgaatcaatcagtgttggaagatcaacaatatgattcaaatcagcacaacactttagggcaaccattagcaaacactttaccttctaacggcgctcgaatctcaaacgattatgaaaatgataatcgtacacctattgagaacaaacaggatttgctacaagcacagcgatctacacaggcattacgtgaatcagatgatccacttattcacactggtagaaatggctttcaatatcagttaattgatgattcaaaagctggtcagttacgtaccggagctatggcagtatttgacgctgcattaagtagcaatatgggtgataacgtatctactattggtagtcatgctgtaaataaacttatccagcagggtaagcgacaaagcatgattcaacagcttgaagatgatccggcaggttacaaccaacttgatattgcaaaatgggtagaaactggaaacctaaaagatctggtagccaataagggtaaatgggaaaacatcaacgcacatcaacaacaaaattcactaactggtgaaattcgtgatgtaggtatttcccaacaacagcagattgaaaacgatcaagcccaacagaaactagattttgatattcaacatcaacgcactatggaaggttttgaaggtcagcgtttagggatggaaaatcaacgtattggacttgaaaaccagcgtttaaccaatcaacagcaacaattnnnnnnnnnnattacaatcaacagcagaagttaa

SEQ ID NO: 102708 - DNA, 219 bp, Enterobacter aerogenes
gtgatctacacgacgaatgccatcgaatcgctggacagtgtgatccgccacgcgctcaaaaagcgcaaagtgttcccgacagacgactcagtaaaaaaagtggtgtggctggcaatccagtctgcatctcaaaaatggacgatgccgcttaaggactggcggatggcaatgagccactttattatcgagttcggtgaccgcctggatggtcacttctga

SEQ ID NO: 102709 - DNA, 969 bp, Enterobacter aerogenes
atgagtacaaacacacaggaaagtattaatctgccatttaattcgccggatggggcaatgatgttaatttatcaacgcacgccgacagaagatgaaatgttttccgaagaagtgctgagcattgccggccctgaggatgcttacgttaccctgggcgtgaacaacctgaccgatccctctgaagatatgagcccttttagcgctattacactactggggcaatataccgcttcagcccccgattatttgctgaaagccggcaatctgtatcattttaccgtgtatctgacaggacgtatcggggcattctccggcgaactgttactgactttcactccagccagccagtctgccctgtattttaccctgccggccagtaccggtgcgccatcaaaggcactcctcacctcctgcctcgcaacgacctattcagcaccggccctgaccttactggatgcctctgatttcccggttacggtggaaatgaccgattccacgggaaaaacggaacaggctttgttttccttcgccggcagtaacgcacgtcttgttgacatcaccatgaaagccggcgaatcttatgatttttatgtcgtcaataccaccgcttccggtgcggaatgtcatggcgcgttcacatttaaaacctacctgcatgaaaatgacgctaccggattcagtattccggcagatacacagacacacactatttatacccgaaccccgccgggcgatgaactgattaacgccattcagttatcctcagtatcagcacttcctgtgacgctgcaggtgaataacggaacagaaacgatatcgcatgagttcaccacggccggtgagtcatggagtccggacagcgatttttatatgccttttggcaaagactgcccctttacattaatcaacgggacgatgccattaacccctgtagagggggagtttgatttgtattttatcccgcgataa

SEQ ID NO: 102710 - DNA, 1239 bp, Enterobacter aerogenes
gtgaagcaggcggacgggtcgtggacggtgacgctgaccactgaggcggtatccagcacggtgattcagtcggtggtggcggacccgaccagcattgaaaacgacgggaagagccagtcgactatcacggcaacggtggtggacagtgtgacgcagcagccagtcagcggagtgacagtgaactggacaagttcgctgggaagcctcagtgtggggtcatcagtgacggcagcggacggcatggcgacaacggtactgacggccaccggcaataccggcacggccactgtgacggccagcatcagtagtgacagtaattctgtcgatgtcacgatcaccaacagtgatgcggattgtactatcaccgaactggtcagtaataaatctgagattaccggcaatggcagtgatgcggctattctgacggcaaccgtgcatgacagcgagggcatgccggctgtaggcgtgactgtcaactggagcaccagcacaggaaatgtgttgccgccctcttctgtcactgccagcaatggtactgcctccacatcgttgactgataaaggtgagccgggaacggcggttatcacggccagtgtgaatgacggggcaagcacgaagcagaccagtgtcaccgtcaaaccttacgataaagtgtattttctcacgggagcgccggccctaagtaacccgctggataatgactacattccgaccaataaagtcgtgatttatgccatggtggatgatgtgtactcgctatcctgtagcggcggggccttttttttgaaaacggcgtctccggatatggtggtgacgatccctgaaagcggatgggtggagctggaaatcgccgccgggccagtggagacggtctatgtgacggtaaccggtccgtcaggagaaccgataaccggcacaataaatttcactgcgtttccgttcaacagcgattatttaagaatggcggccaattccggtgctccggctaacggacaggcttacaacagtgtgttctttgacagtaatgcaccgaccaggccgacagaaatttatgtgagtttaagcgggagtgcgaagttcgcggggacaaatacgaacgttatgatgttcccgacgatcccgggtccgttcaacctgatgtttgagattgtggatgaggttgcagaggtcgtgtatatcgactgctcaacgtctgaatccggaagcgtcagttgttatgccggttttgttgaaccataa

SEQ ID NO: 102711 - DNA, 243 bp, Enterobacter aerogenes
atgagcacgatcagagttgttggtattgatatcgccaaatcagtttttcaggtctgcgtctggatggtcgatggctccgtcgcatggaacaaaaaaatctctcgttctaaattgctggatactatccgacagtttgaacctggtactcttgttgctatggaagcctgcgccacttcgcatttttggggcgaaccttcacatctatgggctattgcgtcagactcatccccgcacaacacgtaa

SEQ ID NO: 102712 - DNA, 831 bp, Enterobacter aerogenes
atgggctattgcgtcagactcatccccgcacaacacgtaaaagcctttgtccgcagccagaagaacgatgccaacgacgctctggcaatttgcgagacagcgtttcgcccgggtattcactttgtttctgttaagaccacggaacagcaggatatcaaggcacttcgaaacacacgtcaactaatggttgaacagagaacggcgctggccaaccagcttcgttctctgctcgctgaatatggcttcaccattcctgtcgggatcatacgtctccagcaacagctaccagagctgattgaagatgcctcaaacagcctgaccttcacttttcgtcgtttgctctcttccttattggcagatatgcaagcgttgaatgaacgggtcgccagcctggatagcgaaattgcagcgctatcatcacagcagaccgtataccgtcatttattaacgatcccgggtgtaggcccgctgattgctgccgcgtttatcagcgaagttgatgccacacagttctcaagtgggcgagaattatcggcgtggtgtggactggttccccgccaatacagctcgagcggaaaacaacgcctgtcttctgtgacgaaaaatggcaaccgaagtctgagaacgctcattatccatggcgccagggcagtaatgcggtgtgtaaaaaaacgtgatgacaatctggggcgatggttgcagaaacttgaagcccgccgtgggtttctgaaaacaactgtcgcgctggcaaataaactgacccgaattatctggcgcgtactgactgactcggttgattttaatatgaacaaggcattttcaatagattaa

SEQ ID NO: 102713 - DNA, 492 bp, Enterobacter aerogenes
atgatgcacccgataatattttttggcgattacgactgcctggaatttactgttagctcacatttaattccgggtctgcaccctgagcaacctctggacttctggtcactcaattcccggatgttaaatagtcttgttgatgaaaatagttatgtctatgttttctttgctcctgttgattatgtgaaaatgctggttaaggaacagtccacgcccgcaacagttccaccagtactgaactggggggaatataccgggtatgcgcttgggcttgcggatttttcgacaattcttcgttatcggtgcccatctgacagctggcaaagtaacccattaaattgtgtatgttatttaagcgatgctgacaatcaacctgtgacatcatctgaactgggagaatggctgcctgaaatgtacggcgataccatgagtaattttatggctggcaatattggaccggtaaataaaaatatgccatggccatcaaattga

SEQ ID NO: 102714 - DNA, 2079 bp, Enterobacter aerogenes
atgaacaaaactatacagagcgataccgtattgtacgcgccacagctaccgcaaatggcgcaggacaacgtcatcaatgagaacgacctgttgaatgatggcggagtactgattgtcgtgagtgaaccacagaatgcggcgcagggtgactatctggtcctgtactggaatgccactcaggtaggaacgttgtacacagcgacagccgacccttcagtcagttatccgtggacaaccacgctgccagccaccatcgtgccggatggcagttatcaggcatattacacccggcgggatgaggccggcaacattgccacctcagctatggccaccgccattgtccggcgaaaagataccggaaccctgccggcccccgattttccggaggcgaacagcagcaacaccctgaccggcgatgatattaccgatggcagcactccggtacatattccggtgtatagcggtatggcctccggtgacgaactgaccgtgtactgggcggggatggacagttccggcgttcctgtaccggagagtgttaccagccagtcccatatcgtgacgccggatgatattgccggcggaaacggcgtgaatgttctgattgctgccccgtttatctcggtcattggtaccggctcggcgttatcctggtattccagtctgccggcagatggtggggccgccgaaaattcagatactgcctccgtgctgattgatgtcacacaggtggcattgccggcgccatcgtttccggaggggaatgacggctggatagacgcgcaggaggccgcagacggtacgccggttgctgtcccggcctatccggggatagccgtcggtgacaccgtgattgtcaactggcagggatatcacggcagtacgccggtcagtggcagtggtggcagctccccgtcttataccgtcaccaccgcagacgtcgttgctggttttcaggttattctgccgtatgccagcctgcagcccgtcggagtcggcacgcagcaggcatcgtatcaggtgaactttgccggtggcgccggacagggcatttccgccatcgccgtcgtgaacgtggacaccacacataccagcgtgttgcctccgccagtattcccggaagcatcaggggataacgttatcgatgataccgagtatgccgacggcacgccgatgcagattgcctatccggggatgcaggccggggacagcgtcaccctgttctggcagggatatgaccaggagggcgggattgtgccggcctcgtcctggtacatcgtgcaccgcgtcacggccccagaggcgtccgccgggcagttttcagaaaccgtgcccgccactgccattgccccggtagggaatgggtcggcgacgggccactacaacgtccttctgcctgacggcgggggaattgaatcatccgacacaacaacggtgaatattatgacacaggcagcctctcttctttccattaatgccgccactaatgccccctggcgggataatcctgctgccccggttatcccggtgaatcaggtgactctggcgggccagccgggtgcggataccgtcgtgtccctgtccaccggggcctattttatggagaccgggcagccgctctgggaaggccggctggatgaaaatggttccgccattctgaacgtctacaaactggatgggccggggctggtaacggtcagcgcgcaggacattgccgatccgaccatcagtgcggtgaccagtatgacattcggcgtctacctgaccggtaccggtgccctggcaggatacgccttcagcacggggacagcagccaatggccggtcagtgtgcagtgtgtatgtccgtgccacaccatcaccggacatcactcaggcccgtttgatggtgaccgccggcagcgccactattgttggttaccccctgcagacggctgccattcagttgtatgacgatgggtcatgtactgctgacctgcaggacacggcggcagaaaacgtggccctgacgctctccctgccggaagcgaccgggtcggaagtgcagttcagtatggtgtttgtgggtttcccggcctga

SEQ ID NO: 102715 - DNA, 1227 bp, Enterobacter aerogenes
gtgactctgactctgacagcgattcggattctgacagcgattcggactctgacagcgattccgactctgacagcgattccgattctgacagtgattccgactctgacagcgactcggactctgacagtgactcggattccgacagcgactcggactctgacagcgactccgacagtgactccgactctgacagcgattcggactccgacagtgacagtgactctgacagcgattcggactctgacagcgactcggattcggacagcgattccgactccgacagcgattcggattcggacagtgactccgattccgacagcgattcggactctgacagcgattccgactccgacagcgattcggatagtgacagcgattccgactccgacagcgactcggattccgacagtgactccgattcggacagcgactcggattcggacagcgattcggactctgacagcgactcggattccgacagtgactccgattcggattctgacagtgattcggactccgacagcgactcggattcggacagcgattcggactctgacagtgactctgactcggatagcgattcggattctgacagcgactcggactctgacagcgactcggattccgacagtgactccgattccgacagcgactcggactccgacagcgactcggactccgacagcgactccgattctgacagtgattccgactctgacagcgattccgactctgactcggactccgacagcgattcggactccgacagcgattcggattcggacagcgactcggattcggacagtgactccgattcggacagcgactcggattctgacagcgactccgactccgacagtgactccgactccgacagcgactcggattcggacagcgattcggactctgacagcgattccgactccgacagcgattcggattcggacagtgactccgattccgacagcgattcggactctgacagtgattccgactctgacagcgactcggattccgacagcgactcggattccgacagtgactcggatagcgacagcgattccgactctgacagcgactcggatagcgacagcgattcggattctgacagtgactcggattcggacagcgattcggactccgatagcgattcagattccgatagcgattcagattccgaaccgcaggcaaatgatgatacgcatacggcagctatcgataccgtag

SEQ ID NO: 102716 - DNA, 1065 bp, Enterobacter aerogenes
atgaagatccttgttaccggtggcgctggttttatcggttctgctgttgttcgtcatatcattgaaaatacccgggatgaagtccttgtcatggactgcctgacctatgccggtaacctcgagtctctggcgccggtagccggcaacgaacgctactctttcacccagaccgatattactgactcggctgctgttacggcgcagttcaatgccttccagccggatatcgtgatgcacctggcggccgaaagccacgtcgaccgctctattgatggcccggccgcgtttatccagaccaacctgatcggtactttcacactgctcgaagccgcccgtcagcattatgtgtcgctttctgatgagcggaagcaggctttccgcttccatcacatttccaccgacgaagtgtatggcgatctgcatggcaccgatgatctgttcaccgaaacgactccttacgcgccaagcagtccgtattccgcctccaaggccgacagcgaccatctggtccgcgcctggaaccgtacctatggcctgccggtggtggtgactaactgctccaataactacggtccgtaccacttcccggaaaaactgatccccctgaccatcctcaacgccctggcgggtaaaccgctgccggtttacggcaacggcgagcagatccgcgactggttgtatgttgaggaccatgcgcgcgcgctctataaagtggcgacagaagggctgagtggtgaaacttacaatattggcggccacaacgaacgtaagaatatcgatgttgtccgcactatctgcgccattctggaccgcgtggtgacggagaaacccggcaatattaatcagtttgctgaccttatcacgttcgttaccgaccgtccgggacatgacctgcgctatgccattgatgcggcgaaaatacaacgcgatctgggatgggtgccggaagagacctttgaaagcgggattgagaaaacggtccactggtatctgaacaaccagacctggtggcagcgcgtgctggatggctcctatgccggcgaacgtcttgggctgaataaataa

SEQ ID NO: 102717 - DNA, 135 bp, Enterobacter aerogenes
atgatgaacaatgccatgagcaccagcagtccgactaacctaaaaatgatttcaattcagtgcatatacaccttccatttctacaacgtgattcatctcagtgtcgtactggccatagcaggccgacgccaataa

SEQ ID NO: 102718 - DNA, 603 bp, Enterobacter aerogenes
atgtataatcagatcctgtcgctgtatgccaaaggcatgaccacccgcgaaatcgcggctgcgttcaaagaactgtacgatgctgatgtctctccggcgctggtctcaaaggtgaccgatgctgtcatggagcaggtcgtcgaatggcaaaaccgcccccttgataccatttatcccattgtctatctggactgtatcgtgctgaaagttcgccaggatagccgggtcattaacaaagctgtgttccttgctctgggcatcaatatcgaaggccagaaagaattactgggtatgtggctggccgaaaatgaaggcgcgaagttctggcttaatgtgctgaccggactaaaaaaccggggactgaacgatatccttatcgcctgcgtcgacggtctgaagggcttcccggatgccatcaacgcagtctatccggaggcccgtatccagctgtgtatcgtacatatggtacggaacagcctgcggttcgtctcatggaaggactacaaggcggttacccgcgatctgaaagcggtgtatcaggctacgactgaagaagttgcactgcaggctcttggcgtgttctcagcaacctgggatgtgtag

SEQ ID NO: 102719 - DNA, 1029 bp, Enterobacter aerogenes
atgattattgctaccggagacactatctccgctattcatgtaattccgatggttgctattcccggggtgactgacacctgcaccctcctggttgcggtggccgatgccgatggtgtgccggtatccggtgccagtgtcaactgggcatcgctcgaccccctgacatcattttccggtgccgccgttacggattcctccggcatggcctctctgacggtggatatcaccacgctgccggccaacatttacgtgttcccgtttctcgcgtatctggactccgatctgtccaccggcgtcaccggttatcttcgtatcgccacatccagcgtgcagatgccggaagtcaatgacggaggcgattttgatatcgacaagtacgatatccagaatggcgtcaccgtgacagtcctgccttacccgaatatgaaaaacggcgatgtggtgaccttctactgggataacgtgaaatcgctgtcgcgcacggtggattcctccgatccgcagtccagtctgccctggaccattgatgtgaatacccagttgccgccacagtgcctggtaaacggcgtgtacaatcttttctatcagtaccgggacgcgcagcataattacggggtgtcagtgccacgcctggaaaacgtgaccggaggacaaccggttccgaccctgccggcagcggatttcccggaggccgatgctaacggtggctggatcaatgccacaatggcgcttgacggcaccccggcccgccttacctggtcccccatggtggttggtgatgcggtttccatgacctggaacgtgtatgaccagaatggtgtcaccaaggcttatgataaccagttgaaaggcaccgtgacacaggccgatattgaccagggttatctcgaaattctggtcccggcgtatgacattccttccggtctgcaactggggtcagcagaagcctggtacgccatgatgccggtcagcggcagtggcaagcagacttcagccatcgccaccatcggtgtggatactgcgccataa

SEQ ID NO: 102720 - DNA, 573 bp, Enterobacter aerogenes; identical to SEQ ID NO: 49122

SEQ ID NO: 102721 - DNA, 207 bp, Enterobacter aerogenes
ttggcgtgcacccgtcaatccggcacgccgggctttaaactcgcctcgatggaagcgcatactgatcttctggagatcgctcgtaaagatgcccgtctgatgctggagcgcgatattgatctgcaatctgagcgcggtcaggcacttcgtctgctgctctatattttcgggcgtgacgaagccatcagactgctgcgcgcgggataa

SEQ ID NO: 102722 - DNA, 705 bp, Enterobacter aerogenes; identical to SEQ ID NO: 45284

SEQ ID NO: 102723 - DNA, 318 bp, Enterobacter aerogenes
atggcgaaagatgtatttattttcagaaatgaaagtgatggtgtgggtaaaaagcatttcggcagagctcgtattctgacaggtaatattctcgtgattaatgcatattgctcagagtatggtcagtatgcactccattgtcatctgactcacccggaggtatccagatgctattatcatgaatatcaggaggatgaacatgctgaaataagagaaattactatcagtagcgatcggtatataaccttttactggtgtgaaacagatacgctctggtttgttgaaggagaaattaccggggcagcactttatccgtag

SEQ ID NO: 102724 - DNA, 444 bp, Enterobacter aerogenes
gtggtcagcgtcaccgtccacgacccgtccgcctgcttcaccggagtcccgaatgtccaccccgccggcagacctgtgccgctcagcgtcagcgcgccaccgctgtacaccatcatcacgctggcctctgactgccatgtcacctcatgcgacgcactgtcgtacaccccgcacttcagcgaaacatacgccgaactgccttccaccacgccgccaaaacccagagccccgctctgtaccggcgtggccagcgtggtgacctgtgtggtaccactccagggcagtgagctggccgccagcgcgttcggcgtccccgctggtgcgttgtcttcaatcgtcactgtcaccggtaccgccaggctgttatccagccccagatactgcagtgtgtactgcggggtgggaaaggccgctttcaggtctgccacgctggcggtcacgtaa

SEQ ID NO: 102725 - DNA, 363 bp, Enterobacter aerogenes
atgtccatttggctggaaattcatagtcaagatagttcaagcgacgaagtgatatttgttattgaacagccagagttacatttacatcctgcatatcaggaaaaagttgcatatctttttgcaaaagtaatcaatgcggcaaaagagtcaaagaaagacgtcaaatttatatttgaaacgcatagtcagtccatggttgacgccataggagaatgcattcaaaataaagtcattaataaagatgatgtaaacattatgatattcgagaagaataaagaatccggcacatcagcttttacggccagttttgatgatgaaggctactttactaattggccagtcggttttttctcaggtaactga

SEQ ID NO: 102726 - DNA, 438 bp, Enterobacter aerogenes
atgttctgcttcggcaacctgatgcgcgaaagcggcgtggtggatcggctgagcgatacggtgcagaacgcgctgattaacatcgtcaccatcttcctcgggctgtcggtgggggccaaactggtggcgtacaagttcctgcagccgcagacgctggggatcctgctgctgggggtgatcgccttctgcgtgggcaccgccgccggggtgatcatggcgaagctgatgaacatgttcagtaaacacaagatcaacccgctgattggctcggcaggggtgtcggcggtgccgatggcggcgagggtgtccaacaaggtgggtctggaagcggacgggcagaacttcctgctgatgcacgcgatgggcccgaacgtggccggagtgatcggctcggcgatcgccgccggggtgatgctcaagtacgtgctggcgatgtaa

SEQ ID NO: 102727 - DNA, 249 bp, Enterobacter aerogenes
gtgggcaccgccgccggggtgatcatggcgaagctgatgaacatgttcagtaaacacaagatcaacccgctgattggctcggcaggggtgtcggcggtgccgatggcagcaagggtgtccaacaaggtgggtctggaagcggacgggcagaacttcctgctgatgcacgcgatgggcccgaacgtggccggagtgatcggctcggcgatcgccgccggggtgatgctcaagtacgtgctggcgatgtaa

SEQ ID NO: 102728 - DNA, 168 bp, Enterobacter aerogenes
atgccgacaagtcaccagccccgcaagttcctggacgaggtgaggatgagtcgaagcaaacaagaatgcgccgtggatggtgtgcactgtttgctgctccatggaaacagcttaagtgctatcgaaattaccttgctgggatttcagagctcgcaacacatcaagtag

SEQ ID NO: 102729 - DNA, 960 bp, Enterobacter aerogenes
atgaataacaaagacaaaaccttaaatattttcttttcttggcaaagccaggttaccgaaaacaaaaatttcattatggaatctttgggtaaagcaagagccaacattttaaaaaaagggacaacaggcaatatcataattactgacgcaactcgaggtgaacctggaagcccacacattatctcagcaattttaaataaaatattagattgtgatgtttttgtagcggatatcacaccaatatccaaatcactaatacctggaatttccaatccaaatgtatgttttgagttagggtatgcaatagcaaaccttggatgggaaagaataatattgctatacaacacagaatatggagagataccaaaagacgttccttttgatttttccggaaatagaataacaccgttcaccaaaaacaataaaaacagtctaaatcaaatacttacattggcttttgaagatataataaaacatattgaagctgcaccacagacatcgctaaaaaactgtccaaacactcagaaagacgagaacatgctgaggtggctattgctctctcttcacgttccaacagttcaagagtttataaccaagatgcctagtgagttttcttacttagcattagatgcatatgatgaactcttttataaagtcaataacaaattattctatatttatgatgaagatattgataacgatatcaaaaaattaattgacgcttggtcccgtgcgcttggccccgttggtatttttcgtgaagaccacgctcataagcgatatgttttatgtaatcaaagcggcgaacttgaaacttatgtagatgaagtcattgaggcgagaaacaatatgaacgctgctcttgattctttattgaaaaatattagagtaaaacatcctaatattgatttaatggaagaaaccccgaaagcatggcaaagactcattgatgtccaatag

SEQ ID NO: 102730 - DNA, 219 bp, Enterobacter aerogenes
gtggatagagagttaaacgagcacgttatgattgagcgggtcgaaatgattgcgcgtctgacgacagagggtacttgtaaggaaagagaccgcgaaatcgcattgaatttaattgcggaaattgcgagaggtaactttatgaaaaacaactatttttctgttttttttgctcccactcctgttgaacagagattaaaaaaggggcgaagtgagggttaa

SEQ ID NO: 102731 - DNA, 1152 bp, Enterobacter aerogenes
atgaatgtggttgatttatactcaggggttggcggtctaagcttgggggcaacgcgtgcgggctttaatttagctggggccgttgaaatagataagcatgctattttttctcacaaattaaatttccctgagtctgcgcatctccataaggatgttagtaaacttactgctcaagatattttatctggatgtaatgtcaaagaaatagattgcgttgttggcggcccaccatgccaaggatttagttctataggtaaaggtaatgctgatgatacaagaaatgagttgtatgtacatttctttcggctcgtgagtgaattgtcaccaatttgttttttggctgaaaatgttccgggaattatgaatgaaaagtataattctgtaagagaaaaagcattttcattagttagtgaccgctacactttattgcatccgattaaagttaacgcttcaaattatggtgcgccgacaactaggactcgtatattttttattggttttagaaaggattattcaagccagctaaaggagtctgatttcttccccaaaaatattattgagcaaacttttattaaagacgccttatacggcttgccgcgaataattaaaaaagaatggcaagaagaatcacaaggttggcgaaaagtgaaaatggatagaaaaggatatttctatgataggctttggggacatgtccctgacagagttggagatgccgaatctttaaaaaaactagaggatggtctggtatcaggattcttgggcacagtccactcagacgaaataataaagagatatggcagtctttcttttggtgaaacagataagatttcaagatctcagcgacttgatcctaatggtttttgccctacattgagggccggaacaggtagtgacaaaggaagttatcaagctgtcaggccaattcacccgacgcaagcacgtgtcattgcaccccgggaagctgctaggttgcaaggttttcccgattggtttcgattccatcctactaaatggcatagttttagacaaataggtaatagcgttagtccattagtttctgaggctatgctattacctatctataattattgcttaactgttaaaaaagaactttcgaataccatggtactaccttgtagtattcgataa

SEQ ID NO: 102732 - DNA, 993 bp, Enterobacter aerogenes
atgagcaccggtggaagtatcccatatcatttaaggcaaaataaggccattgaaaggaacctgtttatagagtccttgagaagattgaataattataccaatatatccgagtatgaatatatcggttttggagggccattccttgaagattttaaacaggttcataatcttttaaaagtgaataagatgatatctattgaaggtgatgaaaatgtatatcgccgtcaacagtttaataaaccactatcatgcatagatctaggggaacaacctgaaatgagtggtgatttcatcaatcgctataattttgatgaaaaaaccataatttggctagattatgcaatgccttccgaactcaatgctcagttgaatgaaattgttaatttaattactaagttaaaaccaaaagatatttttaaagtcacattgaacgcacatcctgaaacattaggcaaagatccgggtgagcgagacccaagaccctatagatatagaaagataaatgaaattttaactgaaagttttatgccagttgacactaccgaagaagatgtcggattaaaaaaataccctacattactgattaatgcattgaagcgagctgtcgggaatggtttaaaagggcgtaacgatataagaattcaccctttaacatctttcgtatataaagatggacaacaaatggtcactttcacggcaatcgttttagataatacagacgaagaggaagctaaatttattgatttctcgagaataagaaattggccattttatgctggagaatggcgaaaaccaaaagatattaacgttcctgcaatgtccttaaaagaaaggattcatattgaatcgttattgcctgaagctacagttgagaatattcatgaagaattaggcttctatattggatccagtacagctggagccaatatagaccttaataactttatcgaatactacaaggtagtaccatggtattcgaaagttcttttttaa

SEQ ID NO: 102733 - DNA, 1425 bp, Enterobacter aerogenes
atggattcgtcaaacgttaaaatcacagcttttccagccaaaagattttttgtggaaatgctaactcgagacattgagttgtctgactctatattggatttattagataactgtttggacggggtattacggaagaacaatttcacacccgaacagacctttggtaaatcagatgtatacaatggttaccatgcgcacattgagtttgacgaaaactgcttcaagatagttgataactgtggtggcattccaggagagcttgcggagaactatgcatttagattaggcagaccttcggaaagggaagctgaagaccttcctaccattggtgtatatggtattggtatgaaacgtgccatatttaagatgggaacatcagctcaaattaaaagcaagacagacacggaacaattctcagttaatatatcacctgagtggatggctgatgacaataattggtcattagatcttgagagaagtgatgtagatttaagtgaaacaggtgtcagtattgccataaatgatctaagaaatgacatcaaggcttcattatcaaaagaccgcgattttgaaagcgatttaataaacattattgctaatcactacagtttaataatcaagaaaggttttgaggttaagattaatgggaaggttgtaaaaccaaatagcacaactcttatttttgacgagagctctattaaggataatacggatggcatagccccatatatatataaaaacgaatctaatggtgtttcaataaaggtagctgttggtttctatcgtaatttgccaagtgatgaggaagaagaacaattattgtcaggtcgttcaactacagaaaaagcagggtggactatcatctgtaatgaccgtgtcgttcttcatgctgataaatcaaaattgactggatggggagaggcgggtgttcctcaatatcacacccaatttattggtatttcaggtgttgtgatatttacatcttcaaaagctgaactattacctataacaacaactaaacgtggtgttgatggtaattcagaactatatctttccacaaaagacttcatgagagagggactcaaattctttactgattttacctataaatggaaagctaataacgaagaaagaaagcagcttataagcactgcttcgaatatggtatctacgactgaaactgatttcgtaaaatcaattccacaggaaaaatggtcgacagtacggcgttctatcggtggtcaagtttttaaaccaaaacttccgatgccacgtgaaaccgatcctttacgtcagataaagtttagccgtcgacttagtgaaataaaatcagtttcagaattcatctttgatgatgcgactcaaccaccaactgaagttggtcaatattgttttgatgaatatttaaaaaaggctaaacaatga

SEQ ID NO: 102734 - DNA, 2067 bp, Enterobacter aerogenes
atgacagcaaaatattatgccattctgaccaatcagggcgcggcacggctggcgaacgcgaccgcactcggcactaagctgaacctgacgcaaatggccgtgggcgatgccaacggcaaattaccgacgccagacccggcacaaacagcgcttatcaaccagcagcgcatcgcgccgctcaatatgctgaccgttgacccggccaatgccagccagattatcgcggaacaaattattcccgagaatgagggcggtttctggatccgcgagattggtctctatgatgatgatggcgtgttgattgccgtggcgaactgccccgaaacctacaagccgaaactggcggaggggagcggccgcacgcagaccattcgcatgattctgattgtctccagcacgacggccatcacgctgaaaatcgacccgtcggtcgtgctggctacccgtcagtatgtggatgatgcgcttgaggaacatgccagaagccggaaccaccctgacggcaccactaaggcgaagggttttgtacaactcagcagcgccactgacagcaacagtgaagcgctagctgccactccaaaagcggtcaaagcggtaatggatgttgccagtgcggcgattaaatccgtggataacctgaaacctgataaaaatggcaatgtggacaccgggcagggagattccgcgcagccagtcattaatatcccgcctctcggcaacgggaatggttcatatttaaaaattgccacgataaaggattgtggttcgagttcgggatattttcagattagtgttttcggcagcggaaattatggacgcccagggcaaagcatagagaccatcacggtaagttgccgtggtatcgctaatatgaagtcaacaaatgctgactactatataaaccataatgccataaataatggttctgattcaccgctcaggattgccgctgccccgactgcaaacccaggtgagtttcatgtttatctgaatgcgtcaggcggttggtgggctggcgttaaaatgcgggtggatgcgatagctggcgggggaaattatatcaccggcgcggtggttgaccgttatatgggggctaatgcctgggccacggcaaaaccggctaattcatttctcgctacaagatctgcctttcttaatagcggggatattggcaccagtggcgcaaaaataccccggctgaataccgcgaatacctgggcgggaaaccagacattttccagcgacatcagcgtcggcactgcggaaggtacctccgttattaaccttggtgagtcttcgcagattatccgtgataacagcaagaaggggctgattatcacaagcaataccggaacgctaactgacgcgggctctggtatttatttacgccctctcggtagcaccgatggcaatatggaaatgcacgggaacagctcaggctggaatacagggaaaatgaccgttggcacgttgaccctcagcgatgccctcgctatcaccaatggcggcacgggcgcaaaaaatgcaaaagatgcctgtattaatcttggtctgggtgaggggtcggcgttgccgattggtgtgcctgtaccgtggtcaacagcgaccgcgccggatggctggctaaaatgcaacggcgcgccctttgataaagcgaaatatccggggcttgcggtagcttatccctcagggaaattacctgatttgcgcggtgagtttatccgtggttgggatgatgggcgcggggtagatagcggtagggggttattagcctctcaggatccattagtcgcagggcatactcacaaattagacagaatgtggtcgtcatcagatgaaacgggtaatgccgccaagcatttgggtgtatccaaaagcattcacaacacaacgaaagataatatgggtaatgggattatcgaggatgttgatagtgcgttagggattgtaattgggtacggtcagggtggaaattttacgtctacaacggcgataaaaagcaatacaacctcgacggacaacaggccgcgaaatgtcgcatttaactacatcgtgagagcagcataa

SEQ ID NO: 102735 - DNA, 705 bp, Enterobacter aerogenes
atgagtaaacgaggggacttaatagagttatcagcagtatcagtcgctaagtatggtcttgtctactcagaaattctggggtggattgacctcgggcatgctgcaggcacagacattcaaaacattctcaaacaaatggagcaaggtgaaaaacgacaggattcccactatgaaattgtatactctcaatcaatgtacaaatttggccacagaatgggcatgggtgtgcatgcgcgctggagagtcatgaaaggaagaaacctggaatcaaggtacagtattgctttagctatgatgatgcgaacagcattacgattcgaaaacttgcaggcatccattccttttagttggacaacagacagcggttttagcgctgaggaccttgtttcggacttattaggtttttatcgagtcgtgcgaccaatgaactatttcccgcacctgtgtttaattagtaagcaagaggccttaaagcgatgggttcactatggttcaattggtaactacaaaaacaaactgtttcgaccaatgctcttccctgaccccatcaaaaacaaaggagccaggccaatatatggcgagttgcccgcattcatgaaagatatcctcccctataataatttcaccaatggcgcagttaacatcatcaccaataatggaagccatatgaacattggtctgccaccaatgaagggactccgatga

SEQ ID NO: 102736 - DNA, 360 bp, Enterobacter aerogenes
atgcagaacacaacacctgtagcaaaccatgatattgccgaaccctggtggggacttaaacccaccgtcacgccgtgtcttggcgcacggctggtacaggaaggcaaccggctgcattatctggctgacccggcaagtatcaccggaacattcaacaatgaggatttacgtcatctcgaccaggcgtttccggtattgcttaaacagctggagttgatgctcgtttccggtgagctcacctcccgctatcagcaccgcatcacgctatatcacaatagactgacttgcgaagctgacacactcggctcctgtggctatgtctgcatcgctatttatcccgaccagcctgaaccccattaa

SEQ ID NO: 102737 - DNA, 396 bp, Enterobacter aerogenes
atgacccgcaacactctgccactcttcaccccggaagaaagcgttccgcttgcagcgcaacatcagattaacgccacgctcgtacctgatgagcaacgtatgggcttctgcgcagactacaacggcggtatctggaatttttatactctcagcaacggcggggcgtttatggccccggaagcggagaacagtgagtcgtggtcgctgttcaacactatgaacggcaacggcggtgaactcagtgccgaagctgccggaatagccgtctgtctgatggcatacagccaccacgcctgccgtaccgaatgcgacgccatgacggagcactactaccgcctgcgcgactatgcgctgaaccacgcggaatgtggtgccatcatgcacatcatcgactga

SEQ ID NO: 102738 - DNA, 234 bp, Enterobacter aerogenes
atgcaaagcattgacgactcaccgttacctcccggttcgttcccccgtgaacaggcagaggctgtggtggcggtttacctcaatgttgctatcgaagacgaccagggtacacattttcggctggtgattcgggacagcgaggagcagttgatctggcaagcgtggagttttgaagccagcgccggggcatggcttaacctctacatcgccagccacagaatatcccaaccctga

SEQ ID NO: 102739 - DNA, 1449 bp, Enterobacter aerogenes
atgaaagaatttccattcaatgcttttacaggactattgcgtgaaactatttttaatattgaggatcatacgcagtcaccgccggaaatgattgcatccgcagttttaagtgcattatccctggggtgccagagcctgattaatgtaaagatcaatgacactttagtatctccggtatcattgtattcattcgtgatagcagagtctggcgagagaaaaacgacggtggataaactggtattcaagccttttcatgagcatgatctacgtgtattactccagtatgaagaacagcaaaaagaacatgagcgctgctctaaaatatggcgcagaaaagaaagtgcactcttgaaatgtgtcgataaagccactatgaaaggaaaatgtacagatgaattttcactgcagttaaaggcgttatacgctgaaaaaccagaaccaccaaaagccagaagatttgtttataataataccacaccggaagccctgcagtttgcaatgtacactcagtcgccgcaaacaggactaataaccgatgagggagctaatatacttaacagacagaccatgactgactttggttttattaactcaatgtgggatgggggatgttttcaggtcgaacgtaaaacaacaccgagttttacgctcaggaatggacgtattactttgttggttatggtacaaaaagctatatttgatgattatttaaaacgtaagggcgaaagtgcacgcggaagtggtttttttgcacgttgtcttatcttgaatattgatgagaatttatcgacacagggccagcgtttgattcatcgtcaatccggccctcagtctggtgacctggagaatcttaattccttctaccaacgtatgaatgaactggtagaaaaaagtgcttttcaacacggaactgggcatcagacatgtttatccttcgaacctcaagctcaagaagcatgggtgagaattcacaataaaatagagcgtcgcctggggccagagggagactatgaaaactcgaaagattttgcatccaaaatgtcgaataataccgcacgcctagccgccctgctgagttactggacagagggggaatgtgcgataaaaaaagaatatgtcgaaaatgcatggttgctgtgcgaatggtatatgcaacaggcagtaacactctttggcaatgaggggggctattatgaagcactgttattgtcgtggctacgtcggcagtattcacgctcatggaaagatgtagtccgatataatgatatccgaaacggcggacctaatgtgttacgtaagggaatgttactggacagggtgattgacagacttgaaaaggaagaggtgatagatattgattattcaaaatatggtgcccgaaaggtatataaaggtcgtcactttgataacaatccgtttacaaaacatgcagcctatcagcactactga

SEQ ID NO: 102740 - DNA, 936 bp, Enterobacter aerogenes
atgctcaagtatgcccaagtatttgactcgaaaactgcgactcaatatatgggccgcactgaatcaagctacgaaccgagcagcatgcgttttatatctttgctcattcagatatcaggaatggtttctgagcaattaagccgggagaaggaaaagcttgtccgtgctcttccatttttcccaagtgaccttgcagataccgctgaaaatgcttggttctcctctcttaaagcatcaacctcggctgagaacattgagtcgttttgccaatatggaaatgatttggaagatgagcgtatcaaaggtgaagctctgttagcagagaaagacatcaaagggcgcttgattgcaattgctaaggaagagatagcctcagaaaacgttaagcaagccatgagtctattgagggaaggccttgcggatggcaaagccgaggagttgtttaaggcaaaagacttggctgttgcagcgagaaaggctgccaatatagttgcgcagcaggcattcgcaactgctcctctgcaaggcgttggcgaaacggcttggaaactaatgtgggatcaagcgcgaaactactctattgctcatgcttaccatagtcgcgaatttcccgttactactggaggcgcgtattgcgtgctttgccaacaggaactcacagaggaaggttcagctcgactcaaaagttttgagtctttcgttacagctggcttagagaccacggcaaaaactgcggaaaccactagcgcagagctcattgcgaaggtggttcagttaccttctatagaggattggattatttttgacttttgggcagcccagggagacgaagccgattttcggctggtgcgtgacattgctcatagcttaaaaaatgttcatttattggaatggtcagggcaggaattctacagatctttgcgaaaaagagtatag

SEQ ID NO: 102741 - DNA, 123 bp, Enterobacter aerogenes
atgtggctcagcccccgcctgccaattgatttctacgagtttaccgtcgatagtgatccgacattgagcactgcatgtatgtacctcgttgttgaatacattggggcggatttcgtcccttga

SEQ ID NO: 102742 - DNA, 153 bp, Enterobacter aerogenes
atgtctgaattagcacaagaatctatcggaactaatgacttcgaaaagtggctgaatgaacgtaatagctggcttcaaacggcagcaaaacaacttattgataacaaacgtttaccaagtgaggtcgaacttgctgagctggttcgactctga

SEQ ID NO: 102743 - DNA, 315 bp, Enterobacter aerogenes
atggatgttactgaagacgccttactacgttctggctttactcaatctgatgtacagaagataaaaaacaacattgaaagctatggcggcacgttgggagaggcgattcaggatctagctaatcgattcaggatagttctttggatcttttgcgctttcacagcaatgtttctctgggtaattatttcaaatgaaatagaatacatcatatcaaccgggatcggtttattcatagcaatgctgattgctgtttttgttcaaccgccagtcctttcttacaaatcctggcggttctggagaaaatacaggggctaa

SEQ ID NO: 102744 - DNA, 807 bp, Enterobacter aerogenes
atggatatcgcgctgcttaataggggatggaacagaacatggtcagataccatggtaaatctggaggcccggaaactcgtcgaaactgcaaatcggctgtcagcattctatttgcaagatggtcttacacgtatcaagtttgtcgaagagataaggcaggtcgtagagaaagaatttgaaactgcacgacgggccaaaaccgatgaagaatgcattgcatgcattaaaaatctgcgtgccgaaacagacaatctgcaagaacaagaacgcctgttaagaaccagagccgcacaactttatgcaaaggtcgagtttgtcagggaaaataacaagataatcgggtatgtgatttcggctgtgaatgtggtgctttcagggatggttttctacggcggaatgatcatgatctcgacgatgacccctattggagtccttgctggtgcaatcttagttgcagatggcgctaacggtataactaaagaagtgaataaatttttatctgaaggacaatctaactctgaaggtgtggtcgctgacaaagtgattaatattgctcagtttatggggtttaaggctgaatctggtctggctttttataacactctaacactaagcgcaaacatctacagcattgttggattagcgcgaaaagcaggtgcctggcgattgttccgttggcttccccacgattactaccgtaaagtcaacacaatgagccgccccaagttaactatgaaaatagtaggctacggtatcaaggctaaggttatttttgacctgctttccaccgaaacaccgaatcattag

SEQ ID NO: 102745 - DNA, 213 bp, Enterobacter aerogenes
atgaaaggttatgtactgatactctgcggtttgttgtcgtcatttaacgccagcgccggacgcataactatgagcaacccggagcagtcaaccacggcgaacgggcaaaccctgtgcatatacagcaacagcatttacacctttacctacgtcaccaagtcgaaacactgtccgtacagcaagagctttgacacatccgacgatgacaaataa

SEQ ID NO: 102746 - DNA, 183 bp, Enterobacter aerogenes
atgaaaaaaattattgggttgtctctggtgttctgcgctttctcatccgtagctagtggagcggtctcgggcgaaatacagccatatcctgattacctgtctgcctatgtcaaaacgcttgttactgccgggtgtaaacaggcgctgaaaggcagttctgaggatgcactgatacctgagtaa

SEQ ID NO: 102747 - DNA, 2973 bp, Enterobacter aerogenes
atgagtacgactgaaaaccaaattgagctagaccttattgccaagctggctgagttaaaatatacacttcgacctgacattcgtgatcgtgcttcactcgaaaaaaacttccgggcgaagttcgaggctctcaatagagtgcatctgaccgatagtgagttccagcgtttgctcgatactattgttacacctgatgtatacaatgccgctcagacactacgcaatatcaatagcttcgagcgcgatgatggaacaccgctcaactatagcttggttaatattcatgactggtgtaagaacgacttcgaggtcgtgaatcaattgcgtatcaacaccgagaacagccatcatcgctatgatgtgatgcttctcataaacggcgtaccagtagtgcagatcgaacttaaaactctgtccgtcagcccacgccgtgcaatgcagcaaattgtggattacaaaaccgcccctggcaatggttacggaaagacactgctatgtttcattcagctcttcatcgtcagcaaccgtactgatacttggtacttcgctaacaataatgcgcggcatttcagctttaatgctgatgagcgcttcctcccggtttaccaatttgccactgaagataacaaaaagattacccagctagagagctttgctgacaagtttttagccaagtgtactctggggcaaataatcagccgctatatggtgctggttgccagtgaacagaagctattgatgatgcgaccttatcaaatctatgcggtcaaagctatcgtcgaatgtattcatcagaattgcggaaatggttatatctggcataccacagggtcaggcaagacgctgacttcgttcaaagcatccactttgcttaaagataatccagacatagaaaaatgcctttttgttgtggatcgtaaagacttggatcgccagacccgggaagaatttaaccgttttcaggaaggatgcgtagaagaaaacactaacactgaaacactggtgcgccgacttttatctgatgactatgctgataaggttattgttacgactatccagaagttgggtctggcgctggacggaacaaataaacgtaactacaaagagcgtctggaaccattacgagacgcccgtatagtatttattttcgatgaatgccaccgttcgcaatttggcgaaaatcacaaggctataaaagaatttttccccaacgcccagctttttggcttcacagggacgcccatctttgagtcgaatgccagctaccagcaaatcgaaggccagcaagccagcctacgtaccactaaagacttatttgatcagtgtttgcaccagtacaccatcactcatgctatcgaagatcgcaacgtcttacgcttccacgtagactatttcaaacccgaaggaaagaatccacctaagcccggcgaagggataactaaatctaaggttatcgaaaccattctttccaagcacgattctgctaccaacggacgcaaatttaacgctgtactggcgacagctagtatcaacgatgccatcgaatattttgaattattttccagtattcagataaaaaatgcggaaaaagatgctgaatttcgatcattgaacatagcatgcgtgttttctccaccttctgaaggtaacaaagacgttcagcagatacaggaagatctacctcaggagaaagaagataaccagcaagatcctgaaggtaagaaagctgcacttacccggatcattgccgattacaatgaccgtttcgggaccaatcatcgcataagcgaatttgattcttactatcaggacgtacaaaagcgcatcaaggatcagcagtaccccaatacagacttatctgccgcgaaaaaaattgacatcaccatcgtagtggacatgttgcttacaggatttgactccaaatatcttaatacattgtacgtggacaaaaatctcaaacaccatggtttaattcaggcattctcacgaactaaccgtgtactcaacgataccaagccatacggcaacattctcgattttcgtcaacaacagaaatcggtagaaggtgccattgcgctcttctctggtgagcaaatcgataacccgcgtgagatctggctggtagatgccgcgcctaaagtgattgataatctgcaaaatgccacgctaaagctggccgagtttatgcaatcacagggactgaataatgtaccggaagaagtagccaaccttaaaggtgatgccgccagagcgcaattcgtaaacctgttcaaggatgttcagagacttaaaacacagcttgaccaatataccgatctttctgaagagcagaagcaacagattgagagcatagttccgccagatcaattgcagggatttaagggcgtatatctagaaacagccaaacgattgaaggaacaacaggacaaagatcatacgccaccagaagtgcaacaactcgattttgagtttgtactctttgcctctgcagttattgattacgactatatcatgggtctaattgctaacctgactcagcaaaaaccaggcaaactcactctgaaccgcgaagaactcattggcctgatccagtctgatgccaagtttatcgacgagcgtgaggatattgctgaatatatacgtggcctaccaataaatgaggctttaaatgaacatcagatccgtattggttttcaagagtttaaggctttgaagaaggcgaaagaactcaccaacatcgctactcgacatgaattagcacctgatgtcttacgagcttttgttgatgaaattctgcgtcgtcatatctttgatggcgagcgactttccgaattaatggctccgctgaatcttggctggaaggtgcgtacgcaaaaagaactggcattgatggatgaactaacaccattactgcataaactatcaaatgggcgtgagatcactggtctatcagcatatgaggacgaaagataa

SEQ ID NO: 102748 - DNA, 153 bp, Enterobacter aerogenes
atgttaacgaaccaggcggccgggccgggtattttcccgcaggcggtgcaggccggggaacgatcggcagccccggtaagcgcagcgccaccgggggatgccatcgtgtctggccacaaaacacaaaaacaaaaggcccagtcttccgactga

SEQ ID NO: 102749 - DNA, 699 bp, Enterobacter aerogenes
atggcaatttcagaaaaagcgataaagattttatggtctaatgctgctggtatatgttcttttagcggttgcaatgaaaaactttcagtggcggaggctgctgaaggtgccccatatactattggggagatggcacatataaaagggaatagaccaggttccaatcgctatgacattgaacagcctgcttctgaacgagatagttacgagaatcttattttactctgtccaacccatcacacattgattgataaagttgaaaacgttgatagatttagcgttgaaattctccatgaaatgaaaagagaacatgaggtgtcgatttctaaccgattagctattattaaatttgagtctgttgataaactgaaagaccaaatttctacatacttagctgaaaatcatcaaagttgggaacaatatgggcctttatcggataatgctaaaaagaatcctaacagtgagcaaatttatgccgtatggacatctgaacgcctctcaataatcgttcctaataatagagaaattgttaaaattctccaggggaatagagagttgttttctcggaacgagcaaagattagtaagtaaatttattcaacatgctgaaagctatgaaagatgggttaatgatgaaataccttataacgccatacaaagatttccattagactttgaaaccttaattttaggagagtaa

SEQ ID NO: 102750 - DNA, 411 bp, Enterobacter aerogenes; identical to SEQ ID NO: 82131

SEQ ID NO: 102751 - DNA, 1086 bp, Enterobacter aerogenes
atggcatttcagttaaggcattgtgttatacacgaactagtaaaagaaagtggaaaacagcgcgttgaggctattattaagcaggttctgcctacagatgacaaatatgtgcaggaattagtaaaatctctgaatgacttaattggaaaaaaagaaaaccaagcagcaagaggtacttttgacattgaggatcctacttacagggtacctaatgctttccaagactattacaacggtaaggcagagcctgattcatttcatacattttcaactgtgtgtatgaacgaacttactcggcaagcaaaagacccttcgagagttgccgcatccggtggagcaatagtatttgctcattacacaagtggcacctcaaacttcatgcttattacaatggttaagcaaaaggaagctttacggctagatgaaaatttaaagcccgtcgggatcgttcaaatagacatggccaagatacatcaggctgcaagggtaaattttgatagatattatcaatatgaaacattaccggaagaagaaaaacctacgtatctcgctttcgtcagtcctaaaataaatcaagatgcttcggggtattttgtagcagccttaggatgttcagatagtgttccctctgctaaagccactgatggcgcacttaatggggttaaacaatacttcgaagcgaataaagaattaactgcgtataaaaatcaagcatatgatgctgtactcaattatttaacattaaaagaagatggtaaattagcatctcttaccgaaatcgaccatgcagttagaagtacagttcctgcagataagtatgaacatatggataactttataacctatcttaatagtgaggaaattggactaccgttagagttttctattaacagagctgtgctcggtagacgtgcgaaagtaaaagctaagtcaaatgggtgggagttaaactttgaaagacgattttttggtacagctccaggatcagtaatccagtataatcgtgcagataaaaaactgataatatcgaagctagacgaaaatatcatacaaaaattagaagctgttcttaaagagagagggtaa

SEQ ID NO: 102752 - DNA, 297 bp, Enterobacter aerogenes
atggaagatttctacatttcagcaatcaaaatggacagcaacaatcagcatattgagttcgtaaaaattcatgagaacctaggtaagaagatcggacctggcactgttaattcgcgtgcattcgttggtgaactgatcagaaaagggaaagcagaattcaaaaccattacttacaacaaagaaaaaaaatcatggtctgtaggggcaaaggttgaagttatgactgatgatttcattactaccgatccaaacaagactaaacatgacaatcttggcaaccttcctacatttatctaa

SEQ ID NO: 102753 - DNA, 726 bp, Enterobacter aerogenes
atgcgctggtcgctgcctgaacgtcttggctcctttgccctaactgaacaggatcacattctgctgatgggattcacgacaaggctggctttctatgatctcaacagcggattaattaccccagtggctgcttcactgggagacaccggcacccgtatgggtgatggacggtgcgaccgtgccggtaattttgtcttcgggacgatggatgacgattatcccgttaaagtcatcggtaagtttcatcgactcaatgcggcaacgctgactgttgagacgtttgcatcgcccgatgtcgctataccgaacagcatctgtttcagccccgatggtggcacgttctattactgtgactcgatgcagggtcggattatgtgctgcgattacccctcgctgcaaaaccagcgcgtgttcaccaaaatcgaagacggcggcgcgcctgatggttcctgcattgatgagcagggctatctgtggaacgcagaatggggcggcagttgggttgtccgatacagtccggtgggagaaatacacagcattctttctgctccagccctccagacaacctgcccggtgcttggtggttcgtcactccacacactttcatgtaccagtgcccgggtaggactcgcagagccaaccgcttatgacggtgcgcttttcagcattcggtcacctttttttgccggattaccagaaagccgttttgcagcgcacaaaatataa

SEQ ID NO: 102754 - DNA, 2661 bp, Enterobacter aerogenes
atgaaaatgacatttcagcagagccagcaggtgcgacatgagcgttttgggctggggacgatagagctcctgcgagaaaataccgcacttattcgtttcgagtcgagttttgaagagcgtccactttccgaactggagccggtacgcagcgctcaggatgctttggcagaaggaaattacgacgatctgcgtgaagtcctggcgcgcagtcaggcgcttgcgatccgctccatcaatgatagttggggggtattttctacttcacgtatcaatctgttgccgcatcagttatgggtatgtcatcgcgtgttacggcaatggccggtacaaaagctaatcgctgatgatgtaggactggggaaaacagttgaggcggggctgatcctttggcctctgctggccaagaaacgtgtgcagcgcctgttagttttggctcctgcgtccttagtgccgcagtggcaggagcgtttgcggcagatgttcgatattcggttgtccctctactccgcggaaattgatacagagcgttctgattactggaatacgcatccctgcgtagtcgcttcattgccgacgctgcgaaaagatattaatggcaggcacgagcgaatgctcaaagcagacgactgggacttgctgatcattgatgaagctcatcatcttaactcgcttgaagactcgggtgcgactcagggctatcgatttgtgcaaaagcttatcgatcacggtaagtttgcctcacgactttttttcaccgctaccccgcatcgcgggaagaattacggctttttcgcgctgttgcgattgctgcgcccagatctctttgatgtgaataagccatttgaaacccaacagcatcatgtccgggatgtagtgattcgaaataataagcagaccgttacgaatatggacggtgagcgtttgtttaagaccgtcagcgtggcttcacagacctatcatttttctgaggctgagcagttattctacgaccggctcacacgatttattttatcagggcaagcctatgcttcgtcgctgacctctgcgaaccagcaggcggtacaactggtcttaacggcgatgcaaaaactggcagcaagctcagtggctgcaatttatgctgcaataaatgggcgtatcgccaggctcggggaaaataagaaaaagctacaggcgttgagtgatgaaatgacggctatcctgagtgattcccaggctccggatctcgatgatgtctacattgcgcttgaaagcgaatatgttgaaatgtctgcttcggttcaattaatgcagaatgaacttcccatgcttgaagagctgcaggagcttgcggggaatgtggaatcggaaacgaaaatccagaccttgctccaggtgctggaaaccacgtttcttaatcgcaccgtcgtattctttactgaatataaagctacacaggctctgctaatcaatactctgaatgctcgctttggctatggttgcgtcagctttatcaacggcgaagggcgtctggaagggatctacaataatcagggcgtcaaaacgacatggagtatggatcgctaccatgccgcggatcagttcaaaaatggacaggtgcgttttattgtttgtactgaggcgggtggtgaaggtattgatttacaggacaactgttattccatgattcatgtggatctgccatggaatccgatgcgtctccaccagcgcgtagggagactcaatcgctacggccaaaaacatcaggtggaagtcattactttacgcaaccctgataccgtagagtccagaatatgggatttgttaaacagcaaaataaccactgtcatgcgctctttgggtgatgccatggaagaaccggaagatctgctgcagcttatcctggggatgagtgataaagggttctttgattcgcttttcatcggtggacttaggcagaaatctgagacactgaaaacctggttcgactcacagacggggacatttggagggcgatcggctgttagtgtggtgaaggggcttgtaggacatgttgataaatttgagtatcagaatttgcaggaagtgccgaagcttgacttggggaatatgtacggcttcctggaaaatatgctcaaactaaatggccatcgcctggagaatgaagacaatgttctaagttttgttacaccaaaggcctggattactcagtttggcatcaaaaaaaaatataccaacatgacctttaaccgagtttcggcggacaagactttagacattcttggggtggggcacgtcattttgaacaatgcgatagctcaggctgagaagtttaattcatctgtagctgtagccaagggaatttctgccccgctgcttatttatattttacgcgatcagataactggtgacagtactgtacagtcttttactgtggtgggggtgaggcttgaacatacgccaagggttctgatcaacgatgagctagttcatgagcttgcgctgatttatgacaatatgcctaaaggtacatcggttgtaaaactggaaagtgcctatcaaatcaaccctgaaaatgatgtcagaactgcagaacaggcactagaaaaaacaattccaatgttaaacttaccttatgaaaaagtgagctggagccacgccgcaacgtttttacctcaataa

SEQ ID NO: 102755 - DNA, 7509 bp, Enterobacter aerogenes
atggctaaagcgcattccacgccgctcaacgacattgcgattatcgctgcgaatttaaaagaccgttataaaaatggctttcctgtcctgaaggaaattgtgcaaaacgcagatgacgcacaggcgtcatcattaatctttggctggagctcaggcattgccggggcagatcaccctttattgggcgaccctgcgcttttttttatcaataatgcgccgctgacactcgacgatgtcgaggggatcctctccattggcattggcaccaaaccaggtgacaacaatgcggtggggaaatttggccttggaatgaaaagcctgttccatctcggggaagtgttcttttaccaggcttttgactggcatgacgaatctgctaaatccgacgtctttaacccctgggacagctacagaccttcctgggcggaggtgagtgagcaggataaagttcgccttgaggatgaagtccgcgcgatcacccaacatgagtgcgatggttattttgttgtctgggttccgctgcgttcagagagcatctatcaggcccgccaggatgacgaaaattatattattgtcggtgaagactatggtcatgaggtgcctgattttatcactgacccaggtctgggggataaactcgctaacctgttaccgctgatgaaaaccttgcaggacattgagctggtcgtgaaaacagggcaggggtatcagcgtcaaatacatatctcgctgcctgaaaaggctactcgcccacaatttaccaatcttaatggttctggggaatggcaaggccacattaccgttcagcgtgccggattgcgggaccctcagcaaaaattctacgtcgggcatgaggttttgctggatacgcctgagttttctgcgttgaaatcacaacgcacctggccattcagttattcacgagaaggcaagaagacagcggataaagcgctgcctcatgccgcggtggtgatgctggcggagaaagtacctgaaggggaagcaacgctgacggttgaatgggccgtgtttttacctttaggcgagcaggacaccgcgcagcatgctcagaaacaaacgttctctcttacgggtcagtactcgtatcaaattattctgcacggttactttttcatcgatgccgggcgagtgggtatccaggggctggctacactcaccagcgccacgccgttattcatcgccccacattcgccaggccaggaacagttagttcaggaatggaaccgcagtttggcaactcagggaacgctgcccctgttaccgaaagcgatttcctctctgatgttgcttattcacgctggatatgcggaaaaagcggcaatttcagatggtgtgcgtagagctttacgcagcaataatgcctggctccactgggtaacgttgtaccatctctgggtatgcgaactcacgcgggatggaagtcagtggtgtttagttgatgcgaacactcccgttcgtttattgcctgccaccccttcaggtgaagcgcaccggccctgggaagtgctgcccgctctggaaagcctgggtgtaacgcacagatttatcgatgaaacgcagcagaatatctacaacgaatttaaaagtaagtggcagttatcggagatccaggcgttgctacaggccataccgtcaatggtatttacggtgcctaagctcacgaactatcttaatcaactgcttaaagcgttgccgattgcgtcggataattatgcccgtgacctgattttgttgctcagaaaaacgttttctggcgtaccgctggtggagctttcacgtaaccaagcggcgatcggtgaattgatggcgctcattcgtccgacctggcgttacagaattgccattgaccgtcaggagcaggccctgtgggaaacgctcgggcgtactgctatggagacgctgctggttcctgcttttcttgataacagtaaagagcccgccagtgcttctttgaactgggagactgtcggaagtttactgcaggcgatgcaggcacaagcatctgccagcgacgattttgaaaaactggtgcgggattttattggcaaactctccgctcccgatcgacaggaactgtaccgccggtttgataccttgaaaatctttaaggtctcgcagccaaccggtgtgccataccttgaaacgcgtcgccatctgctcaacttaaaacaaaaatgcagaatcttcagacgtggaggaagcgctaactttggtatggggttaagcgtattgttgcagcaggctctgctcgaaaaagaagtcgtgctgatcaccaatgacattaaccagaccctttttggcggctctgaatattcagaagcgcaggagtgtgatagcgcgggtgtggtccatttgcttgagcttcatccggatctggattcgccggtaaaacgcatcggtttactcaacaaaatggccgcggacgcggacaaatttagcgccggagatcggcttgcctatcgctatctgatgcacggtaattcggctgatactggtgaagctgaattgtggaaggcgggtaaagcgcatcccgtatgggcaaaaatattgtctgatgccgattcagagctcgttaagtggacaattatttcgccagaaattgagcagaatcttgggctgactcccggatttgagaaggcgctcaggttggatagcgtgacaccggaacacgtgatccgccgcttcaaagaaagccttaaatatctggagtttgatgacttatctgcagaagatgcggaagaagttctgatgcacattggtcgctctatgggcgaaacaatgtggcggcagatggcgcttcatcgcagggaaggtaaagaggggtatatatcccttgatgagcgttgtttcttacgtgggggacgcattgaactgcccactgaattgaatgacaacgtgacgttcatccaatccgccagtcagccagaagtgcaggagcagcagcgcaaatatttgccaatggtgaacgctgaacatgcggtcatgttggctttatccgagccgaacccggtacgatactgcgattttatcctgcaactgttaatgcagccgatgaatgacttgtcttcagagagagcattcaacaacctgtgccacaaaaaatggcttttgcaccgtggtgtcgcgatagcgccagaaaatattctggatatcagtgcggcagactatccggagatagcaaagctgacagaagcgacgcctctcatagcgctgcttgaggatattgttctaccagatgatgctaaccgtgcagtgagtccattgattgtgcaaggtaaggctgcgttttacaaagcgctcactgtggctggtacacttcctctttatgctatcggcagcagtttgcgtctctcagatacgattattcttcaggccagtgatagatcttacgcgtttgagaactttgaaggctggcggcttttaattgaatgcatcaaaggcgcagggtcgcttgagggtaatgaggccatcaatgcgctaagttttgcgcatccggtgactgacaagatagtttccagctatcggcgtctcgtcgacagcatgaatccaacccaaagcggtgaattgcgtaaagcgctgttaagttcgctgtgtcatacccattcagatcccgccagcgtattgcgttcaatctcgctcagaacggctgctgatacttgggcgttagctgcagacctttgttatggcgttacgggcgcagagcgtagtactgttttacatgaggacgactgggcgaatttgcaaggatggctgcaggcaaatgatctgccgatagacaatgctgagtctgaagggcatctcaatcatgtggagtattctgccagtgtcttaagggattactttgcgccctgggaacgctgggttccacataaggccattgctgcactactggctttgctggcggggaatcataaggttcgtaagctgtgtgagagttacctggggctgcaaagttatgccctgttcgtgaatgaactgtcgcaggacagtaaacccttaaccaaccatgacgctcactttgcagggctaacgctctcacagtgtattgagaaatatgccttttccgtgaaggtttacgaagaaaatacgttgcaggttcattcactgttccaggaacgtttgaccgtggcgctggcaactgatctcgatacgatctttgtgggtcagcacggctacgctttttataccggccaggcaccgcaaatcttcattcgccgattttccccagaccagtacacgttgcagcaacttttggcgattctgaaacgcagcaccagctggctgctggaaggagtttatctccagcgtgcaagactggacacgctctggcaatcctttgagcaggccgagcagttggatgtgaatatcgctcgcgtcacgattctgaacagcatcgtagaacgcctgaaaacgctgggccttaaaaactctgagcttaacgttttaatgagagcttatgagagtgaacttcattctcttgctgaaaagagtgacggtaagtcgcttcacagctcgaaacttactgacattgtctatgagattgcagatgccattagggatcggcctgaattgcgggctgaaatattaactgcagtcagaaaacgcatagaggatgcgcagtaccagccatcaagcgttccttttgagctgttccagaatgccgatgatgcagtacaagagttgtttacgctggacagcgatgtccgtcatgagcgggtgcaccagcaatttatggtgaaagagcaaaacggcggattgtcgttcttcaactgggggcgagaaatcaaccgcttccagagcgttaaaaatgagcaaatagagaatgttcatgatggctacaaaaacgatctgaaaaaaatgctggcgctttatcagtcggataaagagcagggcgttaccggcaagttcggcctcggcttcaaaagctgtctgcttgtatctgataacccttacctgttgtcggggcggctggcgaccaaaatagcgggtggaattgttcccgagtcctgtgatgctgaaagctataagcaactaaatcaactcactgaaagtgccgcgacgaatggcctgttacctacacttgtgtatttgccgctgcgccagcaaatgcaagcggaagcggtgttaaaagattttactctttatgccgggttgctaagtctttatgcgcgtaacctgcgccagattagcgttgatgatcatgaatggcgttgggaaccttctctgtatgcacgtattccaggactgtcatcaggcaagattatgctgccgaacagcaagggagtgcagtcaccagtacgagtgatggtttaccaaactgaaatcgatgatgaacgttgtcatcttgtttttcaggtcacgcgtaaggggctgagaagttttgattctcatatccctcgattgtggaacttgtctccgctgatgagtgatacccggcagggttttttgattaacgcaggatttgaggttgatattggtcggcgtcagttggcaatagaagccgatcgtaatcggggcattatccagaaagcgggagcaaaagttcattcgttgctggaattgctctggcgtgaaactgagcataactgggaagagttgttggccgggtgggaactgagcccaggattgacccacactcagttctgggaaagcgtctgggatgtgatgtccacaggcattagtaacgatgctaacgcgatggaaaacgaaaagttgctacagcagctttacgaaagcgagaacggcatcatgagcttttatcggtcgtatccggcgctacctaacggatttaaagaccaggcggccggactgataaagttgagtgatagagtgcgttgcgcggatgaactggtttctcgtctggcgagttcactgattcatctccccgcttttcaggctttgcatagcacacagtgtctggtcgcagagacgacgggaagcaaactaaaagtcgatagtaaattgtcgcttgaaacgctattaagcgcgtcattaccagataaacagggtgttgatattcagcatttgtcaccgcgagatgctgaaaagttggctgtcgtgtttaacgaagaattcgataagcgactgggagaaatgacaggctggcaggacaaaatcgaggcattcagaaaacagctgacgaacctgtttgtgcagacacaggccggctctacacgcccgattagccaaattttgctcggtaacatgccttgtgccgaaaagaatgaacgtttgatttctggctttgctccaactgatgccattatctcatcgtcatactctgcacaggcttgtgaattcattgtttattgcaaacgcagaagccagggatatgtttttgaggatttaatcaaatgggcaaaacgcaaagacctggcggctgataatcaaaagcggaaggcagtttgtcgttttctgattgaaggtcaggaaggggagaaactggccgctattctgatggaagagataccgccagactggttacttgaacttaagctgcgccctggcgcgttcccggcagactggcactggagcaataatgatattgcctctcttctgcagggacggttattgactgacagtgacagaacaagggcatgggaacgcgagatccgtgaagcgccgagcgagtataaaccgttgctgactcctggcgaggcggtgcaaaaaatctatcgctggtgggaagagaaccagcaggaggagttggcgaagtacaatgcccgactctacccagacggttggtttgactgggaggcgttaagaaatagctctaacgatcagaattcacgccttgccttattgaaactcctttatctgggctcatgccagaccattggccgaactcaggaagagcaacatcgttccgcgattgaacgttttgaggaaaaaggctggtgggacacgtttgttaatcctgatgctgcacagcagtggctggatgtgatggatgaatatctcaacgagtcttttgatagcgataagtatcgtatctggttgcaaatacttccgctgtatcgtttttccaaacatttagatacctatcgcgaactattggatatgtcggaagtattccttgaagatattggggatttactgcgaccagcatccagtcccaggctctcgggaacgggcgcgggaactgtagttccggagttgcgtgcaactctcggtactggggtgaatttcatcttccgtgaattggtgcgtaataacgtgtttacagacccaaacattcatcgatattgcttctctgctccagaacgcgtcagacgtctgttgttggcaatggagtatgaagaaataaatgttaagcagtcgtctgccagtgattctcttctgttgtggacgtttttcagcgaacaccttggtaaggaaaatgcgacctttaatcattgtttcgacataccgctgcgcattttaaccagtaacgagaaaagctcgcttcgcattgaaatatttgggcaggatcccctggagtacgtatga

SEQ ID NO: 102756 - DNA, 1080 bp, Enterobacter aerogenes
atggataatattgacgatatcataaaggacgctattcaaaaggccaccacggagcggggcaatatttcgatactgattgctggccgttctggggtagggaagagcacattaatcaacgcggtattccagcagaaaatggccgaaacgggccagggtaaaccagtgactcaaaatacgcgtgagattacgaaagagggtgtaccactcactatttttgatacccgtggtctggaaatgtctcagttcaaggagactcatgctgatcttgaaaaactgataacagaacgctcgtctgacagagattcaaatcgccatattcatgtcgcatggctttgcatacaagaagacgggcgtagggtcgagcaggcagagattgatttacacactatgctggctcgccatatgccggtgatttgtgtggtcaccaaggcgagaagtgacaatggtttcaaaaacgaagttcagcgcttgcttcctgaatccaaaaatgtaattcgagtccgtgcgattcaggaagagatggatgatggttacgtcctaaaaccaatgggattagaaagcctgatagaactgacatcagaggttatccctgagggaaagcgtagagcgttggctgcagcgcaaagggccaatattaactataggaagacacagtcgcataaaattgtagcggcttccgcgacggccgcagccgcagcgggcgcgagtccgatccctttttctgacgctgtcatccttgcacctattcaggttggtatgattgcgggtattacatccgtatttggccttgagctatcaaagggaacccttaccacgctggtggcatcggcgatcggcgtcgggggcgcgacgtttttaggccgtaccgttgttgttaatattctgaagtttttcccgggagtcggaacggttgctggtggggcaatatcagcagccactgccagcgcaatcaccgttggtctgggggaggcttacatcaccgtgctggctgaaatttttactcaagatcctgatgcagagccaactgcaacggaaattggcgaaaagcttaaagaaaaaatgataaagatgggctcatga

SEQ ID NO: 102757 - DNA, 3978 bp, Enterobacter aerogenes
atgaaaaagacggtggctcaaccccagttgcccaattccgttcaacctgaaaaaaatgatgaacaaaacagtaaaaagtcagcggtcggaggaagcgcggcagaaaggggattagattaccaggctcgtgttgcagctattgctatgacgtctctccttctggaacagaaagtcagctggattgaggatgttttcaatggcgtaccggttttgattgatgctgagacaggggggcccggtgatgatatttcattaaaaacgaacacgggaaaatcggtagaggtccaggtcaagcgaggcctgaaacgtggcagtgatttatgggatgcactttgcgcgctggcaaaaggcattaacgacaagagcattgcttgtggaattttggttgtttgccccaacagcagtgcgaccatccgctcgaatctggctgataatatcgttcgtattgggaccgggagaattgatggcctccacgaaataggtgatgatttcatcaagaacgctggccttgaattcccggagttatcccgggtgtgtcgttcccttcgaattgtcacggtagatgctgtagacggaaatgatagtgctgaggtcaatgccattagcctgctggggcgtttattccatgaaccacgtcgagcgtggttttttctggttgaacgcgcgcgaaaactcatcagaataagaggtcgcgcaacaataacctcgttgcttcatgacttcagaaatgttggtatcgacatcaaaatggataccacagaaagtggtattcaactaagagcagctgtttgtgattggcttgagaaaagttattctcagtttacaatcccggggcaggaaaaaccggtttcactacagaaatgttggatcccactcaaagcctcagtcattaaagatctagagcagtttcctgatgacttatccaaagcgcttaacagctatcaccaatatgcagcaaagcgcaggagtgacatcaacaagtttgatgctcatacccttggcagatatgttaccaggggcattatcattggtgggccagggattggaaaatcattattgcttcgccgcatagcattaacatttgcagctgaaggccatttggtattgctggcacgactgcctcaggttgtctcgcttatcaatcataaaggcatccgttttgaagaggcccttatcgatgtagcgcttagcagctctggattgaaatacaaatcacctgacctgcaggatgccgtcattttatgtgatggcctcgatgaatgtggggtcagccaaaacctcgttactgatgccattcacaaatttgcagttgcccatcctgacgcgagggtattactcaccagtcggcctgtaggctaccgaccaggtcagctgggaaactggaaacattatgagcttcttcctctggaggagtctcaggctgacgacgcactaatacaagtgatggaagccttacctttcgaaagcccggaggttcgaaggcacaccttcgatgtcgcaaaagagcaactgaaatccttgcatctcaagggggtcgcatcgagaagtccattgattttaaccatgctcgcatccttatcttccagaggtattgagccagaaagctctcgaatttctctttatcgacagttattcagattgctggaaacggcatacccctctgtacgttctgaagtgactggaccaagtgaaccagagcgaaagtggttcatctctttgttaggctggatactgtttgagcacggtactgaacccttcgaagaaacattccgacactgtgtatctgaatggcaaaaagaaatgccaggcagcaatcttgcttgcagtaataaggttcaggcatgttttgatttctgggaaagcgtaggcgtcatcgagcgtatacacacgtttgatcaagaagcagtaaccttcattcataaaacctttgcagagtatagcgccgctgtcttcatcgcacagcaaccgcaaaacctaaaacgaaacttgctcattaacgtgattcaaagagatgacagtagcgaactgctttcttttgcaagccaccttgggctgatagaagaaattctggatgcatggcgcgaattaatgctccagggaaaaacgacatcaacgaaagagctggtaaaggttctggacttgattattgaagcaggaaggcctgttacggatgactcattatgcatctttgccgactgctgctggaatgccttatcgtcatcctcaagcatgtattcggcaggagacgccctttgccaggtgtcaacgtatagctgggatgttgtaagggaaaaggtgagagcgaaccttcattctcatgatggctggctttggctggtttcctgggcatgtattctctctggtagcccctcagaggttagctaccatgatgcaataattgcattgaatagtattaaatcaaagtggccaaagcagctaagggaaaaacattctctgtttgatttcataggcgggaggaaagtgcaggattgtatcattcttggcgctgcaaaaattatcctccaaaaccccgaggaggttggacttagtacacttgacgccatcgtagataaaggacgaggggtgtccgccagctgttttgttgggctaatggaatgctatgcaaaagcaggtattgagttacaggatgaagtcactcgctatccgggaagagagaaagatttttatagcgtttacgctgaaattgatgtgaattgcatcggtctcctctctgtgctggctggaaacgataaccatcaggttttggatgagattttacctgaacacatgcttgagctcggcgcgtttttgaatataagtggctttcatcagctcagcctgaaagacctgctacatcttgaaacaacggataaagatattgatcgaagcaagtttttgtaccagatagctaaagcttcaggccttgaaccagataaactaaggcagcaggctgccagtttaaaaaggcagtgcgagggaaaaacgcttgtactggtttcagactttggcaggcttcctgctgtcgatgcagacatgtctccagaaagggtcgatattgatccagacgattttgatgatttaatttcaacaattctgcacgccagtcagttctacagtgttttagccgccactgtcctttatcagcacaaaacacatccaaaagtcatagacggaattaaacgcatccttatgcaaggagagggaacagctttgtttataggtacccggtttattacggatatgccggaccaggattggcagcaattacttctgcaacgactggaaacctctatgcctgagcagggtgcttcacacttgtttgaggcccttaccgaacctttcaattcacgacatgaaagtgttgcaaagctggggttacggagtgaaatgctggatgtagcacttccggcggcctcatttgcagcaaggcttccccagtcagatgaattatctcaggatattcgtctcatatatgaagactggaagctgcgggagaaaccctatccagagaatggtggcgttatcccggacagtcctcgtgatgccttgtctggtattttggtccaggataagagcgacgctaatctggcacttattcttgagatggtgcaggaaaaacgaacgaaaattcgtgggaatggtgagaaggcactcaagaatatgctcgatggatctgccgaattacagagaaacatttccaaatgggtcagggatggcgtttgcaaacccacgctgttacgacagattattactgaagttaccttgcacccagaagctgttatgacgcttatacctttcctcaaagatgagtcatccagtattcgatatgctgctacagcacttcttaacacgcggttcatgacactcgagcaaatcgaattgcttgcccgcgatctttcaaatgacactgaaattgagattagagaaatcgcatctgcaacactctcttcacttatgcccggaaagggggggatgtaa

SEQ ID NO: 102758 - DNA, 3498 bp, Enterobacter aerogenes
ttggctgaaagaggaggtccggcaactcaggctggcatcagatatcaagatcaagtcgcagcattgtacctcggcagaatgctcgatccgcgtgaacgtccgcgcagggatcaaccagtagaagtcagaattgaggcaccacaatcagtcgatgattttgttgttcgctttgctgatggggcccgtaggttctatcaggtcaaacttacactcgaggctaaaggttcggcatggcaaggactgtggccttcattccttcgtcagctgaatacggattttaaactggaagatcgccttgagttggtgctgggcgagccatcggcgcttgcctctcagttgatagaaatcacgaggcgtcacgaaagctcagatattattgaatggcaaaaacgcctgacagctgagcaactcaaattagtgtcatcaattcagcggctgctcaacgacgatattcagaatgtatggcagataattaatcatctggacatcagtgtctttccatctgaaatgttggtacgggactatgtaccccattggatgccttcaacatcagttgctgtttctgcgttattcagtgttctaaccgagatggctctggaaggcgcggctaaacgtttgagctttgatggtactgcgctttacgatcgtcttcgtgcagaagcgggaattattattcacgatcctcaacattggggaagtgcgcaataccgtgatgcgatcatcactctttcaactatttctgtgcctggaactgatttcgttcagtcaacggacgctgaatatctctggccaaaatgcaaccgctatgaccgggagcgccgtcctgattttgatgatgatattccgggatggcggaatttcaacattgatactccgattgatttacgcaacttcccaaacgctgagctgaatgcagtggtggtcattgcaggccctggttttgggaaaacgacacttgttaatgcaattgctcgcaagacagctcttgaaggccttctgcctgcgattattcctgtaacaaagctatctgaatctgatttgactatcccggcatatttaaatgaacgtcataatcgcgattttgatgtgaaaattgactggcgtgcttccgctgattccggaagcttcatacttttgcttgatggacttgatgaagtatccagtgaccaaagaactatcatacttgagagacttaaggtttttcgcgccacttatccaggtttgcgttggttggtgacggtcagggatgccgcagccattgttccaccagaagatgcgactgtggtagaactttcaccacttcaagatgaagatgttcgtttgtatgtcgacttctaccgacccggggagcctcttgtcgcacaaacactcctggacaaaatggatgttcatccagaactggctcgccttgtacgtattccgatatttcttgctctgatgcttgttatgcgtcaggaaaacgagagtctgagaagaagtgatttacttgatatctacctcgagacactgtttcggcctgcggcatttaaatctactgtgaatgatagtgttgacgcgcttttgcttcggcaaattgctgagtgtgctgcgttcgaggcgttagagaaagatacggttggtattaacatcagacagttagcgcggtgtataaaaagctttggtgtctctttaaacacagatgatgtttatgaagccatgattcgtcgcggtatattgcgcaaagtaaacttagcaggatttgcgtttcctttcccaattgtccaggagtacctggcctcgactgagctgcttgagaaacacagcgagcaaattcccactcggttaggaatgatcgcaaagcggccatgggcccaggctatacaattcgcactcgaacgccactcaaatcctggcgctataattgaccaaattcttgagcgtgaggacgatgttttccacactggcctgaggctactcggacgttgtcttgcgaatgggatgtccgtttcaccgatgcagcgaaatatcatgggcgagagatttgcaagcctttggggaacaggaccatttcattcggaaaagatgattagcagtattattgttgatgcattttcccaacccttgcatccagctgttcgtcagaggttaggtgaacggtatctactccattgtggcgcagatgcgattgttgcgcggcttcgcgataatgatatttctttaaatgttattgatacccttcttgcaggcgatacagagtttttgttgaatctcggcgatttacaacttgaagtgaacagactcggtaatgcggtattaaatcgctatatttctcacgtcaggcaacacgctgaaagaacaaaagacagggagactatcagcatactgattgggcacatgaagccgggctgtgtggatgccgatattgccatcaagatttcaaatgacacatccctgccaccagatatccgattggcgacctggaatctagcacaacagaaactaacccccgagattcagacgctcgttgtgcaggcgatggccgttgacgagttctcttcaaacgcctcggctgtcacagttttatcgtcctcgtatgttgatatcaacaccattatccggcttattcagtcgccccaggtaccgcaaataaaagccatagatattatgagtggcttattaaatgactggcaaagggagggggcgacttcaaaattcgaagagttagtaactttagatggactcgataaagacatacggctcattgcttgtctttttgcagtaaatgccggattcctcgatgcctttgatgtgttgctcgatcagcttcctgttatgaacagcgacatggtaatgagaacaattgacttgttgggccataaacctgaacgcgcaattgttgaacaagccgtatctgctttagcagggcgcaagtggaattcgaaagagcgcgtatcaattgtctgttctcttgcaactggcctgagatatcgcaagaaaatgtgcggccttaatgcaggtattctggagtctattccactgcatcctgggcgaacctctccctacagcttgatagaagagtggatcgctcaggatgattatgagccttatgactccttgcggcttctgctcagagctgtggaactgggtgttcccaatacgatcagtaaactacaggacgccttttatctggcgatagggcacagcattgaaaaagatgaagataacgactctttagctggtcgcgctcttgaagcacttcatgccaatggcaaagcaccttctgtcgacaaacttgaagagttagccctttcaacaacatacaactttgcatccagcattgttgaggtaattgccaaaggtgggaaagtgtctgacgtcgaaattttgttgcgcctgtacgaaagcgcctcatcgacaatactcagaacacttatattgtctgttcttgagccactcactggacgtctggggttacgcattactcaatcagggaaaaagctcatcgcgacggcaatttaa

SEQ ID NO: 102759 - DNA, 243 bp, Enterobacter aerogenes
atgcattatcttgggtttgtcattattaagtccctgcctaaaacctttattggcagagcttgccttaaaatctatggttcgctgcaaacaagtgaagaaaaaaatctgctgacacgccagtatgaagcgaacctctttggcatcaagttactggtgaatagcatcgcttttcaggaacaggataaagtggttgctccagccgattatgttcattcaattgagataaattgcttaattttctga

SEQ ID NO: 102760 - DNA, 225 bp, Enterobacter aerogenes
gtgtggcgggaacgctctcgtcatacctggcaactggatatctcgtggctcgggaagcaggggattaaacgccagaatgagacagctgcagagagtgacaacatccctgctgaggatcagctttcgctggagcttgaggttccgcctgtcgcgactgagagcactggagtgcccgccgtcggggagcaagaaagcaattctaacgatgtgcggcaaattccgtag

SEQ ID NO: 102761 - DNA, 252 bp, Enterobacter aerogenes
atgtgccaaaagcagacattgctagaaataatgttgcgcagcggaaaaacgcaattatatataattgggttggaaattaactggtttaagtccctaaagtatgcacggtgcaaaatcgaggcctggcgcatactctatacccagagacgccctcatcctgagcaggactggatgacctcatccgaatttgctgaaaagcctgccgcaggatatgcagccaacatgtggccggttgttcctgattatgactag

SEQ ID NO: 102762 - DNA, 1311 bp, Enterobacter aerogenes
atggaaatcgaagaatttactgacacatattcagacgacattatttatttaagagaagcaagagaggcgcttctgacacaccctcttcgttcagaaatgcctaattattgcaatgcgtccctgagtaggatatatgcaattgtaatgattggcagcattgagtcaatgctggaaagatggcttgaccgtgataaccttgaaatactaagcgtttattttaagccgaaagtaaccaatgccgttcgcattaacggattatgttcgtcttttacctcgaaaggcatcaatgttaataaaaacgtatttgatgattatttggcgataaaatacatacgtaatgcgatagtacatgccagctgggagaaacaatccggtggtctgaaacaagatgaaatagactggattcatagtcgtggattccccactgatacccgcaaactcaattcaacgcactggcagcgatttgaatgggttaatgaaaacatgatgctctacattgcactttcaggattggcaaaagctccacctgctcatcatgcgggtacagtaggtattgatatcaagccgttgccagataccagtggtatcatcaactggtcagactggcccagactctactggtcgaatcttgaacgcatctctgagtcattaaacacaagcatagaacaagggattagccaaaatgaaagtaattggtcagaaaaactcgcgggctcagatttcaacaaattaacatccttgcaaaaaagtcgtcatctcattctgtctgcttttgcttcagttaaaaatggggagcgtatagtacagaatacactcgagatttcagaaaatgtatccatgtgctggaaccaatttgttgcccattgcccggaatttagaagtttagaaaagttagaagtcaggtctgcaataagcactctttttatcatgcatgaaaacaatattcatcctataaatcatattttcccggaaattaaggaggacgccccattcaaggtacatgaagatttggtttcagtgtgttttgaaaaaacagatctactcacaattactgatattgccaaagcttataagctgggaagaatggcatatcgtgtaatgccaaacattatgccgctaaaattgttttcttatttaataccaatttgttcccctgaaagaattcaggagtggcataatcaatcaaattatatttctgatatttataaattaaatcgtctctggtatgcttccattgaagggcgtcagttgaatcttgatgcaattgattattatcaagatttaattaaagaattcagcaaaacaaaataa

SEQ ID NO: 102763 - DNA, 894 bp, Enterobacter aerogenes
atgcttaaaacctggaatgatttagaaagttatacccaatatgtctactcgaccttgcttaacccacgagataatggagtggaagttagtcgtaacgttatccttaagggattaaaaggtgaatatcaaattgatgtatattaccaatttgaaaatgcaggctttatacatcgtgtagcgatagagtgtaaatatcacaatcgcccgcttgatcgcgatactattatgccgttttgcaacaaaatcacagatattgggaatattatcggggtaatagtcagtaagtctggttaccaaagtggcgcacaagaatacgcagaaaaacatggcattactttactgacaactgatgatttaccaaaatttaacatattggttgccgattacttgataaattcaactttacctacaaaagactggatcggcgagcctttttggattttgatggaaagagaggaagataatgtttcaggttcatactacaagtttgcacaaaaacataacggaagagatgtaatccccttattcttttcaaagcgtgaagcaattgactttctaaatgaatctgagcagtcactgcattttgcaataagaggtgttccacaacattatttgaaacggttgatagcaataacagagcggttaaaacctttattcttcttaatgcttcccgctttgaatgaagaacaagccaaaggtttattaattgaaccaactgaattaatgaaaagatatctactatcagaaatatcacctgaagaatatcaagagttttacgttaaaaggaagtcgcgttacaagaatgagcttactctttttaaaatattaaaagcaatgaaaggtaaaattggtgcagaattggctgaaaaaattttaaaaaataaaaaaacgtaa

SEQ ID NO: 102764 - DNA, 753 bp, Enterobacter aerogenes
atggatagagcccaacaacttatcgtgttccaatcccaaacaaaaaacgttaaagaattggatcgcgcttggcgtattgctaagattagtttgaatcttgctttaaaaaatgatcgagatactgaggcaagaatccatacgaaaactctttcgctaatttattccgcctggactgaagcattattctcaaaattaattcacacaccttatggttttgaattaagcgaaatagagaatataaaaaacataaaaggaatggaagctaaatggcgtagatgcttaaaactagctaaggctaaagttttattagcaccaacattcaattctgttcaattatcttctgctgagatttatattaaacaattaatcattgactatgtgaaaacgccaagcacactcaggaataggattgctcatgggcaatgggttgtcgcttttcagggtgatagtgtgacagatataagttctgacttgacgctagccattgaagagttaaatgtcgtcgatctagataatttaaaaatgggttttaaagggttagctgatattatagaagctatgattgagtcaccaaacaatgcttttgtgaaagactatactaaagttgaatccgatttgaaaagtaacttatcaagacgtagtggatacacattggcagggcatattcagagtttaaaaaagaaatatacttatcgacttttaaaaccgacacggctagcaaattgtatatgtgctattcaagatgatggctaa

SEQ ID NO: 102765 - DNA, 339 bp, Enterobacter aerogenes
atgagcgcagaaaatttgcagctcaaagttgatgaacttgcacatttagctttaaataaagacaatgagataaatgacctcaacttgcagattgtagagctttctgaaaatataaaaatacaaatgattaatgtctcgcagcttgaacagttgaatttgagattagaccaaaaactttataacctacagcaaactttgtcgaaagttgaaaatgatttaaaagtaacaaccgagcaaataaaactgctgacgtcatcactatcctggaaaataacaaaacccttcagatgtggtaaaacgattttaaaaagattcgttttcaatttgtatcgcaagtga

SEQ ID NO: 102766 - DNA, 2157 bp, Enterobacter aerogenes
atgacatcaataaataataaaacatctcaggataacggtgaaattgattttggacgtttggttggtgagttaatagatcatcgtaagttaattgtggctataactgcaggttttacagtattagctgtaatgtatgctctattggctacaccgatttatcaagctaatgctctaattcaagttgaacaaaaacagggtaatgctcttatagatagtctgagccaaatgttacctgatagccagccgcaatcagccccagagatcattttgctacagtcaagaatgatattgggtaaaacagtagatgatcttaatctacaagctaaagttgaacagaaatattttccagtagttggtcgtggcattgcccgtatacttggtgaaaaaccaggcgatataaatattaatcgcttgtatctcaccgaaaataacggagaaaaaacacctgaattaatcctcactgtaaaagacaataatcattataccatccaaggtgaaagttttttggtaaatggtgttgttggccaattacttgaaaataagtatatctcaatttttgtgcaatctattgatgcatcacctggaaccgactttactattaagtatttaactagacttcaggcaattaataatcttcaaagtgcatttgtagctgtagatcaaggtaaagatgccggcatgttaggactaaccttaacaggtgatgacccggctttgcttgtcagaatgttagacagtattagcgataactatttatcacaaaatgtcgccagacaggctgcccaggatgcaaaaagtcttgagtttttgagcactcagttaccaaaagtacgtgctgaattagataatgctgaagataaattaaatgcatatcgaaagcaaaaagactctgttgacctaacaatggaggcaaagtcagttcttgatcagattgttaatgtcgataaccaacttaatggtttgacatttaaagaagctgagatatcacagctttatactaaagaacacccaacctataaagctttaatggaaaagaggaaaactcttcaacaagagaaggataaacttaataaacgtgtgaatgctatgccttcaacccaacaagaagtgttacggttgagcagagatgtggagtcgggaagagctgtatatatgcaactgctaaaccgacaacaggaacttaatatagctaaatcaagtgcgattggaaatgttcgtattattgataatgccgttatcgatcccaaagcagttaagcctaataaaatattagtagttatagtcggtgtgattattggtctgttcttgtctgttggtatggtacttctaagggtactgttacgtagaggtatagaatcccctgaagagttagaggagctaggaataaatgtttacgccagtattcccatctctgagtggctggcaaaagaatcatctaaagctggtcataagaagaaaaatgaatctgccaaattgctagcagtagaaaatccagctgacttggcaatagaagctattcgtagtctccgcactagcttacattttgctatgatggaagctaggaataacgttttaatgatttctggtgcaagtcctaatgcagggaaaacatttgttagtactaatttagctgcagttattgcactaacaaataagaaggtactttttgtagatgctgacctacgtaaaggttatgtccacaaaatgctaggccataagcaattaaaaggcttatcagaaattctttccggacaggccaaggttgaaaatgtagttgaaaaagtgcctggaggggagttcgattatataggtcgagggcaagtcccgccaaatccagctgaattattgatgcatccacgttttggggagttagtccagtgggcatcaaataactatgatttagtcatcattgatacgccaccaattcttgctgttactgatgccgcaataattggtcattatgcaggcacaattcttttagttgcaagatttgaagcaaatacacctaaggaaatatcggtaagtgttaatcgctttgagcaaagtggattaacaataaaaggttgtattcttaatggggtagtgaaaaaagcaagtagttactatggatatggttataatcattatggatataattattccgaaacagaaaagtaa

SEQ ID NO: 102767 - DNA, 831 bp, Enterobacter aerogenes
atgcaaacagaacccgatgtgttgacggaacacagtgagctcattctttcgaccagtatcgaacgtgtagtcactggacgcgattccgcactaaaacagataaaacaactcattgaacagcttgatgccatttcacggttaacctcagaaattggcggtggtacagcgcaagactgggcgatgaagctagggcaccgctacgatagttggctgactgagaaggctgaaaaagcgatgcctgccgtcactcgcaatatcgacagtagtatctggcgcgatttgatgctgaagtctggcatgatggctttgatggatgcacaggctcgcgaccagtggcacaagaacttggaggagggcgatcttcctgctatcagtgaggcgaacattctcaatacttttgaacagttacatcagaacaaaatggaagtctttgagcgcggcatcatcaacgttttcaagggcctgtcttgggattacaaaaccaatagtccctgcagatttagtaagaagataatcattaacaatttgttaactcatagccgctggggctttagactgaactggggctggcggagggatcagttggctgatttagagcgaatgctgtttttgctgagtggtaaatcaatacctgacaaccgtagcgatataactactcggttgatggagcatattcgaaataacccggataaggatgtttatgaggatgagttcttccgcgttcgctactttcagaagggcactgcacacttgacttttaagcgcctggagttggtcgagaaaatgaacgatattatcgctaaacactacccaagaatgttagcgaagtaa

SEQ ID NO: 102768 - DNA, 324 bp, Enterobacter aerogenes
atgtcatatacatcaccagatgaatgggggctaccaagtgatattacctctcgctttggtgcaagactggtacaggaaggcaactggctgcattacctggctgacaaggctggtttgatgggaagctttagcccagagcagctacaaagcctggaaaatgccttcccactgtttatagagcagttagaaaatatgttgcgttccggtgagctaaatccacagcagcaacatcagatgagcattcagcttacaggtttaacttgtatagctgatacccttagtagctgcgactacgtttacctcactgtttatcccgcccaataa

SEQ ID NO: 102769 - DNA, 471 bp, Enterobacter aerogenes
atgcctgcattcaatttatccccggtatttcctgcaaacgagcaacgcgtcattcgtcgggcgttacgcctgctggaaaaatatcagcgtcaaccaagtgagccctttacttccaccagcttcactaaaacctggttgcaattacagatggctcatcaggaacgtgaggtttttatcgtgatgtatctcgacaatcagcactgcctgctggaatgcgaaacactgtttaccggtacactcagccaaaccgaagttcatccccgcgaagtggttaaattggcactgaagcacaatgctgctgcagtcattctggctcataaccatccgtcaggtacgacagaaatcagtcagcaggataaacatattactcagcggatagtgaaagcgttagcactggtagaagtgcgagtggtggatcatttggttattgggaatgaagttgtttcttttgctgagcaggatttgctttaa

SEQ ID NO: 102770 - DNA, 225 bp, Enterobacter aerogenes
atgaaactggccagccgttttggacgcgtcaatcagatacgccgtgaccgtccattaacccgcgatgaactgatgctatatgtccctaacgtattctgcgaagacaaacatgaatcccgcagcgaccggtacacgtatatcccgaccattaccctgctggataacctgcagcgggaaggcttccagccattctttgtgcctgccagacccgcgtgcgcgacctga

SEQ ID NO: 102771 - DNA, 213 bp, Enterobacter aerogenes
atgacctttcttaaaatgctgatgtccgccctggctcaggccctgtcctggtatggcggatatcaggccagactgtatattgaaacccactttcgtcaggccggttatgatgacgacagtattgatgtagccagagacgcggtgacactactggttagcgcactgataaccgctctgatagcgcaaatactgcgtcttctgaatatcctctga

SEQ ID NO: 102772 - DNA, 996 bp, Enterobacter aerogenes
gtggatagttatctggaagttgagtcaagtagtatgcatgctacagagagcgatacaacgctcataattactaaagacttggatatcgttcaaacacaacgttggttactttcagttttaaagaaaatactacgctctgaaactgaaaattttaaagtgactcagtccggaagctacaacagaatgggctatttactcaaagaagctatcagtgcattaacttttctgaaaagtagtctcagtgagtatcaacagttccatcccacgatacgactgttcagctcgatactccaaaaatataaccttacagaattgtcagtaacggaagccacgaccataaacgatgtgttgagacgttttcgggaggaagcacaatcagtcactcataagaggcagctacgtaatttccagcgggctgccagtaaaaatctgaagagtgccctgggctatgtggaccacctttttgaacaacatgcccggttactggtggtccgtgttgacctatcctggcggaaagactttgtaaaaaatcagaccatttcaaccgctatggcacgtcagcatcgccagcgcttatttaaacgagtgaagtcacatccattgtttcagcattgtctgggatatatctggaaacttgaatacggacaatacaaaggttttcactatcatacgtgctttttctttgatggcagtaaagtcaggggagatatcgcgctggccagacgaataggggaattatgggaaaaagagattacagatggtctgggactgtattttaactgtaatgctatagcgagtacttacgctcagtcgggagttggtgacattcattatactgaccagaagaagcgtgtagtcttgcagaaagcaatcgcttacatcgctaaggttgataccgccgtacggctgagtttgccacagggggtgcgtacatttggacgcggggaatttactttaagaaaagataaaaaaagaggacggccgcgctcgcattaa

SEQ ID NO: 102773 - DNA, 1635 bp, Enterobacter aerogenes
atgactgagtttgataaagaaaaattgggaaaaactctctggaatatcgcagaccaattacgtggggcgatgaatgcagatgattttcgcgattatatgttggcatttttatttctgcgatatttgtcggataactacgaaactgcagctcagaaagaattgggcccagattatcctaagccgaaagatggtgaacgtcatccaccgctgagtatttggtacgcacaaaatgagcaggatgttcctgaatttgagaagttgatgcgccgaaaagtgcattatgttatcgagcctcaatatctctgggctagtattgctgagatggcacgaactcaagatataaaattacttaatacattgcaggctggctttaagtacattgaagaggaatctttcgtcagtgtattcagaggtttgttctcggaaataaatcttgcttcagaaaaactgggaaaaacatacggtgatagaaatgatcgcctttgtaagataatcaaagagcttgctgaagggcttaagcagttctctaccgatagtgacacgttgggtgatgcttacgaatatctaattggtcaatttgcagcgggttcaggtaagaaagccggagagttttatacacctcagcgcatttcagacatcttatctgctattgttacactggatagccaagaaccagctacaggtcagcgttctcatttggatagcgtgtttgattttgcttgtgggtcaggatctttgcttttgaatattcgtaagcgcatgggccaacatggtattggcaaaatttacggtcaagagaaaaacattactacctacaacttggcacgtatgaacatgcttctgcatggagttaaagattcagagtttgatattttccacggtgataccttactcaacgattgggatatgctacgtgagaccaacccgtcaagaatgcctaagttcgacgctgtggttgccaacccgccctttagctatcgttgggaaccaacagaaactttagctgatgatgtgcgctttaaaaatcatggtctggcacctaaatctgctgccgatttcgccttccttctacatggattccattttttaaaagaagatggcgtgatggcgataatcctgcctcacggcgtacttttccgcagcggtgccgaagctcgtatccgtacgaaactactgaaggatggtcatatcgatacagtaattggtttgcctgcgaacctgttcttttctacgggtatcccagtatgtattcttgtgctgaaaaaatgcaaaaagccagacgatgtattattcatcaatgcatctgaatacttcgataaaggtaagcggcaaaaccagctacttagaacagacgaaatgcctaacggtgaagaagggcacatcgaaaaaatcattaatacttatcagttccgcaaagaagagcctcgctattcacgtcgagttagcatggaagagatcgagaagaatgattttaatctgaatatttcacgctatgtgagtactgccgaggccgaagaggagataatacttgattcagttcatgctgaactcgtttctctggatagtcggatcaaattagcgacccaaaaacataacgaatttttaaaggaactaggattacctctcttaccataa

SEQ ID NO: 102774 - DNA, 1116 bp, Enterobacter aerogenes
atgaaaccagcccagatctctgctgatctcccagcattggcggcccatttgcgtaatgagttagaaaataaaaaagctattgtactctatgcctataacggtacaggtaagacccgcctatccatggcttttaaggaacatggcaagcagggcgattcccgagacacgttgtacttcaacgctttcaccgaggatttgtttcattggaacaatgatctagaaggtgatatggatcgacgtttgttgatcaatagcgactcacgtttttttcaaggcctgtttgagcttgaaatggacaaccgtattaggcccttattacaacgttattcagacttcgactttctcatagacactgaagagtgggtaatacgattttcacggactatcgacaatcaagtcatagataatataaaagtctctcgaggcgaagagaatatcttcatttggtgctttttcttagctattgtacagttagcacttgatggtgcagaagcttaccaatgggtaaagtatgtctatattgatgatcctatttcatcattggatgagcataatgccattacggttggtaaccacttggcgcaactactgaataaagcagacaatccattaaaagtagtgatttcgtcacaccatcctttatttttcaatgtaatgtacaatgagttggatgctcgaaaatccaaaaaggtcgaagcctattttttatccagaaccagatctaatggtagttatgctttgacacaaaccggtgctacaccgtttttccatcatgtggcaatattatccgagttgtacaaggctgaacaatcaggcgagctatatacatatcacttcaacatgttacgttcggtgctggaaaaatcagcaagtttccatggtttctcgaatttctccgcttgcatcgcacaggacgctgatgatcctgacagaattttacattcaaggctcattaatattctgagtcatggtaattattcactgtttgagcctcaacctatgcttgctgagaataaaacctactttagaaaaattttacatgatttcctaaatcgctatccatttaatcctattttatttgcacaacaggttgaggaaggggaagaaaaacgatga

SEQ ID NO: 102775 - DNA, 633 bp, Enterobacter aerogenes
atgtgtataagagacaggttccagggagcttgtcagtggtatagaaagccatttgaagaacttgttgtaaattcgttttacggtacgtctaattcgacatcagaaacgggaaaatatcctgtgcttcgcatgggaaatatgcataatgggaaacttaatttttcaaacttggcatatattgaccttgatgccagctcattttcaaaaatgcgtctttttaagggtgatatacttttgaatcgaacaaatagccttgatcttgtcggtaagatcgctatgtttgatcaagattttgattgtatcactgcatcttacattgtcacttatcggattgatcaagaacaagtaattcctgagttttgtaatgtgatgcttaatacacctcattaccagcgaaaaatcagagcattggcccgcccgagtattagccaagccaatatcaaccctacaactttcaaaaaagaattggtgttagcgcttccttcccttgatgagcaacaaagaatcgtctcttgtttttcatatgtggatgaacaaattgcagcacaaactcagaaaattaagttactgaaagcacataaaactggcttgatgcagcagttatttccggagtcagatgaggtgcgcgcatga

SEQ ID NO: 102776 - DNA, 756 bp, Enterobacter aerogenes
atgaaccaagacattatgacctctgttcccgcactggataagacagtaaagatctgtaattacctttttaattcgccaggagcgaccttcagtcagatccagaaggatcttgcattacctaaaagcagtacgtcttctttgttaaatgctatggttgagcatcatcttttgcgactggaagagggacgtttttttttgggattgaagctgtatgaatggggaaatcgttcactggagcagtttgatattcgtaatgcagcacttcccgttctggaaaaactgcgccagcaaacgaacctgacttgccacttaggtatattggatgcagttgcaccgatttaccttatgaaactggaaaatacccagccgattggtattcgtacctgggtcggcaaaaaattgccgatgcacagttccggtgtggggaaagcgctatgtgcctggcttccgcaggataaaattgataagctgttgccggatgaagaattaccacagtatacagaaactaccattaccagcaaaagagcgttgatgaaggagtttgccacaattcgggagcaaggctgggtatttgataacgcggaagactcccctggtatctattgcattgcagcaccggtatttaaccataataaagacgtgattgcagcaataagtatcagcggtgttgaattacaaatgcccaaagaatgtattccacaatattcactttgggttcgtgaagcctgccaggtactttcggccaagctggtttaa

SEQ ID NO: 102777 - DNA, 900 bp, Enterobacter aerogenes
atgttgaacatttttaagggcatcttcccgccagtaccgactatcgttgacgaaagcggagaattggatcgcgcaggaatggcagtaatgattgaccatgtgattagcaatggtgctaacggaatgctaattctgggcagtggcggcgaattttcccatttctcgtccgaacaaagaaagcaaattgcagaatttagcctgcagcatgttgccggtagagtccctgttcttattggtatcgcctgcgccagcactgcggaaaccatccaacttggaaggcatgctgaaaatgccggcgcaaaaggagtactggtagtaaatccttattatacaaaactcagcgatgaggcccgctttacacattacaaacgaattgctgaagcactaagcattcccgtattcttatataatttcccagaactaactggccaggatattggtataaatgtcatcacccgccttgcccgcgaagtaccaaatatcgttggaattaaagatacaattgataacattagccacaccagggagattatcaaccaagttcactatttccgcccagattttatcatttttagtggctatgacgaatatttgcttgatacattattacttggtggacatggcggcattccagcaacatttaactttgcgcctcatattactcgcggaatttatcaggcgattcagcagaacgatctcgctaccgccaaagcactccaacaacaacttgctggattatcacctttatatgccttagaacaacctttctttgccgttatcaagaccgcaattaaattaagtggcgtggatatatcaactgcagttgtcccgccagcattaccgttaaatgaagaaaaaagagagcaggtaaaaaatattttatcccgtattacggtataa

SEQ ID NO: 102778 - DNA, 1518 bp, Enterobacter aerogenes
atgaacatcaaccctgtattaaaattgaatctcaaagatgatgtggttatcgcaaggcaggctgtctccgcaggcacccggcttgaagaagagcacattacggtactcagtgatattcccgcaggacataaaatcgccctgcatgcactaagtgttggcgatgcggtcagacgctatgggcaaattattggcttcgcaactcagcccattaagcctggcgaacatatccacatgcataatttgggaatgggtgactttgaacgagactatgcctggggtgaagattgccattcaccctctccagctctgcaacaggatatctttatgggtattcgccgcgccgatggccgtgcagctacacgtaattacattgggattttaagctctgtaaactgtagcgccacggtcgtaagagctattgaggatcacttccgtctgcagggtcttgcagattacccgaatgttgatggagtggtgtcattaccacaaagttttggctgtgcgattggctctaaaagtgaatcaatggacgtcatgagacgtacgatggccggttatgccacccatgccaactttgccggagtaatcatcgttggactgggatgcgaatccagtcaaattaaagacatgatgaatgcccatggactggccgatggcccaatgatgcacagttataccattcaggatgtgggcggtacacgtcacgccattgagaaaggaatttccctagtcaaccaaatgttgcccgttgctaaccaggtaacacgtcaacccatccctgcatcagaaatcattctcgcgctcgaatgtggaggttccgacagctattccgggatctcagccaatccagctctgggctatgcggtagataaactggtgcaacaaggcggaacagcgattttatctgaaacctccgaaatttatggtgcagaacatcttcttacccgccgtgccgtttctcgcgagataggtgaaaaactcattgcccgcattcactggtgggaagagtattgtcgccgcactggaagcgaaatgaacaacaacccttcggcgggtaacaaagtcggcgggctgacgacaattctggaaaaatcacttggtggtattgctaaagcgggtacaaccaacctgactgaagtgtatgagtatgctgaaccagtaaccgcgaagggttttgtctttatggatactcctggatatgaccctattgccgtaacggggcaaatcgccggaggagcaaatcttctgtgtttcaccacaggccgaggttctgcctttggttctaagccaactccaagcttgaagctagccactaataatgcactttggcaacgccaacaggaggatatggatattaattgcggaaccattgtcgagggggaagaatccattgcagaagtcggtgagcgtatctaccagataatccttgagatggcatcaggtaaaaaaacgaagagtgaggaatttggctatggcagtcaagagttcgtcccctggactgttggttccataatgtaa

SEQ ID NO: 102779 - DNA, 1311 bp, Enterobacter aerogenes
atgtctattgttaacgtaaatactgaagaagaaaaattaaaggcaacaacagtaaggtggcgcatatttattattatgctcttgttaggtgctattaattatattgatcgcacctctctttctattgccatgccttatattacagatgaatttggcattaccgatactcgtgttgttggtgttattcatagtgcctttttctgggcttatgcattaatgcaaatcccaagtggggtcattgctgataaatttaaagccagacatatcattgcgctagccactatcctatggggagcgtttcaagccgttgcggctctgtgtcattctatttttaccctttcactttctcgtctggggttaggtgtctctgaatctccaattatgcccgccggcgcgaagttaatgggtacatggttaacgccaaccgaacgcggacgtggttcgatgctacttgatggtggcgcgccattgggtacagcgctgggggcggtgattatcgccggacttattgcctttttcgactcatggcgtatggcattcgtagtggctggtgtgggaacaatgattgtcggtttactggcttggtggtacatccgcacttatccatcagaacaccccagcatcaataaagctgaactagaccatattgtggcggcaaacggtgctgaaaccagtagcaagaaataccgtctggccgatatcaaaccttacctgaaacaacgaaatgtgattgcacttatctgtggctgggtctgctatagcttcgtgttctatggcctgatgacatggctaccgctctatttccaggccacctacggttttgatatcaaatcgatgggcggagcaatggcgctgatcttcctgctgtgttttgtcggccaactgactggcggctacattatggataaatggcgcagcagaggggcaaaaacaagccgagttatgcatacgatgttggcgatttcagctaccaccgctggtgttggtattttcctttgcgcacaaagttcgacgccagccgtcgcaattaccttgctcactattgccctttttcccctgcgatgggccagcgtttactggtcaatacccggactactgggcgcacaatcagttgcaggcaccatttgcgggacaatgaacttcaccagtaatttgttcgcagccatcctacctatttttatcggcttcctagtgcaatccacggggaactattacgcagcgatgatgttctttgcgctggctgcggtgggttatctcatctgctcgctgctgatcaactttgataaaaaaatggtcattaccgacgagtaa

SEQ ID NO: 102780 - DNA, 903 bp, Enterobacter aerogenes
atgttcaattcagagaatttcattgccgtagactggggctcaagcaacctgcgcatttgggtctatcaacagaatcaatgtgtctggcaacacgccagtcagaatggggtactcaaacatcaacccggtatattcgaagacacatggctaacactgctcagtttgtgtccgtgcccattaagcacagatacaaccgtcataatgagtggaatggtgggtagtaatatcgggtgggtagatagccactatttacgctgtccaaccctgttaagtgcattatcacagcacctaacaaaggttgaagatgcgggcccttttcccactttcatcgttcctggcctgcaaattgctggaccggaaaactacaacgtcatgcgtggggaggagactcagctattgggcgtcttagctgatgagagctggtacgtattcccgggaacgcatagtaagtgggttcacgtacaagaggggaatgtttgtgattttcaaaccatcatgaccggcgagtttttccatttactttctcattactcaatcgttggaaaaaacgccgaggaacaaagcaagaacgtacaggcttttttagccggagccgaacgcggatggcaggaaacgtgtttatctcgcagcatatttgacctgagagccagaatactcagcgatgccttgttaccagatacactttacgaatctttgtcaggattactgattgggcacgaaatagctcaaatgctacagcaatatgccattaacaccgaggatgaagtcattctggtgggtaatgacgatttgctcaatcgctaccaaagactgtttcatcatttcggttatcgctgtcgcctgtgtaacggtgaaaaagcatttattaatggtatcaggagacttttacatgaacagccgtaa

SEQ ID NO: 102781 - DNA, 621 bp, Enterobacter aerogenes
atgaacagccgtaatcctttagtagccattttacgtggcgtgaaacctgatgaagtactatctcatattgacgcgcttatcacagccggcttcagtacaatagaaataccgctgaattccccagactggcaacgtagtattgctctggccgtggaacattatggtcataaaattaaaatcggagcaggaacggtgaccagtgttagtgagatcgatactctctattctctgggatgcgcatttatacttacaccgaacaccgatccggaagtcattaatgcagcgcgagaggctaaaatgacaacctgtatcggctgtcatactgccagtgaggcattttcagcgatccggcatggggcaaccggactgaaaattttccctgcaggagaactggggcctgattacattcgggctttgaaacctgtattaccggctcatgtaccattgtatgccgtcggtggaattcgccctgacaatctgcccaattaccttaaagcaggttgtttcagtgctggattaggtagcgacctgtatcgtgccgggcaatccatcatccagacagcctcgaatgcaaaagcgtttatcgaagcatataatgcgtcctgtcagcctggagtttaa

SEQ ID NO: 102782 - DNA, 459 bp, Enterobacter aerogenes
atgcagcttcgatttgtgaaatcggaattgaccttcacctattttgaaaccaccaggagctatctggaaaagcatggcaaaccactggcattgtacagcgacaaagccagcgtcttcagaatcaacaataaaaatgccaccggcggcgatggttatacccagtttgcccatgcgatgcatgagctgaatatccagactatctgcgctaataccagcggctgtgtggaactcgcccatttgatgcttcaggatcgcctagtaaaggagctccgtctcaaaggaatttcttttctgtggatgcagccaatgaatttgttgatgagtttatggctgattacaaccgtcgctttgcgaaagcgccccggcatgattttgatattcaccggccacttgaaactgacgatggcttggccgcatttttcatatggcgggaaccgcgtcgtgtttcaaaatccctga

SEQ ID NO: 102783 - DNA, 276 bp, Enterobacter aerogenes
atgaaacgaagaaattttagtcctgaattcaaacgcgaatccgctcagttggttgtcgaccaaaattacacagttgcacaagcagctaaagccatggatgtcggcctttctacgatgacaaaaagggtcaaacaactgcgtgatgagcgtcagggcaaaacgccaaaatcttctccgataaccccggagcaaatcgaaacacgcgagctgagaaaaaaaagctgcaacgcattgaaatggaaaacgatatttaaaaaaaggctaccgcgctcttga

SEQ ID NO: 102784 - DNA, 255 bp, Enterobacter aerogenes
atgaaaaaaagaaatttcagcgcagagtttaaacgcgaatccgctcaactggtccttgatcagaactacacagttgcagctgcggccagtgctatggacgtggggctttctaccatgacgcgatgggtaaagcagttatgggatgaacgacagggcaaaatacctaaagcctctcctataaccccagaacagattgaaatacgtgagctgagaaaaaaaagctacaacgcattgaaatggaaaacgacatattaa

SEQ ID NO: 102785 - DNA, 960 bp, Enterobacter aerogenes
gtgataaaaaagtcatataacctttgggatttaaggctagttgtgaaaaaaatcagtccttccgatgtgaaatatataaaactaggtcccggtggaaaatgggaagccgaatgtattgatactggtatcataaaatttggctaccacgagacaccaaatcaactctgtatagatggtaaatgggctgaggttcatgaaatatggaaaatcatcaggggaagtaaaacgggtacagctactagtgaccttaaccagataaaagtgttttatactgctcaggaagatactgtctttatcaccttctacggtggttttctttattggtgcagaccaacaggcgacgtcactgttcttcaggatggcagcagaattcgtcagactattgatggatggcacaatcgtagcatcaacgggacaattttcactattagttcaataaatggtgagttgaatgcaacccatggattcagaggcactatctgtaatgttaaaaaagccgaatatgttatccgaaaaattaatgatgaatattcgcctgaacttattgagtttgatctcgccgaaactagctatctgaattcaattcgtcaactttgtaagctattgacatggcaagacttcgagttgctagtagaccttatattttctcaaagtggatggcgacgagtcggtagtctgggcaaaacgcaaaaaacgattgaccttgtattggaactaccgacaactcgcgaaaatgcattggttcaagttaagtccatagcagacaatgctacgttggatgaatatgtaaaaagattccatgaatgtgatgcctacgacagaatgttttttgtctggcatagtggtccgctgaatgaagatcaacaaattgacggtgttacattaattgggcctgaaaaactatcagagattattttggaaagcgggttgacccgttggcttcgaaaaaaagtatggtga

SEQ ID NO: 102786 - DNA, 360 bp, Enterobacter aerogenes
atgagaacacaaaatatcagcgtcaaccccatcgcttgcgaatccagtgacaaaagtgtcatgcaggacgaagattcatttgtatttttcagaactgagacaaccacaattttcagcatggcgctgaagttagatccggctgcggagtacgttgcattattctcttttactactcttgccgaactgaagcgccagtatccggatatggtgctgatcaccgaggaagaagcgaatgcgagaattgaagctgtccgggctgaaagaaaagctaaggtagaggcgatactggctaactccgcgctggaacgtaaagtccgtaattccgggcataagttcattcgtattagcgcgggggagtga

SEQ ID NO: 102787 - DNA, 222 bp, Enterobacter aerogenes
gtgtatcagaatgcacaaacacagccggaagcagggcgcgcctatttcgctggaatgcaatggcgtggtatcgagcttaacggatcggatgcggccgcactcaatcagtatgatatcgatatcgccaaagcccgtgctccagaagcgcgtgcctggcttatccagaataaagcggaatacatggcgctgatccttgatatcagggtggtgaaagtcggataa

SEQ ID NO: 102788 - DNA, 765 bp, Enterobacter aerogenes
atgcacctattttttaaagaacaaataatgaaaataatcataactttcatagtctctttattctttccctgcgcgttagcctggggaaatgatgtaagtggtatttcatttgattttacacgaatagttatgactgataatgataagaaaggagttttttaccatgcgtataataataatcctttccctatactggtacaaagctggggtagcaacttagatacagatacaggatcagttgatgagaccgcgaaaaaattaaaagttccgttcattgtactcccaccacttcagagagttgaacctggtgaaaagttcactttgaatttacgctttaatggagaaccggtgcctgaaaagaaagaatctgtatacttattgtcatttaaagctatcccagcatcggaatctaataataataataataataataataaactttcaatgactgttgtactaaatataaaagtatttatcagaagtggactacctgatgatggcggaattgtctctacactaaataaattaacagcatcatggcaaccagatgggataatgattaataatccatcaccatactggctaactctatcatcaatgatgatagataacaaggaaattgataaaaaggagttgttaaaaatggccgtacctatgcattcaactttatttaaatggaataaggggaaacctcgggatgtatttgttagatttattgacgagtatagtatggatacttccccagtacggttacaaatagattaa

SEQ ID NO: 102789 - DNA, 243 bp, Enterobacter aerogenes
atgctccgtaatacgagtaaagggaatatcaatcgagcagtaattcattaccgcgcagccttggtaatccccctgccacgtaaatttttcgaagtccagagttcggtagccaagtcgaccatactgataagaataaaatgcatccaatggcccactgtagaatacgtgatcgtatttttctttatcttcaggattaaaagactgctgaagctcaatgataatattttcatgattgattattga

SEQ ID NO: 102790 - DNA, 177 bp, Enterobacter aerogenes
atgaatatcccccgcgttatcatattcattttcatcgtcaaaacttgcttccaacatatctctttccgaattaatgtaggcattatcaccttcattatattcaataatatcaatgtagcttgggatataatacccacctcctttaatagtttctataatagatgtattttcttctaa

SEQ ID NO: 102791 - DNA, 3276 bp, Enterobacter aerogenes
gtgtttgcgaccctacgttctgatgcgaaagtaccgctggtggttaatggggtgcgtatcgagccaggccagacaatggggatcatgagccaacatgatttcggtgcgtcaggtggtcgtttgagcattccggttaaacctgctgttcctgatgtggtcggctcttccagccttcttgtcatgacctccgcgccgaactcacccatcttggttgtggacatcaatacctggaaagggacggctaagctctctgctgaatcatggacaattcgccaggtcattgacccagtgaaaatctatgccctgccagagtcgggtgtgccttgccggttcaccacgaaagaggatgtggctatggccgcagacccaattcgtgacccggtgtgtttgctccagtgggacagaactccagatgaggctgaacaaactacgcaggacaacaacgggatgaaagttgctgggctggtggggcaggctgtgagcattggtgaacaacctgtcgaatacagcctgtacctgttcagtggtgacggttccaaggtaaaagttgggtctggctctcagaacctgacggtaactactgcctatggctctgttggctacaccccgattgatgacattgctcaggtgaatcgcgtcattgaagattttgatgtgaacttcaagcagagcaaggggccagactgttctataaccctcagcgcagaccgtgcgaaaaaagaggccgcgaacaaggctgttggtagtgcaagccgtgcctgtctgttcgagtggcagcagatccccgatggattggtccaagacccgttatcggaatcaccttcgctctctggttcattggcctccaacggcgttcatccactggggtggcgggtaagtattttcacccgtaacggcactagggtgacgttgaacgacgagactttcaatgtcgaagcggttgacccaccagctccgaccgttgaactagcctccgactacaacttcaaagacaacatctacttggtgccgatgacaggtaactacctgggtgatgccattatcaactctgaacgagctgatctggatattgccatatcgcgcaactcggatgttcttgagtctgagaccttcactccgggatggggtgccaccaataaggtgtatcgccgcatcaataccgatgagcgagcgttgtgggaggagaccacctacaaggtgaacgcggcctacaacaaggtgcctgatgtgaagactgaggttgtctaccgggctatctctgcaccttctgacagtatccgtcctatcgttgaagttaaaggtgataccgcgattgacacccaggcattgccggttagggttctcatccgtgatcagtacaaacctgatggtgactatgacgctaacacgatgggggtgtggaaagtacgcctgatccagcaaaaggcctacaacgagacggttgcgctcactgattatgcggaagcatcgaacggtgaagctcagttctcagtagacctgtctggtgtggatacttcctccgtccgtatcgctgctgaggctgttctggaaagccctgttgagggttacaaccgcacagagttgtctatcagacctgccttcttgacagtgcttcgcggtggtgccatcggtgctggcgtggaggctcgcaagttgtctggtgaagctccgttcactgctgtgttcaagctatctttggacgaccgtcaggatctccgggctaccggccaggttgtgtgggaaaccagtaaggacgacggtaaaacctgggagcagttcatcccagaagatcgatacaagtatcagcttgtgaagaccttcgacaagggggagtaccaggttcgggccaaggtggtgaacgtcaactcaggtgcggaaaagtacaccgaagcggtcagtgttgtcgcttacgacaaacctgatattgctgttatcggcccgaccacgttgtttgtcggaagtgaaggcaagtacacagcgaacctgacgttgaacgatgagccaatctccggtggcaatgccattgttgagtggtctactgacggtggcaaaacctacgcgcagacaggggatagcatcacgctttcgagcgatgaagaaacccgataccgcctgtgggctcgtgtgcgctctgccacggcaccggctgatgacggctatgcctatgaagttgcgaaaacggcggttgacttccgagcagtgaaggcacctcgtccttacgtgacagggccgcgagttattgagaccggtaagaagtatgtgttcaaagccgaaaccagcctgccttaccgtgggatggacgtgaagctgaacgggttcttcacgctgcctgatggctcgattgtgcagggtgatactgctgagtacgaaccctctgacactgacctcaatcaggctactgtagaaacgaagtacaccacctggatcgaaggataccgagatcagggtgcagaggcttcgcatagcctacgctcccgcgtttggcagtatgtatggccgagcttcggaatgcaggttaggaagaacgcagacgtggctcctgcgacgatcaccgcgtcagtgcggccaattgccttcaacggcaagctggaagagccgacctacgagtgggagttgccggaaggcgctgtgattcaggatcagcggcaggatattgtccggtcctttgtgatcaatgagccgggtgattacaacatcaaggtcactgtccgtgatgctcgcggccatgagaccgtgatcgagcaaccgctcaagatcggccaggcagcgccctatgccattgacctgcaatactctggctcgaacaaatacgagcgtgagcctctggatgtgctgttgcgaccgtacatttctggcggccacccacgcgaccgtatttcgactcgtgtttattcggtagatggtacaccgttggaaagcagtggttactacggcagagcaactctgggcgctggtgagcacagcatcaagctgaaaataacctcagaaatggggcatgaagctgagggcgaggtgaacatcaatgttgcagagaacaagttgcctgcatgtagcctgagctcacgagagaccgttgggtcgtggatcgtctatgcgaactgcgaagataccgatggccgcatgaagtcctacgaatggaccattgccggtgagttgcagagcatcagctctgatcgagtgactatcagcaagggcacctatgaaacgatgccgaccatctctctggttggggtcgatgactctgggggcaaatccgaagctgttaccatgaactaa

SEQ ID NO: 102792 - DNA, 1014 bp, Enterobacter aerogenes; identical to SEQ ID NO: 29928

SEQ ID NO: 102793 - DNA, 165 bp, Enterobacter aerogenes
atggagaagttatccgaattgttcctgttattattggaagcaaaaaagcaggaattcttcaaacaattcttggcgcagttattgttgcagcaagtgttgtatatggctactttacgcaggattgggcaaatgctgcgtatggtatacaagctggcggcgcaatga

SEQ ID NO: 102794 - DNA, 249 bp, Enterobacter aerogenes
atgaaaatgcctgacaaaatcttttcggcggcctcgtactgcacgtcgggtggcttaatctgtaccgggctggcgagagcgtatgactggtttcatgggcttgactggaatttcattgccttggtaagtggcgtgataatcggtgtggctacatatctaaccaacctctatttcaaacgccgctggacgaagatgtatcagcagtcacttgaacggggctacggtggcccaccaccacaggatcattga

SEQ ID NO: 102795 - DNA, 798 bp, Enterobacter aerogenes
atgggaccactggtcataatggttgtgcttgtatgcgggttttggtatacggagaatcactatcaatcccgcatacgtcatgcaagaactaatggctggacgtcgtacttctatgttgcaatgcatggatgtaaatttgtcgttcaggggtttggtttagttctggttttttatctcctcttgcttactatcagtctcctcctctcgattcctcacctgtttttcgaaagttataaagcactggatttttattcgtggctcacggataaacaaattctctcgtatcctgtattttttgtactttcaatggctgcttcatgttttatggcatacgttgctggtgatgtagccagaaaggctattaaagatgagtctgtcaggcaggcagcctaccgggagatggccgctatggatggtgtggagtctcttctggtacaggctatagatgaagacatgctggtttttgtcacattaaaatcacgaaaagtatacattggctatgtcgcagcacctcgtattgagcatagccacacgcagcatttagctatcatcccgtatataagcgggtatcgcgataaagatacccttcgttaccatgagcaacatcgttactacgagttatatcttgaaaagggtattgccgctaaccagcatgagagagggctgaacttacagcattttcgtcatgttatacctatggaccaggttgaagctgtttcattatttgatacggctacatatgtaacatttgacaactactcagtacctgagaagacggggcagaatactgctttatga

SEQ ID NO: 102796 - DNA, 195 bp, Enterobacter aerogenes
atgactacgttatttgctaaaattatgtcaacccccggtcgatggatgcaaaatgtcatccagcaggacattgaacaatctaacaacagtaaaatcaccactgatgctaatggtaacgcagtcctgaacatgaacaataaagaagttcgcgagtcaatgcaggctaggatgaaagaacttgcagctaaacgttaa

SEQ ID NO: 102797 - DNA, 186 bp, Enterobacter aerogenes
atgccaaagaatctgaagccggagatggaaatactcaacagaatgttggaaagccagatccaggaaagccagaatctggcaagaaaagcagagcaagacctaaacgagataaagcgtcagttggagccataccagttcaacaacctgatggacaacaacctgaagcgtgagctctttgctctatga

SEQ ID NO: 102798 - DNA, 228 bp, Enterobacter aerogenes
atgaccaataaccagttaacagatgagcgactggcccagttgattttcctcttcgatgtggctcctaaatcaaaggcgaatgcagatgcgcgcgcagcgatgatggagctacaggaacgccgcaaggctgaggcggcatggaggaaatttcagggcgcaaaaacggctgtttcgctggactatgttatggaaagctcaaaaggaaagattctggggaatccggcctag

SEQ ID NO: 102799 - DNA, 330 bp, Enterobacter aerogenes
atggcagagcaaactattctcgacatgtgctgcggctcccgcatgttctggttcgacaaacaggatgagcgcgttggcgaaaatgcttggatgggtaagaaatacggacgactgaacaaagacacctggcgcgatgatctccgagctgggttcgcggaggcgtttcgtgtactgcggccacacggcgtactcatattcaaatggaacgaaacccagataccggttagtcagattctagctctgacagacgagaaaccggcgatcggccagcgcaccgggaagaacgataaaacccactggatcatcttcgtgaagggaaccaaccaatga

SEQ ID NO: 102800 - DNA, 435 bp, Enterobacter aerogenes
atgtctgacgtctcaacaaacctctataagagtcagttgttggactattactatcagcggcgcgctgaatcgtccattaacaaaggctctcgatttttaatcagcaaggccgttttcggtaccagttcactggttactaagaaaggagatggcacttatgagattggagaactgccaaaggctttcgatctggcagaactgaccagtcaattttgcaccatcaacctcgtcccaacctactcaggcgggataattactgtccgaatggaccttgatcaaagtcagttgcaggaagggaaaaactacccattcaacactctggttgttctggataacgagaataagccaatcgccattatttgtgtccaggaagactcgctgtatgtgggcaaaacatataccgcagttatggccataaactcgactacagcataa

SEQ ID NO: 102801 - DNA, 837 bp, Enterobacter aerogenes
atgcagcgttcctggtttaataaccggcttacatcagctaagcaaaagtcattactttataaatcattggctgatttggttcagtcaatgatggacacctttgttgacccatggttggagcgaattaccaaccggaagtctattttctccatgagcaaggaggatctggagactaggacaaatgaacttggccagttttttactatcagaacgtcgaattcatcttccgttccgatgttgttacaacagcggtttgatgagatccattttaagggtactgaacgccctataaaccagacaatttatcgcgaatttaacggtatatcggttttatgggatccaatatatgctccggtggactttgaacgtcatccctatggcacggtcctgattccagaaagcacactggaaaccaccggcggcacattcggcgagatgtttctgacttccagaggaatgatcagtattcccataaacgacctggcccggacaatgggtattactggaacgatagatcagtccgcaattacagaagaaattctcagaaagtttaatcagttcgtaaagcctctactgccactgcatatagtgtttgatgggcttacgctctatttgtcggttgttgtaaatgaacaggccgacatgatcactttgaatgagatttctgataccgaaaaagcattctgctggtttgaaacttcggatacaacttcgcttactgaagttacgtcgattaacgccccgatcactgcaacgccgggcggcactattgtgaaagcaacgcctacgtttgatcgcacccgcgcagatgatttgctgttggatagcgatgcgtga

SEQ ID NO: 102802 - DNA, 1434 bp, Enterobacter aerogenes
atgagtaaaacaacaccgactaaagacagtattcgtgcagagtttgaagagcttgtcgagaaagattcattctggtcgaagtttgtcggctctcaatttgtctcgatgctgacattgtttattacccagattgtctacaggtgctttcagtatgccgatgcggcgctggctgaaggctttatatcgaccgcgacgcggcgttcctctatcctggcagcggcagaaacgaatagttacgttggtaccaagccaacaccgtcatcggggatgattgagatcaccgccacaagtgaagatgccccagcggtaatccccaaaaatatgcctttaatatctgacgaccagtacccttacatgactatggatgtatgcaggttggttgacggcaccggtacggtagaagtggcacagttggaaatccaggaggtgacatataccgttacggcagccaaagaatttctggaagtcgtgttatcaaaggctctcactgctgtctgctataagctggaagtattcgtgacgaccgatggtaagaccacgcagtggtcttccagcactatgttccggttagccggtagtaaaagccaggtctacgttgagttttataagccatccgagcagttgggggttcgattcggtgatgggctaattgggcaaataccgccagaaggctcgaccattacacttaaggtatggtgcaccaacggagatataaccctggttgctggccaaaacctgacgcctgtcgattctgcggctaatttagctaatttgatttcagttaagacaacgacacccataaccgcaggtaccgatgccgaaacaacggagatcacacgtaatcgtgcacaatattaccttgcctatgatgatcaggtcgtatggggcggggactatacgtattttttggtgcgtaacatcccgggactgtcctgggtaaaggcatggggcgaaggccagcaagagaaattagatggtgcttataatgttcggaatatcaataagatatttatttcaggatggcatccaaacaaaagccagtcagagcttgaagaagtgatcctggctgcctttaagaaggtgccgaatgagttgaacaagaaattctcgtataaagaggtcagaaaactcccctttaagatcactatcactgggcggatatcggcaagcctgaccattgagaacgtgactgatgagctgaagtcggcactggaaacaaaatttgggcgtgactcaactttctttgatccgaaccgtgtcggcaagtacatcctaatcaagaaaaaagacgtttgggcatttatcgaaacgctgggttatttccgcgacttttatctggaatttgtcgagtggaatgagtccaacggcttttacgatttcgtttatctggatacagaaaactccacctttaatatttcgtatgaggaggagtga

SEQ ID NO: 102803 - DNA, 357 bp, Enterobacter aerogenes
atggccaacaataacgaaattgatcctttgctgacgctggagttatccggcgtaaaaacgtatgagtcccaggaggaggcctggggcgctcgtttatatgagtggctaaacacttatcagggtgaggtatacggagatccgtcatggggcaatgttttaccgctgtttaaacacgaaccgaccaacttgtcgcatgttcaaattgcggttgaggcaatgctgttgcaaaaactgacggtagatttacctgacataccgatttctggcttgtcagtagccgagggagatgcttttgataagttgaaaatatccattcgtatcagggatataactatcacacaggacgtggtgctatga

SEQ ID NO: 102804 - DNA, 3690 bp, Enterobacter aerogenes
atggaaagaaaaaacgccaatattgacgatgttataaggacagttgaaaccgccagcgcgaaagagctggaagagcttgcaggtattcgggaagctgttgaagatttgaaaggggaacgagttgcaactgttgatcctgtctctcgcagtgtgtcggcattaaatcgcacaatcgaaaattcacgtcctgactttgtgaccaatgtgccatcagtggactctattgttgacgcaatgaaacggcttaatttaggggacgtttctcgtatacgggaggacaaagtcactaaccgtgaacagcaggctgcaccaacagcgcacaatcccccaaatagacgaagagaggcaataacagaggatgttaaagcacagcggttagaaacggtcaaactcgctcgtgatttgaaaggggaacgcgttgcaacggttgacccagtatctcgcagtgtgtcggcattaaatcgaacaatcgaaaattcccggccagactttgtggccaatgcgccatcagtagaccctattgttgacgcaatgaaacggcttaatttaggggacgtttctcgtgtagttcaggagggcattgctcaacaggaacagcaggccaaatcaactacaccaaagggtaaaaaaagacgcaggaaggctatatcagaggatataaaggcacaacggaccgaagcagccgaacacgctcgcgaaatgttcgatcaaaaaggcggtgcgcaaaaaagccaaaaccaacgcgatgcgcgtggtcgttttattggaaagtcagggagtaaggccgcagcggaagatgcccgtgctgaacgtgctgaaaaggccaggcgcaaagaggatgatgagcgtctaaatgctgaatcaggtttattaaaaaaactgtcaaaagtagctgaaggcataggtaacccttcagagactcgtgccgtcgatgcgttaggttatgccgttgctggtccattgtgggcagcagggaaggagcttggcgggatatcaaaagaagttggtggatcgcttaatggcgccagaaagtctattgccgatgtgattcgtggcaatgacgataacagccgtagaaaaggtttttttaggcgtaaatcgcaaaatagtgccgatgtcgttcaggttaacacccaaaaacggacggttcaggaacttcaggagcagaccagcgaaattaaagagggcaatgacaagattctcagcgcccttgatcagatagccaaaaacaccgggaaaaagaagggcggcttgctgtccaaactatttagcctgttagggaagggggccggtggcgtcgcgtcgttgttaatggggcgtggcatgctgaaaaaagctggagcactcgcttttggcgctctgggggcaaagaaacttgtaggaatgctacgcggtggtggcaagaagactatcgcccatgaaggtggagatttggctgcccgggcagcaggtaaatttggattaaaggcagttggtaaaggggcgttacgcgcaattcccttagtcggcacagtggctggaggtatttatgatgcggtaaccggttggaatgatacagaagcgcaacgtcgagcgtttgggcttaaatcaggacaagagccatcattccagcaaaaagccgcttatacgttagccaatgttcttgatatggggggactggtatctggtattagcagcgccattggtgaggttctcaaatcacttggatttgaggatatcggcaatatgttgcaatcattttcgacggaaagtattgcccaggccattgatagtgggattaccaacttagaaacatatatttctaaccttggcgacaccatttctaccaagttcgaagattacacagcaaagattggtgatgctgtttcagcatggtttagcgatacatctaataagctgcttgaaaagctggatgccatcaaagacttctttactgttgataacctgaaacaggttttcagtgatgcaattgatagtgcaattgatttcattaagaacccagggaaacacattaaagaggcggctggtaatatttgggatggggttaaaaatttacctggtaaagcattagatgcagcggttgatgccgttaaaaatacccctgcggcaatgattgtatcaaaaatacccaatccgatcggcgaggctaatgcgaaagaaatcactccggagttaaaagctccggttaatagccaccaggagacgtctgattctaaaactgaatccgatgccaaacagagtaatattgctacccgcgtgataaatgcggcactggacacagcgaaagatagcaataaaacagttaaacaaactgccaatcagattatcaatgcaaatgccgtagaaacgggcaatagcgcgttgcagaaaattgataaagctattggtcaaaatagctcgtcatcatcgtcgcttaataccactggcaccaggaatgacattcagaaagctgcggatacttacaacaatggcaacttagatgtaaaagtcggaagtcttggcgctgaaggtaaggcaaatctcgataagttggctccgtattttgccgaactagagaataaatacggtcttccagaaggcactctttacgcgattgctgcaactgaatctggtggtaatccgtatgcaaaatcccaaaccggtgctctggggatgtttcagttcacggggattgctcgtgaagagactggcttagctgaaggtgaatcgtttgatcctgtgaaatcggcagaagctgcggctcttctcatgagcaagtatcttaagcaagccaatggagacttaaacgaggccatcactgcatataatgctgggtttggcactattaataagtggaaaaaaggcaccggtgacttatcgaaagaaaaccgtgagtacgcgatcaaggtcaatactcatcgtgctcgctatttaggtggtgaaatctatacacctggagcaggagcacagggtggggcgcaatatggagtgaggggaccactgcctgataacgctgttatcgatcagtatactggcctggcgtttacccctggtgatagcccgtttgagaaaggcggtctggtcgacaaaatcggcaatgctgttggcgttaacgatctggtcaacaaattcatgaatggccgggggatgcgtcgggaagtcgttcagggaacgctagaagaacgtgcacgagagaaggggaccgcaacagcagctggcaatgtgtatgttgatactccgatgccagttgaagaggcgcgtccggtggccaacaactcaagttactttgaccatctcggcgcacaaatggggattgatggactattcgataaactccgcaactcgccggggatgcggaaaaataatgcgcctgaaccagcctccacgtcccaggtgacgactgccgccaacgatttgcagcaaccaaccggtcgtatgcagatagacgggcaggttattagtgaccttggcggttccggtgccaagccgacaatgcagttggctgataataccgtttcacttgatggtgaaacgaagcggctgtttgcgcagatgacctcattgcttgccaggattgaagagcacaccaaagactcggcgaaaggccagggaactgtcgtaaaggtcagcacgcctcagccgggcgttatgcgcacggtaccactgtcaattgatgatccgttgatgaatgactacgcgagagttgattga

SEQ ID NO: 102805 - DNA, 882 bp, Enterobacter aerogenes
atgcttttaccccttttcccgctaccatcgcggccaactgaattaatccagttccgtcagccaaatattgctgatgcgatgcgtttcaactcgataacaccggaggaacaagaacagcagacaacagcgtatttaaaagccttgctggctgaagctgcgaaacatgatccactgaaatggacggcacaggaccggattaccgcgttatggtggatatttactggctcccgcgaaacaccgatcgagacatttacctacacctgtaaacattgcggtaaagagcattattacgattgcgatatgaatgctctggctgaagatatccaggtcctggaagtggaaccgttcattgacgatattgaggtgtctgtagagggcgtgccttatcaatggcgtatcgtgccgcttgatggttgggcaatggaaatgctggagatgcgccgagcagcattgccacctgaagacgacgcggaattcaaagaagcgatcgttgatttgcgtttttgggaattcgcttatcagtgtgaactttataacgatgttagcggtactcgtgaagagcaggctgagcgtcgttatgaaacgatcaaacggatggccattgatactgaatttatgaagctggcggcacacatccggctggctcatgaaaagctcgaacatggtttaccgtgctacatcgataaaggcgaaatgcgtcttcgtctcccgccgcacaaatgcccaaaccaggatacaaaggagtccacagagggtgcgtatacccgtctgtgggtgccctttcgggctaccgacttcattccacaggtggggattgaaaagctatcagaccttagtgtccaacctggttttgtatgggggtataccgattcaggacgctga

SEQ ID NO: 102806 - DNA, 612 bp, Enterobacter aerogenes
atggggcttaatgttgcttcagtaaagtcttatgtatcttcggcattaacgacgacattatttggctccggcgttggtgagcgggaagttggtaagctgacgtcaatcatcatgaacaaaatgttgttcgcgcaaggatggcagttctctgtcgaagttgatggactggagggggcagacttctttgccaaagatattacctaccacgattacagcatcgaatatgaaacgattaaaatcggcggagggaatatccttcaaccaacggagcgttcgcctgggcagataacaatgatggtcagggataccgttgatggcctcgttttggactggtttaagacggcaaaaagtcgggtgatcaatccggacggtactgggaatataccgtctaaatatttgctcaatgtgcgtatttatcggttgctgtcttccggtttaaccaaactggaaaatgagatgacggtattcccggttactaccggcgatgtcacctatgcgcgggatcaggtcacggaatttaagtcattcccaatgaccttcgcattgcacagcacgtttaaccaatcctcaagttctttggcttcccttctgggctttagtttttctctttaa

SEQ ID NO: 102807 - DNA, 567 bp, Enterobacter aerogenes
atgacaccacgacaattactcgaagacgtcaaatcccgcttcacacctttgattgcggatgaacctgccttactggaatccctgctaagaaaagcattgggaacctaccaggatagggcggggcacatcaagcggatacgcttcaccgatcaggccagtaaatcacttgcttgcccagctgattttcttgcgctcgtatcggttacagatcacaccggcgatcttgtctactccgatgtttacgatgggaatatcgagcttgaagatacccatcgagcggtatacccactgaatgtgtcatatctggctaatttgcgtgatatggatctggataatggggaagtgccacctgaaatcattggattactttctgactatctggaagtgttaatcgcgatacctaacactgatcgcctgcgaagaatatctatcgcggggaaactcgatgccagcaatttatccgacgagaacacgctgtatcagcgaaagctggatctagaagagaaaatgagcgcaacaagggcaattatcccgggaattgttcttttctcatccatgttgaagtga

SEQ ID NO: 102808 - DNA, 477 bp, Enterobacter aerogenes
atgcgcatcaaacgatattttctaattcttgctttgcttactccgttttcatcaatggcaaatgtaagcaaatggtccaccagcgagactcatggcgttcgctcttatgctgtttccagcaaagataattatacgcttacatttgagtgcgatgttggatttaataatacggatcccaatcaagtaggaacacgactactcactctcatgaaaacagaacctggcggtgagtcatttgatgctaaaaaagaacaaataacgctgaaagttggtgatgatgaatatcctatcagttctatcggttcctctgtgggtgatagttactggtatggtttttggtcagatacccctgatatggaagttaaaacattcgatgcatacgtagacggaaaaaaaatcgcaacatttacgctacgtaaggccgcagagcttttcaacgcggcacctgaagatggctgcctgaagcgcgcaaaataa

SEQ ID NO: 102809 - DNA, 648 bp, Enterobacter aerogenes
atgagaaaactattactaccgttattatttatggctgggactgttaatgcagcatcaagcgtaaaggagatttgtaccgattatacgaaataccttgggcacgtttacggttttgctgtcagtcaagacgaatccatgcgcaagaagttactatcagatatgaaacgccttaaactttctgaagcgatggtgcagcaagaactgtataaagtcgcaaccaacgaaaatgctaaatatcaatattctcgcctattaaatcccgacgcaaacgagatcaatcgaagctctttcgattatatggtaaaggcatgcgaaaccgctcctgattttgctatccctagctggggcgtactggtggcgagcaatgccgttaataaagaagacgttggaagaaatggcattgattcaatcagaaacgccccgggaatgcgccatcaaaacgttcagggtacgcttgaagaacgggccagggggccgggtacaaactccccaatgggaaacctctccccggaggaattgcaagagtataaccaacggatggagcagtatgagaaagctgcacgcgaaaaaatggaacaacaaaaaaacggctctcttaatactttccagcaaggtttaaaagcgcttaatttaccctatgaatggtga

SEQ ID NO: 102810 - DNA, 222 bp, Enterobacter aerogenes
atggttaatgccaatccttgcgcacgccaagaattcatctggcgtttctattcctgtaaaaaacaccactatcacttcgttatcgctgcaacagaagacgaagcacgctctcaattgcctgatggcccctgcatttttactgcccgtttttcaactaactcgcgcaattcacttagttactggagcctccccttctctgccgacgttcaggggggtttatga

SEQ ID NO: 102811 - DNA, 786 bp, Enterobacter aerogenes
atgaccggtaataatttaaatgttgaaaaaccagcacctgttgcttcagctacgccagcaccagccctgaatgtcatccccaacaccggagacacaatcgacagccaaacattgttgaagatggtcaatgaggcacggaaattatgtagcgaaaaaccagttcgcaacaatgatttcattgccagagttaaggatgagcttgaaggagaaacctacgaaattttcgtaggtcaaaaaaacggcgcagaaatagatattataaccatgacctacaaacaagccctgcgagttgccgcgcgcgagtcaaaagcggtccgccgttcgctgatcgacaaactggaagaattacagcaggcaaactcccctaccccatcgatcccccaaacattaccagaagccctacgcctggctgccgagttggcagaacagaaaatgcatctggaacaacagctggtggccgcagcacctaaagtcgattttgccgaccgggtatcagtggctaatggaatcctgatcggtaactttgcaaaggtcgttggacttaagcaaaacgcccttttctcatggttgcgccagaacggcattctcatggcttttggtgcgcgcaaaaacgtaccgcgccagcagtacattaacgccgggtatttcacggtgaaagaagtggtgctggatgatgaaaatggctatcagatacggctgacgccacaattaacgggtaaaggccagcagtggttaactcgcaagctacttgatgctggtttgttaaaaccagtagcaataggttaa

SEQ ID NO: 102812 - DNA, 801 bp, Enterobacter aerogenes
atgcaacaaacattcaatgcggatatgaatatatcaaaccttcatcaaaatgtcgatccttcaaccactctgcccgttatttgtggtgttgaaattacgaccgaccgcgctggccgttacaaccttaatgctctacacagagcgagcggactcggtgcccataaagcgccagctcaatggctaagaacgctgtcagccaaacagctcatcgaagagcttgaaaaagaaactatgcagaattgcatagtttcgttcgaaggccgtggcggcggcacttttgcccatgaattgctcgcagtggagtacgcaggctggatttctcccgcgtttcggctgaaggtaaaccagacatttatcgactatcgagccggaagattacaacctgctattccgaagagcctcccagaagctctccgtttggctgctgacctggcagagcaaaagcaacggctggagcaaaaaatgctgatggatgcacctaaagtcgaattcgccgaacgcgttgctaccgccagcggggttctaatcggcaactatgccaaagtgctcggcctgggccaaaactatctcttcacctggttgcgtgataacggaattctgatcgcaaccggtgaacgcaggaacgtccccaaacaagaatacatatcccgtgggtatttcacccttaaagaaaccgtgatcgatacaagcaatggaagcaggatttctttcacgactcgtataaccggcaaaggtcagcagtggctgatgaagcgattgcttgatgctggtgtgctggtacctgtcgcggcaacgcgctaa

SEQ ID NO: 102813 - DNA, 810 bp, Enterobacter aerogenes
atgagcgattttactttttctggctatgaattggccttctttgtaacacactccggtctatcccgtagcgccgggcatatcctgtcgcaatgtgcaaatctcgcggcaacaaccagtgaatacttcattcacaagccccaccgcctgatcgcggcagaaactggttatagccaatcaaccgtcgttcgtgcattccgtgaagctgtaaacaaaggaattctatctgtagagattgttatcggcgatcaccgtgaacgtcgcgctaacctgtaccggtttacaccatcctttttggccttcgcacaacaagccaaaaatgcgctgattgaaagcaaattaaagatctcttcagcggcaaccaaggttaaagctgttctcgctaagacattggctttatttaattttttatccacacccccatgtcaaaatgataccccctccccatgtcaggatgacgtggcaataaagaataagaagtcacaagttaaaaaaacaaaaagatcagtttccggcggtgccggaacgatcagactcaaaaaattgacttcatggatcgctgagacaaaagcaaaggctgacaatctgcggttatccaaaaaacgcgcacaaaaacatgagttcaagcagaaagtagaggcggcagcgcggaaatatgcttacctgaagaacaagcgttctcctgatattggcggggtatcaaacttcgataatctgccgcattgcatgacggtaaacgaagctcttaatgcggttttagccaaaaataaagataacgaacaatggggtataccggcaggattcagagggtga

SEQ ID NO: 102814 - DNA, 246 bp, Enterobacter aerogenes
atgcaatctgattttttacagttagcgatcgcttttgcaggatatgtttgtattggcttctgtgtatacatgatcagccgaaaaatgcttgtcgatatcgaccgcaaagaacaagcagagaagatcttagtatggattttctttggcgcggtctggccattagggatcatgtttgctgcaacatttcttctgatgtggatattcacccttccaggtgatttctatagaaaaaaagccagacattga

SEQ ID NO: 102815 - DNA, 156 bp, Enterobacter aerogenes; identical to SEQ ID NO: 23013

SEQ ID NO: 102816 - DNA, 510 bp, Enterobacter aerogenes
atggggcacaataacactaagggaaaccgtaaatttattaagggccgctatactgccaacgcggccaaaggcgaacgactggtatcttctgaattccagctcacttttgcaggccatgaagatatcagcgtactggttcgcacgtcgcaaattcctgaaatgacccgcgaggatgtggaggactatggtccgaatggtgtgaagttcaaccagcacggtccaattcgaaactctggggaaatccaggtccagtgcgtggagactatcgaaggcgatattcttcagttcattaaagatcgcattgcggcgaaggactatgttgatatcacgatggctgcgacccctgaatccaaatcttccggggttaacgctgtgacaaaagctgctacaacaattgaaatgttggactgcaaaatctacagtgatgcaatcgactttagtaccgaagatgtgactgccgctgtgcgcccgtcacttcgtatcgtctacaactggattgagtgggattaa

SEQ ID NO: 102817 - DNA, 465 bp, Enterobacter aerogenes
atgaacatggcccagaattgggaagcgccgtttaccggtatgtccatggggtctgttgctggtgctttcagtggttttgcgcaggttggtactgaaacaacgtcggtggcccgttggaacagcttaatggtttgggaggggggaacaccgccgactttcacgctgcctgtaactttcatcgctttgtttgacccattcacggaggtttcaggagctatcgccgcattgtcagcgatgattagcccggaacttaaagatgccagcattggtggtcgaataccggagcgtgtgacgctaaacattggtcgccggatcaacatcattgatgtcgctatccaggacataagtttcgatctcgatgcgcccagggacagcaatgggcatttcctgaaaaacaccgtcaacctccagttgaccggttcttcgatatataacagctccgatattgttcgggcgttccagtaa

SEQ ID NO: 102818 - DNA, 816 bp, Enterobacter aerogenes
atgagcaaaaacttttttcaatccggggcatttttggggaatggactgtcccgtttcgctttgaactctgatcctgtgcagctgatggagtctgcccgagcaagcgccgaaccgccaacagatccggttattaataataatccggaaccggcggcacagactaacgataacgttccatctgccccggctccagagcaaatcctggaagggaaagacggtaaagaatggaccgtcgaacaggcgcaccagatgattctggaagctgcaaatcgaagtgctatgcagaatgcgttgagtgatgcggccgacgccgttttctcctgggctgatagcggtgatctgactttcgactcccttgatggtttcgttcaggctatcgctggtatctctgatgacgacgactccgaagttacagaagaacaggacgatgcctataacgaagcatgggcaaatgttgctgacttcctcgcagcatgcggtgtagatgatgacctgatcgaagcactggctgacgatgaagacgacgacgctgctgctgatgttggtgcctctatcgctggtttagatagcgacgaccgcgacgaactggaagcggcgtttgttgttgctggcacttctgatgaaatgctgactgaagcatttaagaaggttgttcgtaacggtgagatcaaactcatccgtaaacgcctgcgtaaaaaacgtctgactgcggctcaaaaatcggcgctgaaaaaagcgcgtcgaaaagcccagaccggcgcggcaaaacttgcccgcaaaaagtcaatgaaactgcgccgtaagcgccttggctaa

SEQ ID NO: 102819 - DNA, 1590 bp, Enterobacter aerogenes
atgtctcaatattcaattcaacagtcattaggtaatgcatccggcgtcgcggttagcccgatcaatgccgatgcgacgttatctaccggtgttgcattaaatagcagcttgtgggctggtattggcgtatttgcgcgtggcaagccgtttactgttcttgcggttactgagtccaattacgaagatgttcttggcgaaccgctgaagccgtcttccggctcacagtttgaaccaattcgccatgtgtacgaagctattcagcaaacgtctggttatgttgtccgtgctgttccggatgatgcgaagttcccgattattatgttcgatgaatcaggcgaaccggctaacagtgcgttgccatacggttctgaaattgaacttgatagcggcgaagcctttgctatctacgttgatgatggtgatccgtgtatttcacctacccgtgagttaaccatcgaaacggcaacagcggacagcgcgggtaatgaacgcttcctcttaaaactgacccagacgacttcgctcggtgtggtaacgaccctggagacacacactgtgtctttggcggaagaagcgaaagatgacatgggccgcttgtgttatctgcctacggctctggaagcccgttctaaatatctgcgtgcggttgttaatgaagagctgatttctacagcgaaagtaacaaataaaaaatcggtggcattcactggcggtaccaatggcgatcagtcgaaaatctcaaccgctgcttacctgcgtgcggttaaagtgctgaataatgcgccgtacatgtacaccgctgttcttggcctgggctgctatgacaatgcggctatcaccgcattaggtaaaatctgtgcagatcgcctgattgatggcttctttgatgtcaaaccgacattaaggtacgcagaagcactaacagctgttgagggtaccggtttacttggtaccgattatgtaagctgttctgtctatcactacccgttctcctgcaaagacaaatggacccaatcccgtgtggtcttcggtctgtctggcgcggcgtatgcggcgaaagctcgtggcgtcaagaaaaactctgatgtcggcggttggcattactcaccggctggtgaagaacgtgccgtcattgctcgtgcgtcaattcaaccgctgtatccggaagataccccggacgaagaagcaatggtcaagggccgtctcaataaagtatctgttggcacctctggccagatgatcatcgacgatgctttaacttgctgcacgcaggataactatctgcacttccagcacgtcccatccctgatgaatgcaatcagtcgtttctttgtccagttagcccgacagatgaagcatagcccggacggtattactgcggctggcctgactaaagggatgaccaaacttttagatcgctttgtcgcctccggcgctctggtggctcctcgtgatcccgatgctgacggtacagaaccgtatgtgctgaaagttacgcaggcggaattcgataaatgggaagtagtctgggcctgctgcccgactggcgtagcccgtcgtatccagggcgtaccgctgcttattaagtaa

SEQ ID NO: 102820 - DNA, 1707 bp, Enterobacter aerogenes
ttgagtaacttacgcgaataccagaatcgtattgcagatatcgcaaaacgctctaaagctgtgcttggctgggcaagcactgcgcagttcggtactgataaccaattcattaaagatgatgccgcgcgtgccgcatctatccttgaagctgcacgtaaagacccaatttttgcgggtatctctgataatgccaccgctcaaatcgctacagcgtgggcaagtgcactggctgactacgccgcaacacataaatctatgccacgtccggaaattctggcctcctgccatcagacgctggaaaactgcctgattgagtccacccgcaatagcatggacgccaccaataaagcgatgctggaatcagtcgcggcagagatgatgagtgtttctgacggggttatgcgtctgcctttattcttggcgatgatcctgcctgttcagttgggggcagctaccgctgatgcgtgtacattcattccggttacgcgtgacaagtccgaaatctatgaaatctttaacgtagcgggttcttcttttggctcctatgctattggtgatgttctggacatgcaatccgttggcgtgtacagccagttgcgccgccgctatgtgctggttgcaagctccgacggcaccagcaaaactgcaaccttcaagatggaagatgtcgaaggtcagaatgtcccgattcgcaaaggtcgcacaaacatctacgttaaccgtattaagtctgttgttgataacgggtccggtactctgcttcacacattcaataacaaagcaggcgaacaaatcactgttacttgctctttgaattacaacgttggtcagattgccctgtcgttctccaaagcgccggataaaggcactgagatcgccattgaggcggagatcaatatagaagcagctcctgagctgatcccacttatcaaccacgaaatgaagagttacaccctgttcccaaaccagttcgtcatcgcggctgagcacacggtacaggcggcgtatgaagcacagcgtgaatttggtctggatcttggctccctacagttccgcaccctgaaggaatacctgtcccatgagcaagatatgcttcgtcttcgtatcatgatttggcgaactcttgcgaccgactcctttgatattgcactaccagctaaccagacctttgatgtgtgggcaaccatcattcgaggcaaattccagacggtatatcgcggtattattgagcgtgttaaatcttctggtgcgatggggatgtatgccggtgctgatgcggcatctttcttcaaacaattgccgaaggatttcttccagccagcagaagattacatccagaccccatacgtccactacattggcactctgttcggcaacgtcaaagtgttcgaagtaccagaaggtatttgtacgaacctgaccgccgacggtatccagttcagcccaatggatgtgctgtgctacgtccgtgatgaaaatccgggcaaagcgggcttcgtaactggtgatgcagtcccggctgtcccattccagcatccgaccaccccggcactagtcaaccgaaccactctgtggggttcggctatcaacgatatgcatccacgcaacggtgctgactacttcacccgtgtaactctgactatggcaaaaaatggcggaattaacttcctgaccggtaacacgattgatgctggtgactctgagtaa

SEQ ID NO: 102821 - DNA, 1002 bp, Enterobacter aerogenes
atgtcaaagaaaaacagaccaacaattgggcgaacccttaatccttcaatattaagcggatttgatagttcttcagcctctggcgatcgagtcgagcaggtattcaagttatcaactggtcgccaggccacatttattgaagaggtaatacctccgaaccaggtagaaagcgatacctttgttgatcagcataacaacgggcgtgaccaggcatctcttacgccaaaatcattaaaaagtatccgaagcactattaagcatcagcaattttaccctgcaataggtgttagacgggctacagggaaaattgaaattttggatggttcccggcgtcgagcttctgccatcttagagaacgtagggttgcgggttttagtcacggaccaggagatcagcgttcaggaagcgcaaaatttagcgaaagacgttcagacagcattgcagcacagcattcgagaaataggtctgcgtttgatgcgaatgaaaaatgatgggatgagtcagaaggatattgcagccaaggaagggctgtctcaggcgaaagtcacgcgtgctctccaggcagcgagtgctccggaagaattagtcgcccttttccctgtgcagtcggaattaaccttttcggactacaaaacgctttgtgctgttggcgacgaaatggggaacaagaatttagagtttgatcagcttattcaaaacatatccccggaaataaacgacatcttatccattgaagaaatggccgaagatgaagttaaaaataaaatcctgcgcttgataacaaaggaagcctcactactcacggataaaggttctaaagataagtccgtagttactgaattatggaaatttgaggacaaggatcgctttgcaaggaagcgcgtgaaaggccgtgcattttcttatgagtttaatcgactttcaaaagagctacaggaagaactcgacaggatgattgggcatatccttagaaagagcctcgataaaaagccgaagccttaa

SEQ ID NO: 102822 - DNA, 1197 bp, Enterobacter aerogenes
atgagtgattccagccagcttcacaaggttgctcaaagagcaaacagaatgctcaatgttctgactgaacaagtacagttgcaaaaggatgagctacacgcgaacgagttttaccaggtctatgcgaaagcggcactggcaaaattgcctctactgactcgagcgaacgttgactatgccgtaagtgaaatggaagaaaagggctatgttttcgataaacgccctgctggctcttcaatgaaatatgcgatgtcaattcagaacatcattgacatatatgaacatcgcggagtgccaaaataccgggatcgctacagcgaagcgtatgtgattttcatctccaatcttaaaggcggtgtgtcaaaaactgtatcgacggtttctctggcgcatgcaatgcgtgcccaccctcatcttctgatggaagatttaaggattctggttattgaccttgatccgcaatcttcagcaacgatgtttttaagccataaacactctattggtatcgtaaacgcaacatctgcacaggctatgttgcagaatgtaagccgtgaagagctgttagaggagtttattgttccttctgttgtacctggggttgacgttatgcctgcgtcgattgacgatgcctttattgcatccgattggagagagctgtgcaatgagcatctaccgggtcagaacatccatgctgtcctgaaagaaaatgtgattgataagctgaagagcgattatgactttatcctcgttgatagtggtcctcaccttgacgccttcctgaaaaatgctttggcctcggccaatatactgtttacacctctgccgccagcaactgtcgatttccactcatcgcttaaatacgttgcccgccttcctgagttggtgaaactcatttcggatgaaggctgcgagtgccagcttgcgactaacattggttttatgtccaagttgagtaacaaggcagatcataagtattgccatagcttggctaaagaagtgttcggtggggatatgctcgatgtcgtcctccctcgccttgacggttttgaacgttgcggcgagtcttttgacactgttatttcagctaacccggcaacgtatgttggtagtgctgatgcattgaagaacgcgcgaattgccgcggaagattttgctaaagcagtttttgaccgtattgaatttatcagatctaactga

SEQ ID NO: 102823 - DNA, 573 bp, Enterobacter aerogenes
atgcttgtacatagcattctctgcatgtttactcctttgccaagtgtgtcacaacatgctttggcatcctccacgtataaaggacgcggatttcttctatgttcaggttgtagcctgaatcattttggtgatttcctgcttcaacgggcagccaggcttcactctctatcaactggtgagaacggcttgcccggcagcttcgatgtgtgctggagggagaataaaagtctaagatgtgcgatagagggaagtcgcattgaattatgtgctgtggagggatcgctggtatcaaatatgtgtgctggagggaaagacagagaattacatgtgcgctggagggaaaaactgatggacagatgtgtgctggagggaaagtctgggcaaactgcggggcgtccccctccagcgcacatcaaaaacaggaaattggacaagccttcccggcagcacacattttttgaatgcagctgccctccagcacacacttattcggggagtttcagctttggattgcgagaatggacgattacaaaactttcccggcctttcttctcaattgaacagtcgagatag

SEQ ID NO: 102824 - DNA, 861 bp, Enterobacter aerogenes
atgaatcaatcatttatctccgatattctttacgcagacattgaaagtaaggcaaaagaactaacagttaattcaaacaacactgtgcagcctgtagcgttgatgcgcttgggggtattcgtgccgaagccatcaaagagcaaaggagaaagtaaagagattgatgccaccaaagcgttttcccagctggagatagctaaagccgagggttacgatgatattaaaatcaccggtcctcgactcgatatggatactgatttcaaaacgtggatcggtgtcatctacgcgttcagcaaatacggcttgtcctcaaacaccatccagttatcgtttcaggaattcgctaaagcctgtggtttcccctcaaaacgtctggatgcgaaactgcgtttaaccattcatgaatcacttggacgcttgcgtaacaagggtatcgcttttaagcgcggaaaagatgctaaaggcggctatcagactggtctgctgaaggtcgggcgttttgatgctgaccttgatctgatagagctggaggctgattcgaagttgtgggagctgttccagcttgattatcgcgttctgttgcaacaccacgccttgcgtgcccttccgaagaaagaagctgcacaagccatttacactttcatcgaaagccttccgcagaacccgttgccgctatcgttcgcgcgaatccgtgagcgcctggctttgcagtcagctgttggcgagcaaaaccgtatcattaagaaagcgatagaacagcttaaaacaatcggctatctcgactgttcaattgagaagaaaggccgggaaagttttgtaatcgtccattctcgcaatccaaagctgaaactccccgaataa

SEQ ID NO: 102825 - DNA, 402 bp, Enterobacter aerogenes
atgtttgcggttaaacaagaaataaacaacgctacttctttgttcgaaattgagagtattaccgttggatatcctgggtcagatcaatttaaacaggcgttcgagattgctgaagaactgggtatcaaaacgcctgatgcgattgaatatatccctgttgcgtacgaagatgaggagatgacaaaggcaatcggggaagagcaaactttgagtacagagcgtaaggatgtacagcgggatgactgtatcgccgtgatttgctctggggttgcttctgaaatgttccccgacctccctgccataggaggtgttggttatcaattcctctacaaaggtgatacgttacgcatctatacaagtagtttgttgatcgaagaagtaggtacggaaaacgacaactaa

SEQ ID NO: 102826 - DNA, 360 bp, Enterobacter aerogenes
atgtccgatatggaaattgaaaaagagattctggccaaaggcaaaacagcaccacgcctgactcctgatcacatcgagagtgtgattgccgaagagcattatttcacagcttttgacggcattcgcgctgcgcacgaaggcgttcgtgaggtgctgtctgttcatccctctacgcgtagcctgaccatctgtgtcttggtgctgtgcaatggattcattgttaccggggaaagcgcctgtgccagccctgaaaatttcgacgcggagattggccgtaaggtggcccgtaagaacgccattgagaaaatctggccgctggaaggttatctgctgaagcaaaagctcagcgagcagatttaa

SEQ ID NO: 102827 - DNA, 423 bp, Enterobacter aerogenes
atgtcattcttttctacgttaaaaacagctttgtctttgaaggagaaacttgctgctactggtgttcttgttctgatttgcgcacttgttggtgctgggtttgcatgggaacgtcatcagctaaagcaagccatggagaaaattggcagtcttgatcaggctgttaaggaacgtgataagtcaataatggatcttaaccagaccattgagacgatgaacaaagcagagcaacattttcacagccaggaagtgaaaaatgaatcagaacaagccaaatatgctgacaggcaaatggaacgaaaagctgaagttcagaaacaactggttgcggcgggtaatgttcgccagcgcattcctgctgacactcagcggttgctccgggagtcgatcagcgaatttaacgccgacgccgacaaaggttaa

SEQ ID NO: 102828 - DNA, 789 bp, Enterobacter aerogenes
atgctggaaaaagactaccagttatccgcatataaaaaattggccgccgccggtgggatgaaaacacctggtgccataacatcggcacgaaacagtgctaacacagcaaaactgcttgcagaagaattgaccggattaattctggatacaattgtctatcccgacactattaccagctatgtttcaacgatcagaacaaccacaaccggcttaacgaacattggagaactggcaactaagcacgcggacctgttggctggttatgcagatctgtcaatgctgcttcaactcgatattggttgggatgtttactgccgtgctaatgagcgagaagtttcagaactgccgatctctattgccattggtgatgtgaatattactaaatcgcttgaggacgctgttaacgcgcttaatacatcaagtttagtcgctgctatgggggagattaaccagacccttaacactggctcaggaagctcgtcaggctctggttcaggcggcggcactgccactcccccaccagcactaacagaagagcaaattgaatctctgaaagtagcaactgaacagtttggggttgttttcaaccagacaacagcgcccacaactgcgttacaacagcagtatgaacgagcgaatgaaagcgccaacgtagccataactgcttataaccatgctatcggtaccgctcttgcggaagcatcagcaaataaggtcagcacagccagcgcagttgccgctttggttcctgattctgttcttgatgaattaaacaaagcggcacagtaa

SEQ ID NO: 102829 - DNA, 285 bp, Enterobacter aerogenes
atgcagatggagctaataagccgcaaagagttcgatagccgtgtaaccagcggtgaactcgacaacttgcaggctatcaaggtgaaagaaggcttttgcctcattgggaatcagagcggaacaaatcgcgtttttatgcttcgccgtacggatttgaagccatttgtctggaagaacgaaattggtcccagctcatacgctcaaactagggggtgcctcaacctggcctttttctacaaaaacgagctttctgtggttgatattcaagggttacaacatgtttaa

SEQ ID NO: 102830 - DNA, 906 bp, Enterobacter aerogenes
atgtttaagcactggaaaaacattactatttataaactttctcgtgaagcggatctgaccgacttagaagataaaaagaaaatgatccttttcacgccatgcggtagtcaggatatggccaagttcggttttgtatctccatttggtgataattccgaagttatcgctatgcatggaaatggttttatccttgttgaagcaaagcgcgaaacaaaaatccttcccccgccggttatccagcgagctattcaagaaaaaattgaaaaactcgagcaagaacaagcgcgtaaactgaagaaaacagagaaggactccctgaaagacgaagttctgcattctcttctgccacgggctttttcaaagttttctgttatccaggcgatctacgacggttcaactaaacgtatctatatcaatgccagcgcgcggcaggcagaggatatgctcgcgcttatgcgtaaatctctgggttctcttcctgttgttcccctaagtgttgaaaatcccattgaattaacgctgaccgactgggtacgtgatggtagtgctccacagggatttcaaatgggggatgcggcagaacttaaggcagtgcttgaggatggcggtattgcccgagtgaaaaagcaggatttgggaagcgatgaaatttccacacacctggaagctggcaagctcgttactaagttggcactcgactggcagaaccgcattaaatttacactggaccataacttcagccttaccagcgtcaaatttgcggatgaattgcttgagcagaactctgatattgatagtgaagatgttgcgcagcgactggacgcagatttcttcctgttgaccagtgaaatttcgtgcctggttgatgctctggtaaatgcccttggtggagaggctaagcagtga

SEQ ID NO: 102831 - DNA, 2265 bp, Enterobacter aerogenes
gtgaaagagctgtgctatggatctgtttgcagtggaattgaagccgcgagtattgcctgggaaccgttgggtatgcgtccggcgtggtttgctgaaatcgagccttttccatctgccgttcttgcgcaccgctggccccatgtcgccaaccttggcgacatgacaaaacttgccaaaaaagtcctggctggggaaatcgaatcccctgatgtgctcgtcgggggtacgccttgtcaggcattcagtatcgcgggcttacgtggtgggcttgatgatgaacgcggcgcgctaactttgaagtatgtggagcttgcaaatgcaattgacgacaaacggtctgagtccttcctcaaaccgacagttatcgtctgggaaaatgtcccaggagtcctgtcatcggcagataacgccttcggatgtttccttgccggattggctggagaagatgcgccatttgaaccaggtgatcgacctgaatcaggaaaaagtaacgcgttctggcggtgggatggcaaaaccggttgccatgctccaaagtggccgcagtgtggttgtatttatggaccgcagcgaaaggtggcctggagaatccttgatgcccaatacttcggagtggcacaacgacgccgacgcgtgtttgttgtcgcaagtgctcgaacagacttcgatcccgcaacggtactttttgagttcgaaggcgtgcgccggaatattgcgccgagccgaaaaaagaaggaaatcgcttccgccattactgcaaatggcgctgcaatcagtggcgaaagcctaaatccatgcctacacgctggcatgtcccccggtatgaaatcgacgaaatccgtaaacggtttcaggatggcggcatttggggaatatattgacgatgaaaccgcatcgacagtaaaggcaagagactttaaagatgccactgaccttgccgtttttagcagcactggagcaggtttttggtcagaagggcatggtacattgcgggcgcgtgagcaagaaagccatgagcatcttgttacattggcttttcctgagcgtatgagtggtacacaacatgcagcaactaagaatacttcaccatctctaatggctcaaaatccaactgctgtttgctatgaagtaagaaacgaagaagtagctgtccgccgtcttacccctgtcgaatgtgagagacttcaaggttttcctgatgggcatacattgatccctacggaaaagcgtaaaaaagttaattcagatgaactggcatatctgcacaatcactatccagatttaagcgaagaagaggccgcaatgcttgcagctgacggaccgcgttacaaagcgatcggcaatagtatggcgataccagtaatgcgctggattggcgatcggattgccaaggctgcatgtcggcagaaggaagggagtgaaacaaaagagcgaaaagttaaaccagcggcagaattcgaacggtccatattcaaatgggctggtggaaaatttggtgttctggaacaaatctttcgctatttgccagaagggaagcgcctgattgaacctttcgttggtggcggagctgtcttcatgaatgccggataccaggaaaatctgctaaatgatgtgaatgctgacctgattaacttttacaagactctgcaacgcgaggcgcattcacttatcactctggcacatcgtttcttccaggactacaacacgcaggaaggatacctggcagtacggaatgcgtttaacaaacaagtctatgatgatttacatcgcgcagcggcgtttttgttcctgaaccgacattgttttaacggattgacgcgttacaaccaagccggtgagttcaatgtcggttatgggaagtataaaactccgtatttcccattgcaggagatggaagccttccttggtgcggaagggcgttctgagtttgtatgtggtgattttgctgcggtgattgaagctgccggagaaggagatgtcatcttttgcgatccgccgtatgaaccgctcccaaatacagagggattcacgaactattccggtcatgactttaagtttgaagagcaaaaacgcctggcgtctctgttgacggatgctcatcgccgaggtgcaaaggttctcattactaacagtggcgcgccaaacatcagagaactttatcaggacagtggcttcagagtggaacctctttttgccagacgttctgtgtcttgtaagggggacactcgaggtgttgctcatgacgttatagcaatgttgctctaa

SEQ ID NO: 102832 - DNA, 132 bp, Enterobacter aerogenes
atggtgctcaagctgtccgtgctggtggatttcaccagcacaatcctgtcggttttatcggacggggcgttggtggcagtagccgtaacattggtatggccgatatttaaaatagcttcgaaggatcagtga

SEQ ID NO: 102833 - DNA, 1365 bp, Enterobacter aerogenes
atgtctgcatcccctcttgaatccatgccaaattcccttagtgcagaacaagctgtacttggtggcttaatgcttgataactgccgctgggatgaagttgcagatcgtatagttgctgatgatttttataccagtgctcatcgtgaaattttcagtgagatggagaggttattaagtcatggcaaaccgattgatttgataacacttgctgaagcacttgaacagaacggtaaattagaacgcgccggtggttttgcgtaccttgcggagatgtcaaagaacacgcccagcgcggcaaatatttgtgcttatgcggatatcgttcgtgaacgcgcggttgttcgtgaaatgatttccgtcgcaaatgaaatagccgaagctggatatgcgcaggatggcaggggcagcaatgaattgctagatatggccgagcgccgcgtttttgaaatagctgaaaaacgacaaaagagcggtagtggtccaaaagatatcgccagcattctcgatgcaacggtatctcgcatagaagagttgtttcagcgaccacatgatggtgtaacggggcttgatacgggatttaccgatctcaataagaagacggcagggcttcagccgtccgatctcatcattgtcgccgcccgcccatctatggggaagaccacgtttgcgatgaatctcgtcgaaaatgccgcagttcgtaacgataagcccgtattggtttttagccttgagatgccgagccaccagctgatgatgcgctcactggcttctcttgcacgcgttgatcagactcgtattcggacagggcaacttaacgacgaggattgggcgcgggtttctggcgcaatgggtattctgttggacaagcagaatatttttattgatgactcaagcgccctgacacctacagagcttcgttcccgcgctcgtcgtgtttataaagaaaatggtggtttgagcatgattatgatcgactacctgcaacttatgcgcgtccccgagctgcaagataaccgaacgctggaaattgccgagatttctcgctcactgaaggcgttggcgaaggaattacaagtaccggtggtggcattgtcacaacttaatcgatcgcttgaacagcgtgcggacaaacgaccggtaaattcagatttacgtgaatcaggagcaattgagcaggacgcagacctgatcatgtttctgtatcgcgacgaagtttatcacccggatagcgaaatgaagggcattgccgaggtaattatcggaaagcaacgaaatggcccaattggcacggtgagattggcttttaacggccaatactcacggtttgataactatgctggtgctgactggcaagaggattattaa

SEQ ID NO: 102834 - DNA, 999 bp, Enterobacter aerogenes
atgcaatggaatgaggaaaagccgatgaacatcctgatcattgggcgaaaatttgaagctatcagtgatgtgaaaacatatacggaaatgtgggcttataacctggcctgcgcctttagtgaggcaggggtaacattgcaataccatcgtccatattcccctggcgtcgaaagcccggaggattatgttgaagctgtgttgactgctgcgaccgcatgttctgcgaaggccattttggcaccaggattgaggtattttactacggtacccagggaaataggcatgcaactgtgtcgccgattctctggatgggtagcccaggtatatgacggttctatgctggattcggcaccagtcgatattacttttactgtccgcgatgatacctggcggtacctggataatcccggcaggttagagcgtcataatcgttttaacaaacatgttggatgggcagcgaatcaggagctgttccatctggaaaccaaaacagacgatattctgcgtatttttgtagaccacgctgcatttgatgttagtggttttgatcactccttaagtatccttatgaaccttcagcgtctgaccgttccgtatgaggccagaacgttgactgatgacggattggttaccattgatccggggaatatttcggtaactccatacaggcggacgccggtgccagcaaccgaatttgcagctgaattgcgtaagagtgacgtttttatcgttacgcatcccgaaagccttggattaactgttcttgaggcggcaatgtgcggggcgttggtattaacgcctcccgattgccttccgccagatcgcctggctttggtgaaccatatggttatcaagtcgcggattgattgggatgaggttattgctcgcgttgatcgcgtgaaaaatgctgaaaaggtccagtgtcacacctggtcggcaattgcggaaaagatgcttgagacgtttatcacgcagaaaccgtcgtgcggtaacggataa

SEQ ID NO: 102835 - DNA, 633 bp, Enterobacter aerogenes
atgggtagtttgacagggaagtatcgggctgtagtggtaagcgtcgatgaccctaaaggtctgatgcgtacacaaatacgtgttgtcggcatgatggatgggttaccagatgcctcattgccgtgggcagaagctatattgtccaatgcaaacacgttttcaccatttctgcccggcgataaagtatgggtagaatttccctacaatggggattctcgatggccattgataatcggttatgcacaggatgcatccggtggcgctcccaatgtgccgcctgaagcgtcaggacaaggtgaaggctatgtaccgcctgaagtcgaaggtgcaccagcacaaccatcaaccagcgccaaaaaagactttatttcgtcgcggaacggactaatggaggtccggacggcgggcggagcctgggccgttacgcacttgaaaagtggaacaacaatcgggttcaacgaggccggggagttatatgccatttctcaaggtccggcattcatctcttccgcaggaaatctcgatataaagtcaggcgcggatgtcgccctgaaggcggggggaagtatggcgatagaggccagcgggaatctatccataaaagccgctcaagtctctgttgacaaggcttaa

SEQ ID NO: 102836 - DNA, 1017 bp, Enterobacter aerogenes
atggccacaaagaccaccacagccccggaaactgattcaaaacgcactcagctattcctgcaatctgtttcaattgggcagaacgaaatccctcgcgaaatgatcgtaggatgtacctatgtcgaacctggggagctatctggtccccagcttatgctcatggtcagggattcaacggcttacgtggtcaataagctgggggtgaaatttgggacaatactgacagtttcacttggtgatccggaaggtcatggcggcatcctcttctcggaagagttctttgttcttaaagcgccgcgcaaggacgatactgtactgatttacgcgtttagtaacccggtgcggttattaaaagttccgtccaccagcgcacagtattttgttgataagcccccatcagccgtagtttcctctcttgctcctggtctgaaggtaaatgctgactcattcagaaaaacatccacataccacctaaatgttggagaaaaaccgaccaaggtattgcaggagatagcccgggataccggttctatgtgctgggcatccagggggacgatcaattttaaaagtatggaaaaaatggcaaacgccgctccatcgcttacttatgagtccgccaatcccaacacatccggatttacaattagtcagttcaacatcctgaatgccgattatgaataccagcgccgccacaattacagaatggccagttatgacatgaccaaaggtgtggtttactcaggtaaccaggaagaccccattaaatttacgagcaatcccgatcctaccgcgctggcgaactacaacaaattcattctcccccgcctcgatatgctggtggaaggaaatgccgcgctaactccgggtacgacgctgaaaattgtcgtgcataacacggcaggtgacggagaactcgatgaatctatccctgacaaaatgatagtgatgtccgtgactcatttcgaagaccgctttcgttttgtcagccgtgcacagttaggagtggtgaatgggtag

SEQ ID NO: 102837 - DNA, 786 bp, Enterobacter aerogenes
gtgattctgaataatcaggaatggctactggccatctttaagaaaaaaggtcttactccaactggtaagctggaatttgccactattgatggcattgattcggcgctcgcacaggctttaaacgaagcgttcgactcacaagttgtcagctttaatgatcgcattaaccagtcgttccgggagttcctgaaacgcacaccaagagatcgcataacgctcggcacttttagtgatgtgaaggagtggttgtcgtcatttgaagccgatcgcgccgggcgcaaagatacagcctctgctggcccggtaaataagctggcaatgccgcttgtgaatctgtctcgttctcccgcattttcaatttatgagggtgaactgtgccgggataattacgatgaagggcatgtcaccaatgaaaatgatgagattgaagccctggtatcgactatccctttctcactggaatattcgctatggatagccagtgacgagaaggaatctcttgggatggttacaactgcattagcattctggctacgaatgtatgccagcctcgggcaggcatctttcactcacactgccaatgtcggcggttatgagacaccggttacctgttacatagaagggcaaaaatcaatcgcatttcaggatctgaccaccggcaccgccgacaacaggctgttcgcggttggattgaacctcacagtagtggcggagcttcctatcctggcttatatgcagcaaaccaccggcaccataacggtaaaagcgaaaattctggaggaatga

SEQ ID NO: 102838 - DNA, 729 bp, Enterobacter aerogenes
atggctggtttctttgatgacatgtttgaggatacagaaccatcacaacaagtgactggtgataacctcccggacaccgaatcggatccggatattccaggcgaaggttctgaactgattgaagaggaagatattgatgctgaaatcgaaaccgatggtgttaacgttggtaatattgttgatcctgtggaggacaatcaccttcccaatctggatcacggcctgcttagtgattctggtgtgcgccaccgttatcaaggccatgcagtttttaataaccttgtgcggatggactggctcaaagcaatcaagctagaccctgactcattcgatgcagttctgtatcgcgcaataccttacagaaacaaaaatgcacctgaaacggcacctgaaataatagaaccgaaccaacgcatatatgactatcaggatccagaactgataacggccctcgactgcccggatgagatggacgccttctacgcgctatacgacggcagtgataatacgggaattagcgacagtgctttaatccttcggttagccgccgtcaatgtgccagtgggttctatgctcgaatggctggaacagctgtcagacggcacaaccattcgccgcttctggtacatccataaaatattcaattacggcactgccagggtaggcagtttgttttattgcgtgccttcacgcgcctttgaagggaatttcatcggtgattctgaataa

SEQ ID NO: 102839 - DNA, 1218 bp, Enterobacter aerogenes
atgccaactgaatatgctcgcgacaaccttggtcgctatcagactgatggattaagtgcaaaagactttaacaaggtcttcgatcttatccgtaaacagcagcgtcagaatcggcgaaacgcgcgacgtacactcaccccaaggattatggggatgcgtaaccgcgaacttgaggcattcctcagccttgggaaaaagaaagatggcacctactttacgcccgaagatatacgcagcttcaacacctcaaggcaggctcataaaacaaaattcaagagcacggtacccggcattacctatgctcagctggtggcgcagtccaccagcattgatataaaacgcgctaacaacaaagtttctgatggcacagggatcaaagccgcgacattcctcgggctaaaacacaaccttgcattgatatctgttaatgcctcggatgagtcggtccaccagcatcaccgtgtcagaattcgatttgaggaatgggataaagccgttgaggatattgctgaagacggtgcgaaaaaagcccgaatcgctgccgatctctgcaagggccgggtatctttcgactgtgattgtggacgccatcaatactggtatcgttatatggccactgctggtaactatgctgtcgcgccgccaaaagagtatgcattccccaagatccgcaaccctgatctgactggtgtagcctgcaaacatgtgttgcacgctatgacgcgttttcagtctcccacatggcacaaggccatcattattgccctggaaaaagcagctgaacaggtagccttcggcgatgacaagcggaagacaacaacctatttcaaaggcgaactggctaaatcgctcgcgcgcaaccggacaacaacgacggatcaggctaaagctgcgcgtgagtatgagctgtatctgaaatctcaggatgcattaggcaaaaaactacgcgccaaagatagcgccacggacaacgttcgccggttgttaaaaaaagctcgcaccacggcaaacaggaagaatgccgaactaaaagcatcgcgggtgagggaagcccaggctcgcgctgaagccgacgctctcaaaaaagccctgcaaacgcaggcgaacaacctcataaagtttttcatgagtcagggaatggacaaggccgctgccaccgcgcaggcgcgaagcattcttgagacacaaattaatgaagcccgtaaacggaaaggataa

SEQ ID NO: 102840 - DNA, 261 bp, Enterobacter aerogenes
atgtgtgaatcgaacgacaagaatctgacgatttattacgttcttcccgatgagcaatatcgcccggatttgctggcttaccgtatgtggggcatagcagagctacgctgggttgtgacgctcgccgccgggcttgaggatgagtctcagggtatgactgttggcaaaaaattaaaactcccacctgccacctggatccgcgaaatgattcgccatttccaatacgacggccaggtaatagggacattatccattgcgtaa

SEQ ID NO: 102841 - DNA, 246 bp, Enterobacter aerogenes
ttggcagagcgtgttgatgatgcagagctgagcatgaatcagttagaagctctcaaagacatggccatcgataacatcagaaagcaggcacaggtcgtgagtcaggtatttacagggaagtgtcgttactgcaatgaaccgattgaatcaggcatctattgtgacgctgagtgtgcgcaatggcacagggaagagcaggccgcaaaacagcgtaaatatggcatgcgaccggcaggatttgactga

SEQ ID NO: 102842 - DNA, 579 bp, Enterobacter aerogenes
gtgttgcgctttactgaggaagagtttcaggcttttagtgagcgtcgaaataaggggcggtccaggccaaaaaccaaaaaggatccattcttatcgcttgcgccggtaaaagaagtttctccacatgcgaaggcacttgcagcactggcaaagaaccctgacctgcgcgacggaaattgcgagcacttcgagcaggttttcatttttgattacttcgaacgcaagcaccctgacatctatgagctgttgcatgcaacgcctaacggagggaaacgttcaaaagcaaccgccgggaaaatgaaggctgaagggcagaaaaaaggttatccggacatgagtctcgataaagcatgcggtatttatcacggcatgcgaattgagcttaaagaaccaaatggtaaagccccgacgaaagagcagatcgcctggatgcgcaggcttagagaggaaggttactacgtcgttcttgcgtatggtgcagaacaagcgataaccgccatcctggaatacataagccttaagaagggtgaggctattgagcatgtattgaacggcgacaagtggttgtatgctgcttaa

SEQ ID NO: 102843 - DNA, 156 bp, Enterobacter aerogenes
gtgtcattcaaggttaattatgaatcgctggcatcgatcatgccgcgtaatgaacaggaagcagatgctgaagtggacccggtaatcgctgaaatgaatgctcgcctggaggctgaatttgcagctgagaatgaacataccacccagggcgactag

SEQ ID NO: 102844 - DNA, 627 bp, Enterobacter aerogenes
atgtttcccaagaataaatttagaggcagtgatcgcgttattatcgtcggcagtggcccaagcgccgcaaactttgttgcgccgcgcggagtgccgattatagcggtcaatggggctatcgactggcttaaccgcgcttcttattttttcacacttgatccatcgccagacaatatgcggcgcgttggtcgtggccgccgtcgccgtggtgtttgttattgcatggcactacccgatgttaaagaacgtgaagtcagagacggcattctgtgcttccgtcgtgtggctgaacgcggcacagagccaaaaaatacgaattctcccgagtggtgggcgtggcgctggtccgcacatttcggcctttgcgaagatgagaatgaaattgccagcggcaatagtgcatatggtgctctgaacctggctttccatatcggattcaaacatgtagccctggtgggcgttgacgctacgcaagaactacgcgttcactccggcggcacgccaaaaaatctaagtcacctgcctttgttattccagtctgcgcgtgaacagattgacgttgtttcatgcgggaaaatgggaggtattccgcagatgactcttaaagaatggctgaagaatacatga

SEQ ID NO: 102845 - DNA, 678 bp, Enterobacter aerogenes
atgatggcacccacaatttatcaccgtatcgacggtaccaaatacaggaatgtctgggttgttggtgatctgcatggttgctacaccagactgatgtccgaactccatcgtgtggattttgacccggcgcaggatttactgatatcggtcggcgaccttatcgatcgcggtactgaaaatgtcgaatgtctggaactattgcagatgccctggttcagggcagtagtggggaaccatgagctgttgatgctcgatgcgttaagtcctgatggcaacgtgaataactggctaatgaatggcggtcaatggttcttcatgctggacgctgatcaggaaatattagccagggcgctggtggagttggtaagacgactgccctatatcattgagttgaacaccgggcaagaaactatcgttatagcccatgccgactatccggataatgaatatcaattcggtaaggaggtgccgcttttcaacgttgtctgggcgcgcgagcgtatcagtgattcgatggatgatattggtggcgaaatttcgggcgcagatcgttttatctttggtcacactccggtgaaaagcccgaagacattctggaatcagcattatatcgacacaggtgccgtattttgcggaaacctgacattgatgaaagtgaaaggtgatggtgcagcatga

SEQ ID NO: 102846 - DNA, 702 bp, Enterobacter aerogenes
atgaagattgctttagttcttcgctctggtggtgactataacgcttccgatgtgcagtggctggttaatcaactgccaaaagactatgaaattatttgcctgacagacctgaagtgtttacatgtacctggcgtcaaagttatcccattgatcaaccagtggcaaaagtgccgtggctggtgggcgaaaatcgagttgttccgaccggatataaccgatgatctgttctatctggatttggacacggttattgccggtgatatacgcccaatcctagagaatccaccaaccaacttcaccatgcttagggatttttaccatccacaatatcgtggcagcggtgccctgtggataccaaatagtgtaaaagcgcatatctggagtgcattctggcaagatccggaaggttggattgctcgttgtgttactactgaatgctggggtgatcaggggtttttgcggaaggttatgggtgatgatacaccagcatttcaggatctgtatccgggatggtttgtaagttacaaggccgatgttgtggaacctggttcgaaatatgcgagcgcgcgttactccagggggaatggggcattaccaaaagactgccgaataatctttttccacggcaaaccgcgacctcgcgaagtgtcagaggattggattccccttaccagctcgttttttgagcaagcatcagaataa

SEQ ID NO: 102847 - DNA, 219 bp, Enterobacter aerogenes
atgtggccattccgacggaaatatcactactggctgatcgcctttgttacgccgaccggcggtatcaggcatgtcatcaccaggtatcgcaacaagagactcaccttagccagaattttacaggctgccataggtgagggactggatacaaattgcgtagtccttcctccttcatacttaggaaaaatgaccgaagcacaagctaatacggaactttga

SEQ ID NO: 102848 - DNA, 1263 bp, Enterobacter aerogenes
atgagcacttcagcacaaaagcaatcaatcgaaaatgtatctatccctgatgtcctgaatgccggtatcccggccattatccagaacatccgggccgcgcaacgccgcgttagttgtgatgacctcacagcacgtttttttgataatgcggttcagtcagcggagatgcttcacgcacagcttattgatgtttataacgcagaagctgatagccataactccctggtagatgcagctgaaaatatgcagttggatctcggtctgaagggtaaagaaattgaagagcttcagctggaaattgaacatttgaaacgccagcaacaggacgcgatcgacgatgcgacgcatgacgccaaccagcgagctgataatgccgaacgtataagcattgagctggaaacaaaactcaatgaaatgaccgcgatggttgaactgcggaactcacagatttcaacgctaaaatctcaatataaagagatcatgaaacttgatccttttaaccttgagaaacgctataacaaagctaaaagcgagcgacaggaactgcgtaagcaggtcgccgaccttaaccaacagctcaaaaaaactattaaagatgcaagcgaggcgcgcgtggcatttgctaataaaaaagcagaggttaccgcgctggttaatgagaatgccaaatttgcgacgctcaagaaggaaatgtatggcattactgagcgccgtttccctgcaagcaaacttcatccgacgttagggcaaatctccttcttcccgcgcctcctggcttatgggatctcatcgcctaaagagttcaataacgagcgtccttatatcgtttctaagctggactttgcttatcagttctgctgcgacatgggctatgccattgatatccgaatcaacgaatggttgatgccaaacttccagccgttggcaattttccgcgagttccagccggaaggttgggtagagttcttccatgaattgatctgtaaagagatggaaagccgccgcccggaactggtccgtcgagttgagtgggcgcaagaggttatgttggcagatgcagagctgccgttcgaaccggaattcattgatgatctggcaactaaagggctgcataccctgtttgatgtggttacccgccgtcatgagcagttggttgtcgaattgggtttagaggaaactgcggcaagaagacttctcgatgtttgctatgcacgtagcgatgcatgggaaaaagagaacggcggcactatttacgttcgctga

SEQ ID NO: 102849 - DNA, 507 bp, Enterobacter aerogenes
ttgagtattttcaataaacacgcacaccaggaacgtccgtacatcgtcatagtagatattgatggaacgatatcagaggcaacggaagacaggctgcatttacttccaccacctggcaaaggtgcattaacagagcactggaacgagtttaaccttgcctgtgacactgatgctcccatcactccagttattgatatggtgcgccagttgtccagcatttacacgctctggtttgtaaccgggcgctgtgagatagccagggataaaacacgagcctggttgcgtaagcacgtaacaaatggggctgagcctttgctatctatgcgtcctgccaccgatgacagaaatgacggtccagcaaagattgatctcctgaagaaaattggtctaagtaaaattgcgttcgcgctggaagataagattgaagtggcgcgtgttttcaggagtcacggcgtacttacgttaatggtcagggagtatgaaaacgcgcttcttcatcaacaataa

SEQ ID NO: 102850 - DNA, 579 bp, Enterobacter aerogenes
atgaaaggcgaagtgaaagagcgcggcatgattttcaacgatgagatggtccgggcaattcttggcgggaataaaacacagactcgcaggattgttgaagaaaaattctatggacgtgcagtggccgcagagttgcttgctaagcattgtccatatggtcaaccgggcgatcgtatttgggttcgcgaaacctaccgggtacatggcaaagcgacggacgtcgcaacgctggtttatcgcgcaagcgtgcgtaactcctggacagaacaaacgcaccgggttccggtcgaggtttgtaataaaccagtatcagaaaagtggacgccatcaattcacatgccgcgctgggcatcgcgcattcttctggaaattaccaacgtgcgcgttgagcggttgaacgatatcagcgaatgcgatgcaagggctgagggcgcaccaacagaatcgaccctcattggcgataagcattacccaggtttccgtagcctatggaaatcaatttatggcgaagatagttggaacgctaatccttgggtgtgggtaatagagtttgagcgtattcaggggggcaaccagtga

SEQ ID NO: 102851 - DNA, 645 bp, Enterobacter aerogenes
gtgaataaccgcttttacatgatgtgcttgcgtgaaactgtgggtaataacgcctcattccattgccataacggcaatggttacagttctgatatcgatcgcgctcatgtttacacgctggaagaagcccaaaaagcctggaattgtggacgagatatcgatcagcctgtttgcgctgatagcgtggatgcaatggctgtgtggcacgttgattgccagtacatccccacagaaagcctgattgagtcagattgcactgcgtatgtggcctacaaaaaaggtagctggaacggcaacgatgtttactggcttcaacacggtggattgccaacagatgacttcagtaaagcgaccatctttagcgtcgccaacaaaaacgaaccaggaatagtttggttgccattttccattgctgatgcagcaaagcgccggacgttcaatatcaataactttaaccgcagaacaatggttcagggcgcaggtttggtcatgcctgactggttgaaaaagcaaaacagaagaaagaagtcgcgaagcgggaaggtgcgttggaattgtccgcattgcggaaaaataacctggcagtacagcccatatgattttgaaggctgtagtgattacaactgtgaaggatggcgagaatga

SEQ ID NO: 102852 - DNA, 867 bp, Enterobacter aerogenes; identical to SEQ ID NO: 30136

SEQ ID NO: 102853 - DNA, 291 bp, Enterobacter aerogenes
gtgaatatcgacacgacaataacgatcgatacgctcctaaataccggtctggcacttctcggttggctttacatcatgtcccgcacatggcgatggctgggttccattttcctaaaacagtggaaaaaacggcgcaaacaggaactacgccagaaggcattagaagcgttctatgacgcatttgagcttagccgcattgaaccaggtacaacagccaggatagcgacaaaaggcgacctgatgatagtgatgttccgacaggagagagcagagaaaggggaatcagcatga

SEQ ID NO: 102854 - DNA, 648 bp, Enterobacter aerogenes
atgaaattttccaaattttctgagttggtgaatcgtattttgtccaacaaccacagccatcgtcgcgatatggatgtaacaatcgttgttcattcgcctggcagcattggttcaacaccttcagttgaggttcagtcaattcacgctggttttgattgggattccgggaaagtgcttattttcccatcacagccactgaccacgctaacaccagaacagattactgatatcactgatagtgtgcgcaaaggtcagtcttggcacgcatatcaggaatacaagaagcatcaagagcagttggaaaaattgtcgattgaactggatgccgcaaaacagcgcattgcagagctggagggtaatcgcacggcgctggcagtggagaatgagctggctcgtaaggcagttcaggcattctgcgatgttgttggcgacaacaccgaggttatcgctgaggtggttgggcgagatggcgttctggttattttggaggccatgaaggcaacaggaaatatgccagccaccgatgctttcctggctgaagtacgggcgcagggcgtggagatgtttgcggagtgtgcatacacgcttgaacatcatgatcacgcagtagccttcgccgctgagcttcgcaaaggaggcaaccagtga

SEQ ID NO: 102855 - DNA, 588 bp, Enterobacter aerogenes
gtgagcaagattgactatcaagaactgcgcgaggcggcggaacaggcaacgcaagatgaatgggtagcatatattttgccgggtcataacggcatttatcctgcgcgcacgtctgagggtaggccttgcggatactttattgactggcctggcgtctgtcaggggcgggagagcatcagcatcagaacctacgcagtgaattgcaatgacgcatggctaaacaccgaaggtgatgacatctccggctcatacgttaagtacaaagaccatcaggaagtggttgccgctcttgaggccaagtgcgcggcgctggcagtggagaatgcggcgcttaaacagtcggagaaggaatttaataacttctgtcgtcaggagtactacggttgggaggacaacttcacggaaaccccagctaccgacgctctcctggctgaagtacgtgcgcagggggtggatatggctcgtaacgcgatgattgattttgttgatggtgaagttgggccaaacaagaacgttccggggctgattagaggcgcagagatatgcgtaagtattgctgaacagcttcgcaaaggaggcaaccagtga

SEQ ID NO: 102856 - DNA, 447 bp, Enterobacter aerogenes
gtgagcaagattgattatcaaaagcttcgtgaaatcgctgaaaaaacaaaaattgctggtgaagcacctgtaatgcccttcgatcagcgaattaatgcgcttaacgattttatgaagcacttttcgccagatatcgcgctggcactgctggatgaacgggaaagaaaccagcaatacatcaaatcccgcgaccaggagaacgaggatattgcgctaacggtagggaagttgcgcgttgagcttgaggcagaaaaacagcgggcaaaggatctgtttatggaaaatgctcggcttaagtcaggtatagccggtctgatacacctcggtattcgatatgcagatgttgatgtcatgaaaattgctggagatgcccagctttctaccccatgcactgacagcatcataaacagcattgcaacaggcattcgcatcaacggaggtgagtag

SEQ ID NO: 102857 - DNA, 189 bp, Enterobacter aerogenes
atgaaaaaccgtaaagcaaagattctgttagttcgtagaaacgctcctggcgtctggcagtgggtgagactcagcaaccgacggatggggttgatgaaatattacgggatgatggattgtggtttttgcaaaaagcccagcgcggcgcaaaaccgctggaaaaaccacttgcgtactaaaggagagtga

SEQ ID NO: 102858 - DNA, 210 bp, Enterobacter aerogenes
atggctatcgctgcaagttacaccatgcatctctattgtgactgccgtcagtgcacggaaggtgtatatccagtgccagacttcggtgagtatataggtacgtcatgggctggctgtgcaaaagaggcgcgcaaggatggctggcgaataagcaaagacaaaacacgtacttttgcgcccgggcataaagttttgaggattaacacatga

SEQ ID NO: 102859 - DNA, 369 bp, Enterobacter aerogenes
atgaccactattaccaaagaacgtgcggagattaaatcattcatcacaggcttcctgagcgacccggcgcacgataaccaatcttcagacagcctgcttgccaatgtgtttcgtatcgcgctggcatcgctggaagcagaaccggtggcgtggatgcgtgatgacgcagatggtcgtgagtataacgctcgcaatgaattttctggtggagggggaggaattccactctacgccacccctcaggtgcaggtagtgccggaagaaatgtattggcaggatgcgccagttgaaggcagcagcaaagcggctgcatacgctacaggctggaatgcctgccgcgccgctatgcttcatgggaaaggagagtga

SEQ ID NO: 102860 - DNA, 264 bp, Enterobacter aerogenes; identical to SEQ ID NO: 21112

SEQ ID NO: 102861 - DNA, 684 bp, Enterobacter aerogenes
atgaccactattaccaaagaacgtattgaattgttcattaaaaatccgcttgaaaacgggcttacccgtggtgaacaaatggaactggcacggattgcgctggcatcgctggaagcagatccagttaaacgagttaactcagatcagatgcgccgagtctgcttagaagctaatcgccatttagataaatatgacgcgatggcgaaagaggtaaataagttgcttggacgcatcgccccgccagcgccggtagtgccggaagaagcaactccggaaaacgtagaaatgctctctggctatgtttccacgtacaaattaaccgatagcgagcgcgatattgctgccgaaatatggaacgcctgccgcgcggctatgcttcatgccggaaactttcgggaaaataagaattcgtcaaccaataattttcgggaaatcgcggaaacgtcaactaactatccggtaattccggatggttggataagctgtagtgagcgaatgcctgagaacattcccggaagttgtaaagagtatctggtgtttgatgggcttaataataaagttcatcacgattactgggttgtccctgatggagacagtgcgccagttgcgtcgttctggaatcattacggggcacatgtaactcactggatgcctctaccagaaccgccgcaggaggcgaaatga

SEQ ID NO: 102862 - DNA, 261 bp, Enterobacter aerogenes
atgatggatgtaaaagagaaggttttgcaggtgatgcgttcccgggctgccctgcaagataaagctctcgtcgggaaatatccattcaggatggcaacctggaatctgcggttggcaatggagaaggaatttcctgatgaagaatggcgttcggcagatttgcgcaaaattcttatggagatggctaaagatggaacagtatccaaagatacccatgccagccggattggtcaggcggtatggagactggaggtgaggtaa

SEQ ID NO: 102863 - DNA, 375 bp, Enterobacter aerogenes
atgatgacactaaaacattttcttgaccgcccattatgggcggcagccgcaggctatgactttaattatatggattgcatgtcttatactgccaatgcatacgaccattcgttcatcctgctgtttaattctttaagaatattgccggaaacagaagttggagagcttcatttatggctattgggctttatcgcggctgtcgttggtattgctgtatggccttttattttctggctggtggctgttgtagtgtggtttaagtgcaagacataccggaaaaagtatttcttaggtgatggaatgactgatattgccaaaatgaacattgaagaatggactaaggaatgtgaaaagaaatggcgcaaaaagaaatga

SEQ ID NO: 102864 - DNA, 651 bp, Enterobacter aerogenes
atggcgcaaaaagaaatgaccagaatcactgaagagcgcatatcagagattatttcccgtatcgaaatgtatggtcacggtgctggatatacggcagatgaagtattggaaatagcccagcagatgctggccttgagacaaaaagagcaacatgaaagtaatacgtgtagattgaattttgagcattggctggaacagcaacgcggaaaaatcgatgtggactgtggttgtgtgtccactgaaacattcatgcactggctgtgggtagcttacgaggctggcaactatccggatattccggatagttcggtgccagcgccaggaaagggcgtcaccggtgaacgtatccgcattaagccgcatgtttatcgcgaactggttaaccgtctccacgatacagcgatcaagtgtgctggcacccagcaattacgagaaagaattagccgtgttttgggcgacgttattacaccagatcatcataaacaagccgagaaaagtgacctggaaaggtgtcaccttgaggcggcattaaacattaagccggggcatacgcttggcattattgatgcactattggttcataagatggccagggctttattgccgctggtggctgaaaagcatgaggtggaccatgccaacgaaagctga

SEQ ID NO: 102865 - DNA, 285 bp, Enterobacter aerogenes; identical to SEQ ID NO: 23008

SEQ ID NO: 102866 - DNA, 351 bp, Enterobacter aerogenes
atgcacaataacgttctcaatgttagccgttcaattcagacaatcagagactgcaccagtgtggtggcatcaatcccattgcggaacagcatagacgaactgcaaattcgtgtattgaatccgaatcaggctaataagcaattgcgctttattttgacgctgaaaagtgaaacagaggggataaagcacagcgtaaaagtgttttctgaggccattctgcttaatgggaagctccggcatctggtaaggccagaacgtcaatatcctgacgtcctggcgcgtgaaaaagaccttctttctgaagttcaggatagggtgatcgatttcgtcaaatgctatcccctgcattga

SEQ ID NO: 102867 - DNA, 252 bp, Enterobacter aerogenes
gtgtcagatcgaaatatagcagctaaaagccaggaagagcgagacaaggtgaacgtagaccttgccgccagcggcgttgcttacaaagaacggctgaatatacctgtgattgcagagcaggtggcccgtgagcaaccggaaaacctgcgcgcctatttcatggaacggctacggcactaccggcagttaagcctccagttgccaaaagggagcgatccggtgtatcagaacgaggatgcaccaaaaaaataa

SEQ ID NO: 102868 - DNA, 390 bp, Enterobacter aerogenes
atgggcttcccttctcctgcggcggattatgttgaaagccgaatttctcttgatcagcagataattagacatccttcagcgacctacttcatgcgggcagctgatagccatcaccgtgagggaatattgcagggtgctttgctggtggttgattcctcgcttactccggttgatggttctctgcttgtgtgcgctatggagggtgaatatcgcataaagagatacaggaagtatccgcgccagcacctggaggacttaagcaccgggaagaaagaggcgttaccagtagatgacgatggatacacgggcagtaatgctgtttttggtgtgatcactcatgtcatcaatgaagcccgaagtggggaatttgatgattgtccggttatttaa

SEQ ID NO: 102869 - DNA, 222 bp, Enterobacter aerogenes; identical to SEQ ID NO: 8316

SEQ ID NO: 102870 - DNA, 381 bp, Enterobacter aerogenes
atgaggcatatatcaccggaagaacttattgcgcttcatgatgcgaatataaaccgctacggcggcctgccgggaatgtctgatccgggtagggcagaggccattatcgggagagttcaggccagagttgcctacgaagagatcaccgaccttttcgaagtctccgccacctacctggtggctacggcgagagggcatatattcaatgatgccaataagcgtaccgcgctaaacagtgcgctgttatttctacgccgtaacggggtgcaggtatttgattcacctgaactggcagaccttaccgtaggggctgcgactggcgagatatctgtatcttctgtcgccgccacgttacgtagattgtatggttctgcggagtag

SEQ ID NO: 102871 - DNA, 180 bp, Enterobacter aerogenes
atggcacgcaaatacaacaaattgtcccgtgaagcgttaaagatgcttcttgatggcgtgagtcgccgcaaggtaaagcaatacctggttggtaagcaaattggtgccaggaccgctattgctgtgttatgccgtcaggaaatggttgtgcttaaacagagaatgccgggcagcagataa

SEQ ID NO: 102872 - DNA, 1044 bp, Enterobacter aerogenes
gtgaaagccgtaattactccctttgtacagaaagagcttggcgtcgccacattcaaagtggatcaggaagtcagaaagctggtggaggctggccgtaaatttattatggagccggtgccgcgtgagttaatcgagcacatggacgacggcctcgttgtttccgagcagactatggcaacaaatgaggcgttgcagccgttttttaacagcgatgaactgtttcgccgtattggtggaattgacgcgctggtggcgtggttgcgtaggaaagagggtcaatgccaggccgcagatcgtagttggtgtgacaaccatattgtccacgctgaacgagacaatagcgcggtgttgttgtgctggcatcacgataaccattaccggatgcgtggttttaatgagctgaaagaaacgctgcataataatcgcgttaactggatactggatgtcgcccgtcaggaaatggggctttcagatggtcatgatttaagtattcaggaactgtgctggtgggctttcatgcgcaacatgatgcacctgatgccggaagaagtttgccgtatatcaataaataagatgaaagccgcaacgcaggatagcggacctctgaaagaggcggatattcgcccgtatgacgatcgcgctacagcatatgttcagatgatggaagaacgcgccgcgccgatgcgtgcaaaagtatgccctgtggatgttgactccgaccctggcatggcgcatttcaaaataccaaaactgcaatcgctaaaattacctgagtacatggactttgttgcttcccgtccatgctgtgggtgtggagcggcgggagctggcgctcacattacgccttatatcgttcgtcatagtcgattatgcgcgcatgacatttacgcaattcctttgtgccagtcatgccagcgtgatattgagcgtgaccgcgataattgggagaagacgcacggtaggctggcgatgcatcaacgattgttctttgattacgcgcttggagtcggcgctatcacaagtcactcgtcgagcgttagataa

SEQ ID NO: 102873 - DNA, 453 bp, Enterobacter aerogenes
atgttacttaactggcagggacgccacttcatggaaataaatcactcacgaataacatcgtacgagattgcggattacatgatccgcactaaatctcttctatcagcgaaagaactcgcagcaattcttgaaaaggaatacccgcatctggatgtcgataagcgcgatgtttatctgcgcttaaaggctatcgctgtgtctaagtattcgtctgttttgatagatgacagtacacgcccacgtagatttcagatccactctctgaatcctgaattctttcgccgtagccgcgctccgcgccggtttgatgaaaaactccagaacgaactctatatgacgcaggacgaaaaggaacgccgggagcaccagccttgggtaatggcgcgtcaacttttcaataaggtggcccgtcagcaccgtcattacggtaatgccacatccgcacgtatctga

SEQ ID NO: 102874 - DNA, 1194 bp, Enterobacter aerogenes
gtgacctgggacgatcacaagaagaattttgctcgcctggcgcgagatggtggttacaccatcgcacagtatgccgccgagtttaatcttaaccctaataccgcacgtcgttatctccgtgccttcaaagaagacaccaggactacggacagccgcaagccaaataagccagtcaggaagccactaaaaagcatgatcattgatcactctaatgatcaacatgcaggtgatcacatttcggctgaaatagcggaaaaacaaagagttaatgccgttgtcagtgccgcagtcgagaatgcgaagcgccaaaataagcgcataaatgatcgttcagatgatcatgacgtgatcacccgcgcccaccggaccttacgtgatcgcctggaacgcgacaccctggatgatgatggtgaacgctttgaattcgaagctggcgattacctgatagataacgttgaagcgcggaaggccgcgcgcgctatgttgcgtcggtccggggccgatgttctggaaaccactcttctggaaaagtctctttctcatctccttatgctggagaacgccagggatacgtgtattcgcctagtgcaggaaatgcgcgatcagcaaaaagacgatgatgaaggtactccgcctgaataccgtatcgcgagcatgctaaacagctgttccgcgcagataagcagcctgatcaacaccatttacagcatccggaataactatcgaaaagaaagccgggaggcggaaaagcacgctttatctatggggcaagctggcattgttaagctggcatacgaacgaaagcgtgaaaataactggtcagtgctggaagcggctgaattcatcgaggcgcatggaggaaaagtgccgcccctgatgctggagcaaatcaaagccgatctgcgtgctcctaagaccaataccgatgatgaggaaaaccaaacagcatctggcgctccatcacttgaagatctggataaaatcgcgcgagaacgggccgccagccgccgcgctgatgcggcattgtggattgagcatcgtagagaagaaattgccgatatcgtcgatacaggtggttatggtgatgtcgatgcggaaggcatatcaaacgaagcatggcttgaacaggatctggacgaagacgaggaggaagacgaagaagttacccgcaaactgtacggggatgatgattaa

SEQ ID NO: 102875 - DNA, 1485 bp, Enterobacter aerogenes
atggccagaagttgcgtaacggacccacgttggcgcgagctggtggcgctatatcgttatgactggattgcggccgctgatgtgttgtttgggaagacaccaacctggcagcaggatgagatcattgagtccacgcagcaggacggcagttggacaagtgtgacctccggccatggtactggtaaatcggatatgacgagtatcattgcaatactcttcatcatgtttttccccggcgctcgcgtcattctggtcgctaacaaaagacagcaagtccttgatggtattttcaaatacataaagagcaattgggctactgctgttagcagattcccgtggttgtcgaagtatttcattcttacagaaacgtctttttttgaggtgactggcaagggtgtttggacaatattgataaagtcctgtcgccccggaaatgaggaggcgttggctggtgaacacgccgatcatctcttgtatatcatcgacgaagcgtcgggtgtgagtgataaagcattcagtgtgataacaggtgcgctgaccggtaaggataaccgtattctgcttctttcccagcctacgcgaccttcaggctatttctacgattcacaccacagactagctattcgcccgggaaatcctgatggattgtttactgcgataatactgaatagtgaagaatctccgcttgtagatgcaaaatttatacgagcaaaacttgcggagtatggcggtcgtgataaccccatgtacatgatcaaagtacgtggtgaatttcccaaatctcaagatggctttcttcttggtcgtgatgaggttgagcgggcgacgcggcgaaaggtcaagattgccaaaggatggggctgggttgcatgtgttgacgttgctggtggcacaggacgagataagtccgttattaatatcatgatggtgtccggccagcgaaataaacgccgtgtaatcaactatcgtatgctggaatacacagacgttacagaaacgcagttagccgccaagattttcgcagaatgtaacccagaacggttcccgaacataaccatagctattgatggcgatggcttggggaaatcgacggctgatctaatgtacgaacgctatggcattaccgtccagcgtatccgctggggtaaaaagatgcacagccgtgaagataaaagcctttatttcgatatgcgcgctttcgcgaatattcaggcggcagaagctgtaaaatcagggcgtatgaggcttgataagggggctgcgactatagaggaagcatcaaagataccggtagggataaattccgcaggtcaatggaaggtgatgtcaaaggaagatatgaagaaaaaactcaacctgcactcaccggaccattgggatacatattgtttcgctatgttggcgaactatgttccccaagatgaagtgcttagcgtcgaagacgaagcgcaggttgatgaagctctggcatggcttaatgaataa

SEQ ID NO: 102876 - DNA, 852 bp, Enterobacter aerogenes
atgataaattatgtctacggcgaacaactgtaccaggagttcgtcagcttcagggatctctttctaaaaaaagctgttgcacgcgcccaacacgttgatgccgccagcgacggtcgtcctgttcgcccggttgtcgttctgccgttcaaagaaacggacagcattcaggctgaaattgataaatggactttaatggcgcgggaactggaacagtacccagacctcaatatcccaaagactattttatatccagtgcctaacatccttcgcggtgtgcgtaaggttactacttatcagacagaagctgtgaacagcgtcaacatgaccgctggccgcattattcatctgattgataaggacattcgcatccagaaaagcgcggggatcaatgagcacagtgcgaaatacatagagaacctggaagcaacaaaagagctaatgaagcagtacccggaggatgaaaaattccgtatgcgtgtacacggctttagcgaaacaatgctgcgcgtccattacatttccagtagccctaactacaatgatggtaaatcagttagttaccatgtgccgctgtgtggtgtgtttatctgcgatgaaactctccgtgatggaatcatcatcaacggtgaattcgagaaagcaaaatttagcctttatgactctatagaaccgatcatctgcgaccgctggccgcaggcaaaaatatatcgcctggcagatattgaaaatgtaaaaaaacaaattgccatcactcgcgaagagaaaaaggtcaaatcagccgcatcagttacgcgcagccgtaaaactaagaaggggcagccagtaaacagcaaccccgaaagcgcgcaatag

SEQ ID NO: 102877 - DNA, 210 bp, Enterobacter aerogenes
atggctttcattccaccaaccatcgacgacgttagacattgctctaacgctttatctgtagaccccgccgaaaccgacgctgcccgcgccattgctgaacactactcaaagatatccaatcaggagtaccgcatcacccaagacgacctggatgatctcactgacacaatcgaatatctcatggccactaaccagccagactcacaataa

SEQ ID NO: 102878 - DNA, 222 bp, Enterobacter aerogenes
atgggatattcagctgctaaagtgtccactcatcttgagcttgagaaaaaccgtggttactggcgggcaaaagggtttgatcgtgatagttgccaactgtcattatcgcgcggtgaagagaaaatagaacgcacgcgcggtcgctggcgtttctatgacgagaaccataaacaggtaaaggcagagccgatcctgtacactttacttaaaaccattatctga

SEQ ID NO: 102879 - DNA, 1032 bp, Enterobacter aerogenes
atgtccaatttactgaccgtacaccaaaatttgcctgcattaccggtcgatgcaacgagtgatgaggttcgcaagaacctgatggacatgttcagggatcgccaggcgttttctgagcatacctggaaaatgcttctgtccgtttgccggtcgtgggcggcatggtgcaagttaaataaccggaaatggtttcccgcagaacctgaagatgttcgcgattatcttctatatcttcaggcgcgcggtctggcagtgaaaactatccagcaacatttgggccagctaaatatgcttcatcgtcggtccgggctgccacgaccaagtgacagcaatgctgtttcactggtcatgcgacggatccgaaaagaaaacgttgatgccggtgagcgtgcaaaacaggcgctggcgttcgaacgcactgatttcgaccaggttcgttcactcatggaaaatagcgatcgctgccaggatatacgtaatctggcatttcttgggattgcttataataccctgctacgtatagcagaaattgccaggatcagggttaaagatatctcacgtactgacggtgggagaatgttaatccatattggcagaacgaaaacgctggttagcaccgcaggtgtagagaaggcacttagcctgggggtaactaaactggtcgagcgatggatttctgtctctggtgtagctgatgatccgaataactacctgttttgccgggtcagaaaaaatggtgttgccgcgccatctgccaccagccagctatcaactcgcgccctggaagggatttttgaagcaactcatcgattgatttacggcgctaaggatgactctggtcagagatacctggcctggtctggacacagtgcccgtgtcggagcagcgcgagatatggcccgcgctggagtttcaataccggagatcatgcaagctggtggctggaccaatgtaaatattgtcatgaactatatccgtaacctggatagtgaaacaggggcaatggtgcgcctgctggaagatggcaattag

SEQ ID NO: 102880 - DNA, 312 bp, Enterobacter aerogenes
atgagaaaggatttcaacatcgacggaaaatatgtagtgctgtctgtaagcactaatattctgtcgccatctgtcattgtcaccgtaaagttgagcgataggatgcctgatatcgactcgatatctgttgcgttccccgttaaaagcatgcggagtgctgaacattttgtgatgaatgcaacggaggaggaagcgcggcgcgggcttactagagtgatgggggaatttggcgaactcctgggtaaggtaaacaatgccctttcaatcagttcagcaaggtccaaagcgttaaccgcttccatgatgaaataa

SEQ ID NO: 102881 - DNA, 495 bp, Enterobacter aerogenes
atgaacagggaccagccaggggtatttttctcttacttcagccggtgctgcatgctggtggtgccatctgcaaaggggcaattgctttttgtgacaacccggcgcggtacgaccggagatatggtgcagagacacctcttcagatattactccatgcatgtagcaggcaatgcaggggagagtgccaagagcattggcgatagtctgttcctcctccgtcggtgttcgccccttcaagccacgagattttatttttaccgcacttttccgcgttttgctggctggtgggcgctctttctgtttagcgatacggcggtcgatagaatcccgcattttctgatattgcgattctcgccaggcggggtcagccaacttttcccgttgccgagcgatcgctcgttctctggctgccttctgccactcgcggcgctgttcaagtttttgttcgattgttttcatatggcaaaaaaaaggcggcctaatggccgccaatga

SEQ ID NO: 102882 - DNA, 642 bp, Enterobacter aerogenes
atggataagaaaatatgcgttgtttcgatgagcgtcggcaaaccggcatcaatgactgctgcatggatcaataacgagctgataatggctgagcggaccagctaccctgaacaccgccgcgatatggaactccagctgctgcgcgaattgcgagaaaaagaggaaaagggttttatcgtgctggtggaagaggaaaacagctttattactggtcgagttggccagcgtgtaaggttgcgcgatcccttcatgaacggcaggccggtactaattgaggcaatgcagatttataaggagctggaacgccagaaagcaatcaagttaccgcgcaaggaatccggcaaatacatcctccaccaaagcatcttcgattccgaacacgataaaaaaggcgatgaatttttcaacatcaactggagcgaaataacgacagagcacgttctgacgttgttatgctgcttcgcaacggaatataacaacgttgcaagcgccgactacattagggcaatggtaggagaagttgatgcccgccaggaatcatcgttactaagccctctgattaacataattcgcggaacccaaacactggcacaaaaacgggtgcctaaaggggagttaactggaaaaggaaattatctataa

SEQ ID NO: 102883 - DNA, 1308 bp, Enterobacter aerogenes
atgagcgaatatgttgagttagcatacgctgccgctacaagcaggctttgtctatttaccgggactggcttttcaaaggcagtctcgaacggtgaagctccaacgtggaaggaactattaaaaaaagtttgcagcaaagttcacaatgccaaaaagttggaagacacgttattccctgatgataaaccaccagcactgagtcttgaagaagccgcacaaatactatctttgaagctcaatattgagggtaagtcgatttatgatgaaattgttgacatcatatctccaattcaacttggagaagacatatcaaatataaaagattttttccaaaaaaactcattccgtgtcattacaacaaattatgacaagttggctgaatgcttggttggagatgaaagtgtgcagtctatcacgcccggcctgccaattccaaagtatccatccaaggtgaaaatatatcatgttcatggttctattgattcgccaaaaaatatgattgtcacttcagatgattacttcagatttataaattccgatacttatttttcacgaaaacttagtacgatgctgcatgaaaatacagttgcgatattagggtattctttaagcgacacaaatcttaaagcaattataaatgactataaaaaattttcgaaaaataatgccctgtgctctaatatctttttgatatctcgtaacaaagtaagtcaagatatgaaggattattacttctattgctttggtataagggtaattgacaatacagaaatagattgtttctttagtcgattaagttataagatttctctcattaaagacatcattgaaagagcgcgcgaaaatatcagaaaagttgtttcgggggcttacacttataaaaatgaatatcttaaattagaggattcattttatcaaattatatcatcaattatatcggaaggtttagattggaatgatgataaagtcgtttctcttttcgaaaggataatagaaaaaaagagaaagttaacaaggaataacggagcgtgggagcaatatgaacagttggcaaaatggcttatatattttggaagcatcatagaggttagcaatactaagtatgaaaaaacatatttagacgcagttgaatactcgatgggtcatatgagtaaagaaaggaattggggagtttcttggcatgcttacagagcttgggaaacacgatggcctgcaataattgcctcaaatagattaatgataaaaaaccacattgaaacattaggcaccttgaaggacgccaaccttatagttaagaatatagtgtaa

SEQ ID NO: 102884 - DNA, 249 bp, Enterobacter aerogenes
ttgaaaaagcgatactacacagtaaagcatgggacgctacgagcattacaagagtttgctgataagcataacgttgaggtgcgcagggaagggggaagtaaagctctgcgcatgtaccgtccggacgggaaatggcgtacggtcgtcgatttcaaaactaacagcgttccccagggcgtccgtgaccgggcattcgaagaatgggagcagatcatcatagataacgcattgctcctgaatgctgattaa

SEQ ID NO: 102885 - DNA, 375 bp, Enterobacter aerogenes
ttgttaggaaagacagaagacgaatacgttgatttcttcctgtcagggctacgcgggcgattactgaaaaatccccgcctgtaccgcagctatggtccatactggccggaaattaaaaaattattactggagcgcggttatggtaatttcggtcgtctcgttgaccgtgacgttcgcaaaatttaccgttatgaccgcccggcgctgacgctcatagctgcgacgctctacagccaggagcgttttgataatggtcagatatactcagcctggcatttactgccagtgcctgaagaggttgacgaccaggactatgagtttgagtcttacgatttggaagttgaagccttagcacaggctggagagaaaacttga

SEQ ID NO: 102886 - DNA, 2322 bp, Enterobacter aerogenes
gtgggtatcaacctgcatcgaggaacgacggatatccaccacctgacgttgccgtggacaccagccagtatcgcacaacgtaacggtcgcggtgcacgagttggctccaaccgtgcaagcgttcgcgttcactactactgcggcaagggttctttcgatgaataccgactgaagacgctgaagcgtaaagcaggctggatctccgatatcctccgctcagataagtctgaaatggagaacgccgacgccaacgatatgatcgaaatgcagatgtataccgctaaggatgatggcgaacgtctggcaatgatgcaggttcaaatggataaggcgaaagccgcgcaacgcgctcgccagaaagaacaggctactatcgaccttcagaactacatcaaggcgcagcacgcagctggcgaggatgtggaggtacttaccgctgaattagagcgaagcaaagcggaacttgaaaagaccaccgccgaggtagctaaattcaaacaggcggtaatggccaaagcagctgataacgcagactggaaggcccgctggggtagcgtccatcacacagaccgtacgttgttagcacagtatcgcgcgtcgttgaaaagcgccattcagcgcaaggctaatatctctcaggccatctcccgctatgagaaattattgaaccgtactcagaaggccgcgacggatatcaaacgcctgcgcccgctggtggaggatgcaataaataaaggcattctggatgttgatcctgatctggttaaccatgcgaatgagttccttgttatcggcgatcgctcatggcgtgtaggccaatactacgattgtgccggtgatatcgttcgcattaagtcgctggacttcgacagccaccgcgcagacgtggagatcatctttaccttcaaaggcaccaaatcgggtaactgggatgtgaagacgctggataaacaggttgatgtaactcccgatgaagatgctgttatgcagaaaatcagtggcggcgtctccatcgccgggattaacgacatcatttcctgtgacgatttctaccgtttccagcagcgcggcatgatcaaaatcactgactcatacggcgttcagactacagagtcaggctatagcattgattttgttggtacctatacggacccactgaagcatgcggtttacccggatcgccgtgacggcgcgctgaagtcgtcaattgcaaaatgggtgcttggtatgatgtcggaagggaataaccgccagatccgttcggcagaaacattcctggttgaactgtttggctccaattatggcgatgtaatcgcgtcatacggagatacgctatcccctgaagcaattcaggagaaaatagcggatgcgatcgccagaatgccggaaaaaacaagccagggggctactcgtaacggggattctgaacttgaagtcaccaatgccattttcggtaccaatgagttccgggcgtcagattatgagatcaccacagcacagtttggcaccattggcatttacagcaataaagacgagatcaaacagtcaatggacgctgcaagcgcgcgcattgcagcagaacgcaaagccaatctgaatcatgcagtttccgcgctgactcaatcgtgggtaacagcaatcagggaggccgccaccacaggaaaaatcacaccggcaattgcggatgtcgtaaacgacggctctaaatttatggatgcctataaaatggatgcggtgcagttgccatcagcctatggccaactcagctatcgcatgacctacaacctggtatcaatgttttccgaccttgccatccttgggctggtggatcttaacgaagttacgccggaattgctcagcatgcgtaagaatcatgtggagatattgcagagaattaacacggttcttgccgggcgcaccgatgaagagaaacaggccgacgctgatcggataaacctggcccttggcaacatcacggaggaagaaattgccgccagaaacgagaaacaagaagagttatcatcaatacagggtgatgccaccagcatagctcagtctcttggtctgaattatcgcgtatccaccgccgacctgaagatgatgtacgcaccaaaattcgccgctggcgaggtatttgggcttcaggaagcctcaggcatgaaaggcgttcttttccgtgcgaaagacgcaatcaaggcgaaattcggcgctcgctggctgccagcgaaggcgaagaacagcgatttcccgggtaactggtggattatcgagacaaaacacaacgtggcggacgttctggccgtcatccaacaatacgcataa

SEQ ID NO: 102887 - DNA, 4371 bp, Enterobacter aerogenes
atgaacaagctatctatgggggtgtttcgctgttcaagtgtcagcgaaatattgaaatacattagggcaataacatctcaccgagcgccgattaaatacggcgtggaaaaggtggaaggcaaaagctatgaccgactgcgccgggaggcgaatcagaaggcgatagatttgcttaattcgctggtggacggcgcgacactgacagatgaacagcgccagatcctggctgggtacaccggtgaaggcggcattggcgggtccgtctccgaatattacacaccaaagccgatcgctgaaggtgtctgggagatcatgaagctctacggcgcggacgtaggtaacactctggaaccatcggcgggcaccggcgtttttaatgagacaaaaccggttggtacggtgatgactgcgactgagatcagcagtgtttccggtcgtataaaccagctgttacacccggaagacagcgtacagatttccccgttcgaacagctggctgtaagcacgcctaacgattcattcgaccatgttgtgggtaacgttccgttcggtggtcgtgataacacacgcaacatcgataagccttacgcagaagaaacggacatgggttcttacttcatgctccgcatgctggacaagataaagccaggcggattcatgtgcgtgattgtgccgccgtccattgtttcaggttcaaacatgaagcggttacgcctgcgcctatcacggaaagctgaatttcttggtgcccaccgcttgcctaccggtacttttgacgcaaacgggaccagtacagttgttgatgtggtgctgatgcgcaaacatccggcagagatggctgagaaaatccccctggtggatgaaagcactctcgaatcggcaaatgtgctttggccaacgtttatttctggcaagtggtttgaaaaggacggccgccggtttgttcatggcacccaggaaaagggcttccaggggcgtattgaggttcgtgccgacggtcagattgataaccaggctcttaaagcgaagctgattcatcgtttcgaaagccgtatcgactggtctttgctcgatatggctgaaccgtcaccgaccgcagacgttgttggtgaaggggaaatgcgcctgattaatggcgtatggcaaaaatatgctggtggtcgctggattgaagctgatgccgggaaggaacttaagatcgatgctgccagttatggcgcggatagctgggaggctcttcagcgtaacctgactacaacagaaggccgtctcggcatgacatttacccagatggcaaatgtccgcgataagtacaccacatcaatcagcgacgatatggtgcagctggtggactggattaacagccagcctgaaaaataccgtgaacgcttgtatcgcggggcgatgattggccggatgttaattgaatatcaggacatgaaggccgccgggcatagtgctgaacaaatcgaacagcagcgcctttctctggtatcccgtttgcaggcagagattgaccgttttggtaaccccggtcgcggtccgatagcgaaattgtcggggagcggtgcgcgcgcctggtttgctttccgtggtgcgattaagctggatggcactatttctgacgagctgacaggaaagctggttacgcatgattccagcgccagttatgactccaccagctatcaggacaccctgcgttatctctatagcgatcttacccgcgatccaatccagctcgatgatttccgccttgcgtttaccggcgaactgccagccagtgatgaagagttgcttaatttattggccagcacccctggtattgcggtttcaccgtatggcgggattgttccgttcgcccgcgccaccagcggcgacattaacgagatagtggctccaaaacaggaatttcttgccacactccccgacggtccagtaaagaacaacgtccttaatcagctggcagcgatcgaagagaagcgcatcaagacgccagcagagaatatccgctttaagctcaatagccgttggttcgaccgctccgtcattctggaatttttgcaggaaaacggctatccggatctgcgctatgtgcagtcagtgcagctggaaggcgacgaaatggtttctgacacctatcacggtggtgatggtctgttcgtcgggcaccgatacggtgtcgtccagcgcaaggataaagaaacaggcgagatccgctacgagtgggaccgtaaatcgggtgaaaacgcgaccgggttcccggcacagctggaaaagtatctcaatggtgcgcgtatcggtggcaaagatagcgcgacggcgaacggctaccgcgagcagatggcactgcttgaggaccagttcaataagtggatcaagacgcacgatcgctacgatgagctggttgccaaatacaacgatgtgttcaatagcaatatcccgtatgaacactctggcgatccgcttgggttgaagggattaagcggtaagcgccagccatttgattaccagaatagcgaggtgcgccgactgtccgaagatgggcgcggcatcctgggcttcggcaccgggctgggtaaaaccacgaccgcgctggcgcttgaggcgttcaactatgagaacggtcgctccacccgtactgcgtatgtagtgcctaaatcagtgctggaaaactggtattacgaagcaaaagaattcctgagtgaagaggcattcagtaactacctgttcgtcggtcttgatgtgctgatggatggcgatcagattcgccaggtgccggtgctcgatgagaacggtaaacctgttcttggtactgatggcactccagttatgcgcgatgccctaaaactggcagatgaagccactatcacggcgcggatgaacgcgatcccgcactcaaattaccgtgcagtcgtgtttaccaaagaacaatacgcccgcattccgctacgtgatgacaccgtagatgagcatgcacaggatatgctttatgacttcgttgccgccgggcgcgtagccagcgcaatggactccgactcccaccgcaaagaggccgcgcgtcgccgggtattgtcggagtattcagataccggcaccgaaaaagcagagaagtatccgtactttgaggatatgggcttcgatagtgtgatcgctgacgaaggtcacaactaccgcaatagctataaaaatggtcgcgaagcgtcacaactggcctatctgcccaccagcgcggtggcgcaatcggcgcgggatatggcaattaaaaacgcgtacctgatgaaaaagaatggtgggcgcggaccggttctcctgactgcaacgccagtcgttaacaccccgatcgatgcatacaacatgctttctcatgtgctgccgaaggaatactggcagaagatggggatctacggtcctgatgacttcgttaaattcttcggcaagaccaggctggaaacggtacagaaaatcagcggtgaagttgaagaaaaaatggcgctggtgggctttgaaaaccttgatgcgctgcgcggcatattccatcgctggacaacgcttaaaacggcggaagacgttaaggataccgtggagatcccggaactggacgagcaccagcaggatgcaccacttactgaagaacaactggcggcgtatgaagaattacgtcagcaggcggaagcggcggccaaagccaacaatggcgtaacgacctcggtcaatgaagacggcgtgattgagcacgagaaagcccgtccgatcttctcaataatcagggatatggaccgcgtatgtactgacatggacctgtactatcgccggatcacctatcgtttcctgccggagtacgccgatgcggtgcagcagctggcggacagtttgcctaaacaagccaccagcgaagacgacgacagtgatgattcaatcacgcagcaatcgcaatactccctgatagataagggcgagtttattcagttgcaggttccggaagcgttcgagcaggaagtgaataagcgcctggccaggtttggcattgacgaacagaccgtaactcaccccgttacgcccaaatacgcgaagctgattgccacgctgaaggagtttttcccggaaggtaagcaaatcatcttcaccgatgaaaaaacgcaacaccagaagctcaagcgcattatctgcaatgctcttaaccttgaaccttcaaaggtggggatcctgaatgctcagacggttgccgaggcaggtaaaaccggtaagaaactgaaagcggttaaaccgccgaaagagctaccggatgaaccaacagatgcacagatagcgagatacaacgagcaaatggctctgtatgacgcctatatcgcgcagcaaaatgaaatgtcgtag

SEQ ID NO: 102888 - DNA, 1710 bp, Enterobacter aerogenes
ttggcagacaataaaatcacgctatcctcggtcaggaaggcgctggcgggggtttttaaagacaacggagaacgggacaacatcctcctgtccgcgctggctgtgcacggcggaagtgggtatttgttttctcgcgcaggggcaccggtacaactgtccggcttcttaggcggcaaaccgggcgatagtggcatggctggcgatgggctggtggacggaagtcgctttatctttgatgaagttcaactgccggaagatcgcttgcaacgctatccgctactcgaagagatggcggtttacagcacgatcgccaccgcgctgaacatccatattacgcacgcgctctctttcgataagaagaccggacaaaccttctctatcgtgccggtacacaacggaaacgatagtgactatgacgccgcgcaagcattgtgtgacgagctgatgaacgacatcgggcgaaccatcaacaaagaggtcgccgggtgggcatttatcatgtctgtatttggggtggcttatgtcaggccatacgccaaagaaggaatagggatcacgtcttttgagtgctcctattacacccttccgagcttcatcaaagagttcgaggtcagcggtaacctggcgggatttagcggcgattatctgaaggacgcgtcagggaaaatggttttcgccgatccgtggaccattatccctatgaaaatcccctactggcggcctaagtcaaaccttatgcctgtgcacactggccataaggcttacagcctgctggataatccggaagagcgcacgccgattgaaacccagaattacgggaccagcttgctcgaatacgcctacgagccgtacatgaacctgcgttcggcgatccgctcgctgaaggcaacgcgttttaacgcgtcgaaaattgaccgaatcatcggtctggcgatgaatagtctggatccggtaaaagcagccgattattcacgcaccattactcagacgcttaaacgagcagctgacctgatggaaaagcgcgcacgcggcgcgaataacatgccgacagtgaccaataccttgctgcctattatgggcgacggcaaggggcaaatgacgattgatactcagaccatccaggctgacatcaacggcattgaagacattctcacctatatgcgccagctggcggcagcacttggcctcgattacaccctcctggggtgggcagatcaaatgtccggcgggcttggtgaaggtggattcctgcgcacggcaattcaggccgccatgcgcgcctcatggatccagcagggcgtagatgagttcattctgcgggctatcgatattcatcttgctttcaagtacggcaaggtatacccggaaggtgatcgcccgtacaaaatcgaattccactccgttaataccgctctgcaacaagagcacaacgaaaaccgcgactcgcaggcgaactacgccaccatcgttacgcaaatcctcgatgccgtcagcaataacagcgtcctcgccaattccgatgcattcaaacgttacctgttcagcgatgtgctggagattgacgaaaaaatctctgaagcactggtgaacgaactgaaagcgaaaagcgaggacgacgatcacctgatggattccatcatcaaaacaccgccacaggaactggcgcaaatccttgaatcggtctttaaagagggaaacgagaatgactga

SEQ ID NO: 102889 - DNA, 1020 bp, Enterobacter aerogenes
atgactgatgttttgaaaacggtcactgaccgcttttgtctctatagtaatgctagaaaaggtcgccagaacgggcgacagtatgtattaagcgcggtcaagaccatgcttgaaagcaaggaaactcaggaaggtttacgccttggagagcttttcggctattacggtcacggtcgccgacagctgactggcaaactggaagtaccagaaaccagcgtgatcatggtggaaggtcgcccggtcgtaatcgacaatgttccagcgtgccgcacagtggctatatctgttgacgacaacggcatcgttacccatacacaggaaattcttaacacagagccgggtaaaattgtcgccgcgatgatcgaaagccgagctggtggctggagctgggccactggcgggcgcgagtccgggaaaatcgctgtaaccaccagcttccatggtgtggattatgtgacaacgccgaactatatcagtctggatcatcctgccagcgccggaatgtttgaaagcgcggattctaaatctctactggcagagtccctggcggcgcatggatactctgacgagtcagtgcaggccgttatatcccattacagtaaaatggctgaactggaaatgatggtggaggcgacagagcgtacggcagaactggaaaccgcactactcgaaagccagggccgccacctcgaagcaatggccaagatcgcagatgctgaagcgcgaatcgctttgctggaggaaacagcgggtatccgcgacgatgtgctggcagcaatgcaagacgaactggataacctcccgatcttcgtctccgccgcccaaaaagacgcattccgcctcaaagaacctggtgatgcaaaaatcgttgccacacttttcgaatctctgatcaaagttggcgcacgcaacttgcctgtcaccaagaaaattaaggaggttccgcaagcggctaacgtccaggcaccgcgtgagacaagcatcatcacgtttaataattcaatcaatccgtttaaataa

SEQ ID NO: 102890 - DNA, 558 bp, Enterobacter aerogenes
atgaagggaaaaacagccgcaggaggcggtgcaatttgcgctatcgcgatgatgattaccatcgtgatggataatggcaatgtgcgaaccaaccaggcggggcttgagcttatcggaaacgctgaaggttgccgacgtgatccatacatgtgcccggcgggggtatggactgacgggatcggtaatacacacggggtaacgccgggtgtgcgaaaaacagaccagcaaatcgccgctgattgggaaaagaatatcctgatcgctgaacgctgtattaaccagcacttccggggcaaagacatgcccgataatgccttcagcgcaatgacaagcgcggcattcaatatgggatgcaatagtttacggacctactacagcaaagcgcgaggcatgcgagtcgaaacgtccatccacaagtgggcgcagaaaggggaatgggtgaatatgtgtaaccatctccctgatttcgtgaacagtaacggcgtccccctgcccgggttaaagattcgccgtgaagaagaacgccagctttgcctgacggggcttgtcaatgaataa

SEQ ID NO: 102891 - DNA, 489 bp, Enterobacter aerogenes
gtggcacaacgcggtgtaaacaaagtcatcctgattggtaccctggggcaagacccggagatcaggtatataccaaatggcggagcggtcggaagactcagcatcgcaacgaatgaatcatggcgcgacaagcaaacgggccaacagaaagagcaaacagaatggcatagagtcgttttgttcgggaaacttgctgaaattgcgagtgagtatttacgaaaaggttctcaggtctacatcgaagggaaacttaaaacccgtaagtggacagatgacgccggtgtagaacgttacacgacggaaattatcgtcagccagggcggaactatgcaaatgatcggcgcccgccgcgacgattcacagtcctcaaatggctgggggcaatcaaaccaacctcaaaaccaccagcaatacagcggtggcggcaaacctcagagcagcgccaataacgaacctccaatggactttgacgacgatattccgttttag

SEQ ID NO: 102892 - DNA, 1356 bp, Enterobacter aerogenes
atgacacactgcaaagaaaatacttggtatgagcgtcaagggtacaataccacccgcccgaatgagataaggtcggagtatgaacgtgatctttcccggttaatccactcttccgcttttaggagattacaatcgaagacgcaggtgttgggattgggcgaaagcgatttctaccgtacgcggctaactcactctatggaagtagcgcaaattggcggcggtatcttgtctcagttgtctaagcgcgatacagatgaggggggtaaattcttacctgacccaagcctgatgcaggctatctgccttgctcatgatataggacatccccccttcggtcatggtggtgaggtcgcactaaactactgcatgagatcctatggcggctttgaaggtaacgggcagacactgcgtatactctccaaactggataagtacaccgaaaccaatgggctggatcccacccgtagacttattttaggcgtactgaaatatccagcaagctattcagaggtcgtcaatgagagggcttacagccagttacagccaagaagcaatgagtggttgtttaaatcatccgaatttaagcccccgaaatgttacctggactctgaggagaacactgttagattcgcactccaaccttttgatagtgatgatgttaagttattcaaaacggtaaaaactaccgcgttgaataagcacaaggaaacaatatataaagcactggatacaacgattatggacttggctgatgagatatcctactcactccatgatcttgaagacgcaatttctctgaagatgatcgacaaaaaaatgtgggaggagcacttcgaggacaaatcccatttatttgcagcttgccaatgcgactcgtttaatctaaaagccgatgatgtagctgaaaaactgttcggcgaaagttatctacgcaaggagtgcatagggacacttgttcatctgatgatcactagcgttaagcttgaagtgcagaactctgatttcaaaagtaaaattttacgctataaagtagcacttcctgccgcggtagaagagttacgtaaagccatttttgagctggttaggaacaaagttattcagcacgaaaacgtccaactattagagttcaaaggtcagaaactgattgtggaactattcaatgtactggcaaatgacccaatacgttttctcccgacagaaactcgaaagaaatataatcaagaggaagcaaaaggtgatgataaaaaaatgcgcgtcatttgcgactatgtttcaggcatgacagatgattacgctactcgactgtatgagaaaatatttgtaccgagaaaaggctctatttttgatagactctga

SEQ ID NO: 102893 - DNA, 369 bp, Enterobacter aerogenes
gtggacgctttgtctgaggttttcgttaataattggcttcctggtatctgcacattttttttaggtatcttttattctaatattgttgaaaaaaagaaacttaaacagaagttaaagaatgatattcttgagatattcattcctgtatttaacgccggaaatgaaatctccattgaaattgctgagaatgcttacaggaatatgaatggtacgtttcagttgtacaagagaatatatccaggtatgttcaacaaagaagcagagcgtgagctagaccgactactaaaagacggtttcctcataaatggagaggttaataagcattactttgaaccaactaatattgagagcctgattaaaagattataa

SEQ ID NO: 102894 - DNA, 309 bp, Enterobacter aerogenes
atgcagattaaaatcgcagcgccattaggtggagatgccattatcgaatttgatgataatgaagaagtttccgggcgtttaagcattatctccggtgacattaccgaggacatgatcgctgaagccatagctggagcaaatcccaatagctatatgggattcgttaacacccttgatgctcccgcaagtgatgttctccgaacgctgcatctttacgctggctggtttgttgattggccagcagtagatggtggcgatgaggacgacgacgatgatttgggtgatcatgtggatcagtttgtatattag

SEQ ID NO: 102895 - DNA, 2988 bp, Enterobacter aerogenes
atgagcttaagcgatcaggtggtaatggccaccagcatagaaacgctgatcgagctgctaaagaacctgcccgattatgggcgggtttcgtatgtggtgacagcgaagggagacgaggtaaaaacagcgtttgatatcgtcgatgcctcagctattttggtatccaatactctggatgggaaaattaatcctgactatccccaggaacttcagccgcgtgaccggacccgcgcatccagccttcttcaggttaaccagatatccaaagatttgcggccagctcagcttactgattccggtttatccagccatggtgcgccaataattggtgaggacaatgccgttgagtcaggtaatgggcggaccatggggatcattaaagcctatcaggacggtaatgcggatcggtatcgggagtacctgattgaacatgcgaccgaattcggcatacggcctgaaaaggttgaatcaatgacggctccggtactggtgcgccgccggttaacgaaggttgaccgtgttcagtttgccaaggactcaaatatttctgatctccaggaaatggcagccagtgaaaaggcttttgttgatgccgacagcataacaccggcgatgatggcgttgtttaacccgtcagaaagtggagatctgcttagccgcagtaatgacgcgtttattcgcggatttatgacgcaagttggtgccacacaggcggctggccttgtaactgaagatgggcgaccaacacggcaacttgtagaccgtatacaaaacgcgatctttgccaaggcatataaggatgcgcgcctggtaaggatggttgcagaagaacctgatccggatatgcgtaatgttctgacggcgcttaatgcggcagccaatgattttgtccagatgcaggctttatcaggagaagcgcacaagcaggctgtgacaaccatcgttgatggcattgaaacagcggatagcctcgataaaaaggcgctggcggcattgaaagatgcggtagacctggtaaggcaatcgaaggagtcaggccaacatattaccgatgttattgctcagggggatatgttcagcgaaacagccccggaagtgaaagctctcgcgttgttcatcgtcgcgaataaccgtagcgcgaagcgtatggccaccgcctttaaattgatggctcaacgtatcaatgatgagttacagcaccagggccaggcgctgggggatatgtttggcggtggtgatgtgtcgttacaggatatccttcgccaggtgtctcaggaactggaaaacgaaggcatgcaagggatatccggcggtcttttcgagtccgtttccggcggtagttacaacggtgttgctccatataccagtttgctattacatcgggcatccggcatcaaagacattattcatctgatcaggctgctttcccgcacagatccccaggatgaacagcttgtacaagtgcttgcgcattttgttcgaatgcctgttgccgacgtgaataaatggtgccgattattcggtatcagcaattcgttacttcgcggattgttaaatcacgcatcctcccttgggcgcgacggctttgatgagatagcgcaggcgatacaaaacggagatatgccaccagctattgactggttttccattcgcccaaccagggtgaaagcattccttagcgcggcgcattcggcatcaccattggcagaaatggttcagaggttgtcgctcatattcacagaccataccgcgttgggtgatctgactctggacgagatgaaagaagcctccattcagtgggccgatcaacaaaatgaggttaactcagacttcttgccagcattcaggaaggccgttagtaaagcggatgattcccgtggaattctgaaggcatttaaggcattgcaaagtcgggttaataaacatgtcggagatatcgatggggtaacggcggaaggcagggatatccttaaagagcacggcataacgccagagtttattgatgagatcaggacggatatgcagcgtgaggtcgtatcgtccctgcaaattgtagccagagcgttggcggatgctaatccgaagagtgcggccattgttaaccgggttattggtgatattgaagcatcggagggcatgggggcgctgaaactcttcctttcgcgagcgtttaatcctaacggcaatattctccctggcattattggtgaggctaaaaagtatgtcagtgaagaagaacttgagcagcttgaccaactacttaagcgattctcatataacccgcagacacgctggcaaatgaatcagcgaagtatgggttcggtccacgagaaagtgttatctgccatgaacagtgcgatcgcaaactcatccgtatctgaagaaaaagctcttgagtgggccgactcttttatcacagaagaagtggaagaagcccgcgctggacagaatggtgggatagacctgcgcaaggaacttgctgatatttatcgcctgaccggcgggaaaatatcgaccttatcaaaggtagttcaccaccagggaagggcatatgcaaatctaaatggtgttgttgctgtcaatttgaacgatgaaaatgcaagtgcactgtggcacgagctgggtcatcatcttgagtacagtaaccctggtttgttagagaaagcccggtcattcctgaaggccaatgttgaaggggataagccatctttcgtcaatatcggtgggcgtggcaagcctgaatggtgcttcagatctcgattgagtaatatttatatggcgaaggtatacccgccagcctcagtaagtaacaccgggaaaattcggcagaaatcaccgactatttccaaaacgtcagcaacggaagtattctctatggctcttcagttgtatcatgacaaagaggccgctgccgcatcactgatgaatggtgacggattgctggaactgttattaggtgtggcaaaggagctaaataatgcagattaa

SEQ ID NO: 102896 - DNA, 1149 bp, Enterobacter aerogenes
atgaggcgctttgccggagcttgtcgtttcgttttcaaccgtgctctggcgcttcagaatgagaatcatgaggccggtaaaaaatacatcccttacacgaaaatggcttcctggttggttgagtggaaaaaagacactgaaaccgaatggcttaaagattctccctcacagccattgcaacagtcactgaaagaccttgagcgggcttacaaaaacttcttccagaatcgggcagcttttccccgattcaaaaagcggggacagaatgatgcattccgctacccgcagggtgttaagctcgatcaggaaaacagccgtatttttctgccgaaacttggctggatgcgctaccggaatagccgtcaggtcacgggtattgtgaaaaatgttactgtcagccagtcctgcggtaagtggtacatcagtattcagacagaaagagaggtatccactcctgttcacccttcagcatcaatggtcggactggatgctggcgtggctaaactcgccacgctgtcagatggcacagtctttgaacctgtaaatagttttcagaaaaaccagaagaagctggcgagacttcagcgacagttaagccgcaaggtcaaattcagcaacaactggcagaagcagaaacgcaaaatacagcgactgcattcccgtatcgcaaatatccgcagggactaccttcacaaagtcacaacgaccgtcagcaaaaaccacgcaatgattgtcattgaggatttgaaggttaaatacatgtcaaagtcagcggcgggaacgataagtcatccgggtcgcaatgtccgggcaaaatcaggtttaaaccgttcgatactggatcagggctggtatgaaatgcgccgccagcttgagtacaagcagctctggcgtggcggtcaggtgcttgctgttccgccagcgtacacaagccagcgttgcgcgtgctgtggtcatacagcgaaagaaaatcgcctgtcacaaagtaaattcagatgccaggtatgtggatatacagcgaacgccgatgtaaacggcgctcgtaacattttagcggcggggcacgccgtacttgcctgtggagggatggtgcagtcaggccgcccgttgaagcaggaacccaccgaaatgattcaggcgacagcctga

SEQ ID NO: 102897 - DNA, 366 bp, Enterobacter aerogenes
atgacactatcagctattgagttaatggatctcagcgataagttggatgctttgatgtccaaagcggctaccgcgagtggcatggagttgctggatatcagcgatgaaattgaccagatcatgcaacagatggggtacggcgcgtccggcggcagtagtggcgaggaaaaacaaccttcggtacatgatggtgtgccaaaactggttgctgatttcctggctgataaattcgtcgatcagagcactgatgcatttatcggtacgttacaggacttgagtcaatatgttggcacatacatcgacctggaccaggttaaacagcacacggcggcatggatagccgccaacattaaagaggcagcgtga

SEQ ID NO: 102898 - DNA, 1920 bp, Enterobacter aerogenes
atggaacagttcaatatcaataaaggggtgacgatcaagcctgggcttgacgtgcttcccccgccagtgactgatgatgaatatcgcgcattaatggccggtgaggaccgctatctgatgacggaatccaacaccctggaggaaatcgaggctacgttcttctatgacacgccgatccactggtgtgctacggatttactggaggcgattagttctactcgtttgcagttacaccggaccatgcaggcatttgtccgggcattgaaccagaagctgaatggtaccggaatctctgcggggagtgataaaacgggggatgtggcccagagcggcgcgcgcgcgatcggcggcgctgaaattggccgggcacgtaacgttaacgggctgccggtcctgccagccattattccgctcagtgatggtcagactatcagcattctgtttcatagcccgacagcggaaaaccggatcaccaatagcgatacgctggttgctttccagttcttactgaataaaaaagacgttactcacaccgttgctccgatgagtggacgtgatatgacgctggcgcaggtcaccatgaaacttgccaaccttgcagagaaaaactcggcaaaattccagcgtgcgcagaagaagaaaaaagcccttgttgatgaaataacccaactacaggctgacagtgaccagaaagaggatgccatgagcgacctcgcggatcaggtggcagcggtagaagggcagaaggcagatctggagcagaaaattaacgctgttgcatcggaagcggattctctttatgaagagaatgagcgtttgcagacggagattgatcagctcaatcgcactggtgggcgcgataccattgctcctgcggggatgactggtgggtactctcgcgcgctgacggatcgccttgccagtatcaaaaatcgtatgcatatgaacggggaagtgacgctcagtaatggtgcatcaatgaagcaattcattgaggacggcgaagggtatatccagttaaccgattcggatggcagcgtgtacatgatcaaggctaaatccatacagggtgtggacatggcagatgcgatcggcaagctgtttaaagcctataaagcgggtaatgtatcggaatatctggtccaaccagaagaacataaaccggaaaacgtcgaacctgaatcagcggaggataccggtagctctttgcctgaaccagaagtctctgtaggtgcatatcgatatgccctgcaaatgcgtccggcggcccctggcgcaatacctgaaggtaacaaagcaattctgccgcgccctgatgaaggtgacccgtattatgaatatgcacgctacggcattgttacttacgataccccgctttctgatcagcaaatgagtgagtacgacctgaagttattgcctcgcgaggattctttcgacttcctggcgaagacacttactaatggtccgtttggcaaatatgcacaaaaagctctggagctggccaccagctcaccagacgagttccgcgtaatgctgaaaactcagtttcaaaaatctttccccaatattgcgtttcctgggggcgctggcatcgagaaaatggtgcagagcatgatcaatgcattgcaggccgaagtcggtgagattactcaaccagaaccggtcccggcacagcctgatgaaacggttagcgaagcagatgcagaggctaataaagccattgaatatctcaatagcgtgatggatatgcaaagcactgacatggcggagatccgtaacgcccggggcaatgtccgggaagcgattgctgcccttcaggctgccggacgttttgaggaaaacgaagagctggttaatggcgctgctcgccacttggctgatctgctggtagcaatccagaaagcgggggtagcggcatga

SEQ ID NO: 102899 - DNA, 603 bp, Enterobacter aerogenes
atgacgaaaaataagtatgcaacggtcgattttgaccaggttaatgaaaaggggctgaaatcccttatcgcggcgatcaataaaaccagtgttacggtaattgaggttgactccagcaaccgcgcaacaacgaaagatggcgttaaagttaaaaccgcaaagctggttcttaacgacggacaaattcttgccatacaggtaaacgatactggcgatatatcgtctgtgaggctgaatggaaaagctattcctaacgctcaatcgccggatatcaagacgcttggtaccgtcatggggcaagcggcccgcaaaaactccgcaaaattccagaaatcactgatcgccaaagcgaaacgtgttgccaatccggtagacaagaaaccggcagtaaaatccaactttcagcgcctgcaagaggcaaaacagcggaatgctcaggtggttgccgcttataaatcagcgcagaactcggtgtctttcaatcaacagcagatcactgatttgcgagcgaagctggataaggagacaggccgactcaataacgaaaaggcccgaaatggcgaactcaaacgccgtcttaagcaactgaaagcaggaaattaa

SEQ ID NO: 102900 - DNA, 444 bp, Enterobacter aerogenes
atgattggctggggtgtatgcgttcttgcgttagccttagccgatcgctatttgctaaaacgcaaggacatcacgcatttagaacttggtgatgtggaaattaaaccgggtttcatccgggtgccgttcaaataccggtctaaattcccgtttttgcgcggcgcaacggtcagatattggatccgcgatgttcagaagccgacgacagtgattgaaggcgaacaacgttgtctgacgtcggctgaacagggcgaaaacagtgaatggttgtacatacccactgaatatatgggtaaaggagaacggctgtggcatttcaacgtcatggttacgcatggcgactcgttcattaacccgttgtatcggattttccctgttactcagcaaatccgcagaagttacgtaataaatctcgcacaggatgtgtcagatgacgaaaaataa

SEQ ID NO: 102901 - DNA, 330 bp, Enterobacter aerogenes
gtgcttgacacacaggaattagctccagttgctattgcgctcctgctttcagtaattggtgggataggcacgttcctgatggatgtccgagacggtcgccagtctggcaatttgttgggattggttacggagatctttgttgcagtgacagctggcgcggtggcgtacctattggggcaacacgagggctgggagttatcaattacgtacttaatggtaacgatagccagcaataacggtcatgaggtgatttcagggatgaaacgagtgaatatcgatagcattctgaatgttcttacaagtttggtgaaaaagggaggcgggaaatga

SEQ ID NO: 102902 - DNA, 264 bp, Enterobacter aerogenes
atgacattttatgtacatatcgtgatgttatcccttcttggtggggtgtattcgtatttgagtgggctatgtgaaaaccgttacgagtcttcatgcaagaaattgctggccgaatgtatttccgccgtacttgctggctttattggcatgtatctcgcggaatataaggatatgaatgaaagccttcagagctgcatggttcttattttcagcgccaatagcaggcttattattgaaggttccaaaagtcggttgaataggtaa

SEQ ID NO: 102903 - DNA, 573 bp, Enterobacter aerogenes
atgcaaattggctacattcgtgtgtcaacaaatgaccaaaacacagatttacaaagaaatgcactgaactgcgcaggatgtgaactgatttttgaagataaaataagcggaacaaagtcagccagaccaggcttgaaaaagctgctcagaacgttatcagaaggagatacgctggttgtctggaagctggataggcttggcagaagtatgaaacaccttatcacgcttatagaggagttgcgggaaaaaggtgttaatttccgtagtctgacagacagtattgacacatcaacacccatggggcgtttcttttttcacgtcatgggggctttagcagaaatggaacgtgaattaattgttgagagaacactggccggactggcagctgcacgcgaacagggacgcattggcggacgtcgcccgaagttgacaaaagaacaacatgagcaaatagcgaggttgatcgaaaatggctacagcaggaaacagttggcaattatttacgatatcggtgtatcgacgatttatcgttatcatcctgtagagaagcgccaaactcaatctgagctgtaa

SEQ ID NO: 102904 - DNA, 177 bp, Enterobacter aerogenes; identical to SEQ ID NO: 99368

SEQ ID NO: 102905 - DNA, 402 bp, Enterobacter aerogenes; identical to SEQ ID NO: 16839

SEQ ID NO: 102906 - DNA, 612 bp, Enterobacter aerogenes
atggataatgcgatattaaatagcgaacttatagccatacaggcaggaaacattatcgtttataactatgatggtggtaatcgggaatatatttctgcatcaactgaatatcttgctgttggcgttggtattccggcacattcttgtttggatgctccaggctcacataaagcaggttatgcgattctccgttcagaggatttaagttcatgggagtatgtgccagatcatcgtggcgaaactgtctatagcattgacacagggaatcccgaagaaatcacggtgttgggtgactatccggaaaatacaaccactatcgccccgctaacaccatacgacaaatgggatggagagaaatgggtggttgatactgaggctcaatatagtgcagctgtagaggcagcagaaacaaaacgtcagtcattgattgatactgcgatggattccattagtctgattcagttgaaattacgggctggacggaagttgacgcaggcagaaaccacgcagcttaactccgtgctagattatatagacgagctgaacgcgatggatttaaccacggcaccagatctcaactggcctgaaaaacaactttctacagccagttga

SEQ ID NO: 102907 - DNA, 738 bp, Enterobacter aerogenes
atgactcagaccgctgttattcccgactaccttaaacccgcaatggaacgccttgagactgcccgctcggcgcatctcgccaatgccagccgtatggatgaaaccacgacggccatcagccaggtgcaaacgcaaaaaaatgaactggagcaggaaaacggcaatgattccggcgcatggcgcgccgcctttcgtgcaggtggtgctgtcattaccgacgagctgaaacaacgccatctggcgcgcgtggcacggcgggaactggcgcaggaatgtgacagcatgaacgaggtactgtcttttgagctggacaggctcaaaggagcctgtgaccgcacggccagagcataccgtcaggcacatcacggcgtcctcagtcagtatgcagagcatgaactcgatgctgccctgcgtgaaagctgcggtgccctcatcagagcaatgaaactcaacatactggttctgaataatccgcttgctaataccaccgggcatcagggatatatcgaaccggaaaaagttgtaatgcagcaggtgaaagcgtggcttgaacaggccgtaaagggctgcaatatccgtctgaccgatgaaccggtgctgtttaaaacagggctgtcggcttccacactgccgcatatggaacatgacgttgcggccacacccctccagcgtaaggtttggcaggaaaaaatgcgggaacgtgaagctgacctgaaagcacgggggttactgtcatga

SEQ ID NO: 102908 - DNA, 246 bp, Enterobacter aerogenes
atgatgcgctgtcctttctgccgcactgcggcccacgttcgcaccagccgatatatgtctgacagcgtcaaagagagttacctgcagtgccagaatgtgcactgctcggcgacattcaaaacgcatgagtccatctttgaagtgatacgttcgccggtcatcgatgagaaacccgcgccggtgccgacagtccccgtggcaccccgtcgggtaaaaggctgctacagctcgccgttccgccattaa

SEQ ID NO: 102909 - DNA, 567 bp, Enterobacter aerogenes
gtgaccaccctgaccttacagcaggcctatgacgcctgtcagacgaacaaaaccgcgtggctgaaccgtaaaaccgaactggccgccgcaatgcaggaatatcaggaattattgctggatgacaatgcatcaggctcccgcagattgcagacgctgcgtgacctgattgacgtaaaaaaatgggaagttaatcaggccgccggtcgctacatcttctcgcatgaggaggtgcagcgcatcagcatccgtaaccggctgcatgattttatgcagcagaacggcgcggagctggccgccgcactggcaccggagctgatggggattaaaaaccagcccgcgatgataaaaaatcgcgcgcttgaccgttcagtcacttacctgagagaagctctttccgtctggctgaccgcagaaaatgaaattaattattctgcacaggataacaacattttaacggccatcggatacaggcctgacgcgccttcgcgggatgataatcgtgaaaaattcacccctgtacagaacatgatttacgcccgtcgacgcgccgaactggccgcgcagtaa

SEQ ID NO: 102910 - DNA, 1623 bp, Enterobacter aerogenes
atgataaattttacccatgagcaaaaagttgcaatagattacccatatagtatggtactgacggcttgtcctggaagtgggaaaacagcagtaatcgtagagaagattgtccgtgacttagcgggatgcaaggaatatcagggcgttattgctatatcgtatactaacaaagcaagcgatgaactgaaaaagagatgtttaaaggctacaccaaactcaaaatcaagcttttttgggacaatagataagttttatttgaccgaagtgatttatcaattcattaagcaattatggggaggagttgatgatttacatgtagttaagtttaacgagctaaattcttctgaacaagataggctttctgctttctttaatgtcgaatccatatgtgaaaagattgatgagtatgattttaaggatgttaaggaactatacgctaagggtattctaatactggagtttataccattacttgcattttatatattgtgcaactcgttatcgtgtcgccgttatatcgctaaaaaatacacctctatatatattgatgagtatcaagatgctggatttgtccaacatcttctttttcttttgcttttcgatcttggaataaaagcagttgcagttggtgatgttgaccagtccatatatttatatgcgggtaaaaactcaaaatacttaacctctttactggataaaaaaagtgggttcaccccttttaaaataactataaatcatcgctcacattcatctatagttaattatgcttctcgactattgaatgaaaactctgatttgttaattactgatgaaattcgtgtctacagaaagcttgttaatggtactcagcgtgaaatagctaagtggattgatattaatattaacaacattaaacagaaattcaatatttcaaaagaaaaagaaatagcgatacttactgcaacgaatagttctgtctctttagtatctggccttataaattctaaagcaagagcatatcttgatgatgagctatctgtgcttggtggagaagtatctcttttgttaaagagccttttaaattatcgttttaataaaataattacagcacaggctatcattgatagtttaaatcacaaggtactagagcgaaatacaataaggaaaatgcggggtgttattagagaggttagggattctgatgatgaccaacttattccagctttacgtaaggcaataagattattaatcagtggtgatatttcagctcgccatattgatgccattaactcaattttacacaataaaatgatgctaaataattacttgccagtgggtgatgatgagttacaaataatgactttacataaagctaaaggactagagttcgactttgtttttcatttagatctttatgattggatattaccacggagagagtatataaaaggttgttttgatgaggttttttcgcaatatgagcaatgcctgaatcttcattatgttggggtcactagggcaaaaaaagctgtggtattaataaattctaccgagcgtttaaattaccaaggggaattaaaaaaagcgaaaccttctcagttcttgtcactaaaaggacttgaaggtctgtataaaaaaatttaa

SEQ ID NO: 102911 - DNA, 1704 bp, Enterobacter aerogenes
atgtatattgataatgtatatttaaagggatttaggaactattccgatagtttcattaaatttaatcattcaactcttattattggtagtaatgacattggtaagacaaacctattgtattcattaaggattttgttagataagagtttttcagatttagatttagaacctaaaaatagcgatttccacattgatgcaaaaggaaatcaatgtgaagagttagaaataataattaattttcgtgaggtaaaagaggatgccgttctctctaagttagcggggtatgtcagtgaggatgcgcaaacatacatcaaatataaagcgcacagaactactcttgattacaaattatatatagggcacaaagaatccgaaatggatgagattagtggtagattttatcttaaatatctaaatttacgctatgtgaattcacaacgagatcttgctaaatatatatctacagagaaaaaacatttacttcggcttgctcaagaaatgagaagcgaggagcaggttaggaaggatgaaaatactttaaattcattaactgatttactaaatgatgttaataataaggtaaaagaaataagctacgtttcgaccgctacggaagagttaaatgatgagttgaagaaattatcatataacaatgaaaaggtttctgtaatgctcgattctggagcaattggtgttgatcagtttattgaaaaattagaattaagttcaaatacaaatggcaaaaaggtaatgcttggaggggatggattcaataaccaagtattgcttgcattatggaaagccaagagtgtacgcgaacatgatactgaaaatgaagtggttatatattgcgttgaagaacctgaatcacacctttatccgcaccaacagagaaaactatctgagtatttaattagtaaattgccggggcagtcactagttactactcattctccacaaattgccgttaattattcaccggattcgataattaaaatttgctcttataacggcgaatcttacgcagcaagtgaagggtgttctgattgtattagtgatgcttggagtggaatgggataccggatgagtatactcccagcagaggcattcttcgctaatgtcgtatttttggtcgaaggaccttctgaaatgttgttttatcaggctcttgcaaaagagtgccaaattgatctggatttttttaatataagcatattatcagttgatggcgttcaatttgaagtttataggaaaatacttgatgctttcgagattaagtgggttgctcgtacagacaatgattcgtctaaagttccaaagaaaaaagagtggcaatattcaggtttaaatcgagctttggttctatgtggtatgaaaccactaaagaatgaattaatggaaatatctcaagttcaaaggatagagaaacataaagtttataaagatgcacttaaacgtaataatatatttgtttcaattaatgatctcgaaggtgatattagcgttgagttaagtaagcaactgaaagaatatgtaggtgttgataatgaggaaattgctgctgattatctaagggggaaaaaagcaataagaatgcaagagttcttgagagaatactctcatgcacttaaaactatttcaacaggtgaattaattcaaccccttttgactgccgtaaaactggctacagaggagttgaaatga

SEQ ID NO: 102912 - DNA, 4725 bp, Enterobacter aerogenes
ttgattaagacagattgggatatatttaaagcaaaattttcaacaaatccacaagacgcttttgaatggatgtgttatctccttttttgcaatgaatttcgagtgaaaactggaatttttcgatataaaaatcaatcggcaatagaaaccaatccagtttcctcaaatggagttaatgttggttggcaagctaaattttatgaaaccgcattatccactcacaaaaatgaattactagaaacgattacaaaagcgaaacgtgattaccctgatttaaataaaattattttttatacgaattcagagtggggtcaaaacaagggaaaggaaccacaaggaaaaaaagaagttgaaatgaaggcaaaagcaaataacttagaaattgaatggagatgctgtagctttttcgaatcgccgtttgttgtcgatgattgtagccggatcacttcgtacttcttcagtcgttctgataatttatttagacttttggcgtcatttgaatctcatacccgttcaattcttgacgatattgaaactgctataacctttggtgataaagatgtttcaatcaatcgctctaatattatatctgaaattgaaaagtcagatactggcgcgttaattataagtggagaaggtggcacaggaaaaacggctctaataaaagagctttatgggaataaaggtcagggggaggtcttttatgtccataaggcgacggaattttccgttagcaacttaaatgagtttttgccaggtgtttttttaaaggattttattgaagcacatgaaggtgctgataataaaacagttgtcatcgattctgcggaacacttaattgctctagagaataccaatcctattaaagagtacctatccagtttaattaaagccggatggagagtgtggttcaccacgagaaacatctacttggatgatttgatgtttcaactatatgaagtgtacaaaattagttttaaatcaatacatctagaaaatctgaatgaagatacattattcgagcttgctaacaaacatgattttgtcatccctgatgataaaaatctcaaagcgctcatattgactccattttatctcagagagtatttgagacattatcaggaaaacaaagttgcaagctactttgaattcaaagagtctttatggccaagagtcatttcaaaacggtcaccacaacgagaacaattttttatacatcttgccgaagaaagagctaattccggaagatttttcgtcattccagacgctagctactcaaatgaaacagtagaaaaatcgttagtttcagatggaataattagctatgagtccactcgtggatattttattactcatgatatttatgaagaatgggcgctcgataaattcgtcgagagcaactttttatcctcagaaaatgcagaattattttttgatagaatacaacaatctttgcccataagaagagttttcaggcggtggctatcagaaaagcttagcgcagctaatgaagaagttagccatcttattgtagaaaccttgtcatctcatgaaatatccaatttgtggaaagatgaagttctcgtttccatgcttctatccgactattccgattacttttttaacgttaataaagattcactattggaaaacgatttgcggcttctcaaacggatatgcttgttgataagaatagggtgcaaggagatagacaatagcttttttgatagacttggtgtgagagcgccagatattttatcaatggaatatgtaataaccaagccgaaaggaaacggatggaaatcgcttatcaagttcattcatgacaatctcgaaaaaataggtgttaataatcttaattttgtattacctgttctctacgactggaactgtcacaacaagtctggagattcaactaaacattccagcataattgcattatcgttttacaaatcagcaatcgaagatgatgtctatattggtgatagcgataatgatttttccaagaatttaatcctcaccattctttatggggttggtgaaattaaaaaagaactggaagctatcattgatgaaataattataaataattggaaggaacataacgatccatatcatttaatgagtgaattcattttaacaagaatggaatgctttaatgttgctatagaaattccggaaaaagtgatcgctctttccaaatttctgtggatgtatgaatcaccagaaagcgatgattatttccatagttcaagattagagatagatcatgaatttggtattgagaatagacgtcaagactattatccagccagtgcttatcaaacccctatatacgttttacttcaaaccaatttagaattaacattaaacttcattactgaactaataaattatgcttcaaaaaaatattcagaatcgaaccttgataagggccaggttgaaacagtgaaactgtttcttgaggatgggaggaaaatttacctccctatttcaaatcgtctttggtgcatgtaccgaggtacacaggtaaaccctaatttattagaatcaatattaatgtcattagaacgtttctttcttgatagaggaaaaaacaccaaggctcaaacgcttgaatattatctaaactatattttaactagatctgagtcttctgcactcgtggcagttgtcgcaagcattgtatgtgcgtttcatgagaaaacatttaatgtagctaaaatcctattcaggacaaaagagtttttcttctttgacacatctcgaatggttctggatcaaactcataaaactcagcttacttcgctaaaaaaatttagcatcaatcggataaatgaacttcacgaaaatgaaaggataagtgcctgtgaccaaaaacatcggaaactatcattagaaactattgcgcttcactaccagttttttagagcagaggaagtaagcgaggaagaatcagagaaaaggcttcaggaaatttggaagattcttgatgttcactacacagatttaccagataaagcacaagaaagtcatcaagataaaacatggcgtttatatttggcccgtatggacaaaaggaaaatgtcacctgaagtgaaggaagtagaaaatggcatagcaatagatttcaaccctgagattgattcagagcttaaggaatatagtgaaacgtctctgagagaagtgaacaaaccgtttacatattccggtttaaatatttgggctgatagcagactctataatagagataattacaaaaaatatgaatcctatgaaaatgatccactgactgccttgggcgaggcaaaagaaatatggaagcaactttcagaaggtaacatgggggaggaggaattactgttttgtcgagccacaccatcgtatgtgtgtgcagtgttattacgggactttaaggaaaaattagcaaaaaccgaactagaattttgtagggaagttatttttgaatatgcaagcatcgttaataatgatgattacatgcaccagatcggcgatggccttgtgcctgcgttatttgtactcccaagattaatagaagattttccggacgaacgactaaccatcaagcagctattaatcaaagcgctaatgaggcatgattcagtatccgtgatggggatggacaggataagttcagtagccattcaagcagttcagcacctgtggagtaaagagcctcagttcatgaaatcgctgtatttgggttatttagtaatatcacaaaaatatagagatgttcgggagcgtttaagacaagaagcatataagcagcacaaatataaaattaacgacaatgactttgagcgtgaactatctaatgaattagagagtgtagtgaggagtattgaagatgaaactatcacggaatccgcaatagataatattggaagcatagataatgatatattaataactgcttttcagcttgcactagtggatggcgaacacaagaaaccagtaccatttgctgaggaaattattggggtaatttcacaacaattgctttcacgagacagaaaagatcggattgattacactttcagatttcaatttttaaaacactatgcccgctttatccttcatctagagaatagcgagaaggataaataccttgagtattttaccgctaatttcactttgagtgaaggtatggcagatttattaaatgaatttgttagcgttgaagactcattgaatatgccggactcattttggtatgtttggcgtagatttaaaggccacatcattgattcaataagcaatcaaggttggaaacatgataaagatcgcataatcgaatcctttttatttgcaagagtcccctggaaggatgaagcaaagacatggcatacattttcaccggagaatagatcattttttagtgatttaagcggtaagataggtggtgaatcatcttttatatatagcatcggtaaactcctttgtggcataggaagcgattttttagatgatgggatttattggattagtcattcaataaagacctttgatatcgatttatcccaagataaatcagggaatacactatttttcctggaaaggtatatgagaagatatctattcaaaaatcatgacaaagttagacgaacaccaaacctaaaagcacagtcaatggtggttctggattttctagtcgagcaatattccattacaggttacctccttagagaagatatagcctag

SEQ ID NO: 102913 - DNA, 2718 bp, Enterobacter aerogenes
atggcttttcacagaaatgctcttctttttgtcgttttgttacctgcttccgttcaattagccagcgccagtatcgtcgtacctgcgggttttgaagatctggcgaaaacgcagcacctgtggacagaagtcagtctgtatggcgcgtcgcttggcctgtttgaagccgatatcacgcttgaaacggtaacctttgtggcgccggaaacgctcatcgcggcaattaagcgtcagttcaacgatgatcctgccttgatcgcctctgtgaccggcgccctttcctctccgcttgcgcgtaacggcaatctcgcctgcagcagcaatggttccgcggcgggttgcgattttatcgacaccaaaagcgtggccctgatttatgacgagaataacgctcgcataaacttgtttttcgacaggcggtatctaccgaaacaaacggcggaaaatcagtggtatcagcctacgcgcaatactgagaacgcgctgatccaccagcaaaatatcaacttcgtggccgatgaagactatcagtcgatgaccgtacaagggaacggcgcgctggccatgactgagaatgggtattttaacctcgactggacctggcttgggcagcgctctcgccatcaacagcagcaggagatcacggtcaataatgcctggttccgtcaggatctgtggcaccaatattacgttcagttaggtgaaatggatacgcgcgatctcttcagcgcggccggcggcaatatcaacctcagccagctaccgcttggaaaaattcgcggtctgcgtaccggctcgacgcgagcgtggatcaaccccgttcagcagtccagtggaacgcccattaccgtgctgctttcccatgatgcccgtatcgatgcgcgccgaggccatcagttgctggccagtttttatcttaatgccggggcgcaaaccctggatacccgttcgtttccggacgggagctataccgtgacgctggcgatttatgaaaacaaccgcctgacccgtaccgagcaggttccgtttacccgcaccggcatcacgccattcgaccgcgtcgagtggtttatgcaggccggtgaaaccgataacgacgatatgagcgacgaacgcagcgccgtggcgcaagcgggcattcgcctgcctgtaacttctacgctggcgatcaccagcggcgcaacggtgaaaaagaaccagcgttttgtggaaagtgcggtcgactggagccgcggattcaataccggccccattgatggcgtgctcagcacacgctttagctacctttatggcagccagggccaacgcggcaatatccagcaaatcagctataacgatggcttttcactgagcttctatcgtaacgccttatcggctgataactgtgattccagcagtacaggctttgacgcggtgaatggttgctacagaagtctctcggtgatgttctccgttccggtcggctcgtggtatgccaacctcggttattccgataaccgcaatgaaggccgttatgtctcacggcgtgaattaccgaatagtgacgatcggcacgacaatggtttgccctgggaatcggtgtacatgacccgctcccgttcgcaggcgtggcaggccggactgagcaacgcgttcagcacccgcgggttgaatatcaacagcagcataaacctgtttatgcgtaacgatcattctggagatggcaaggataaaggcggcttcctcagcgtaagcctctcgctggctcataaccgtcagggcgatgcctccagctacacctccgtgggggccacgtggcaacagcagaagcatgaaaaaaatcagctcaactataacctcgcgcataactggtacaccgatgcgcgcggtgaaaacgaatatggtcttaacgcatccgggattaatagcgactcgctaaatacttcggcctatacccgtcagggcggccgatttggtaatggaagtttgaccgtcagcgattcgtgggatcgccaggatcatcgccaccggttcagcagcagcggtaactacagttctacgctggcgctatctcgttctggcctgtggtttggccgctggggtgacggacgcccggcgtcagccattgcggtcaacgtcgcaacgccggaagcgtcacctgattcccgcattgccgtttcgcttgataacagcggtagcgccgatatcccggcaaacgcccgcgcgttgttcgccctgcccggctatcagcaaaccacgctgactattaatgagtcgacggacatttcccacggcgccaacagtgaaattacgcaggggtcgggaagcagaacggtatttatggtgcctggaaaaatgctgcacagagaggtgcaaaccaccacgcgttatacctggcttggccagttgaccgatgaacaacatacgccgtttatcggcggcatgccgcttaacgtcagcggctggagcgatttaggtaatggcggctttagtgcggaaagtgacagcctgatccagtcgctctacctggtgaaacaacagcagttttaccagtgcgcgctgaaggtgaagaccatgcgggacgtcgtgcgctatgtcggcacggtgacctgcgaagaactgacttattccgcgttaccggaaaccgtgcagcagcaggcgcaactgttgctggctggccgtacgccggcggtcagcccaacggcgatgaataactctactctctctacaggaaaatga

SEQ ID NO: 102914 - DNA, 162 bp, Enterobacter aerogenes
atgctagctttttcaaaccaattcaacttcagaataacaaattatgtaaaattttctcatgagcgccccaacaaagtcaaatcacatacacacctgtcaccgctactgctactgctactgctactgctactgctactgctactgctacgatccatgccgtga

SEQ ID NO: 102915 - DNA, 570 bp, Enterobacter aerogenes
atgcttttcaattacgcatttcttgcaatcggattgctgtggatcatttctgaatcatgcattggcgcaacaaaaaatgcgaattccgattctgcaaatataaaagacaaaggctcggtcaggttacttaatgtggtgacttatagcgccatattgcttgccttttggattaataccttaaaactccctcgttttgcaaagccggatgacattatatcctggtgcggccttttcattattatcctcggcctgacgttgcgctggtgcgccattttgaagctgaagaaatattttacggtaaatgtcgccattttgcatgaccaccagttattgaccagtgggttgtaccgctacatcaggcaccctgcgtatttgggagtgatcgttgccttcggcggcatggggctggccctgggaagttacttggcgatggctgtgctggtcgctccggtgacgctggcttttctttggcgcatccgcattgaagaacgggttctgctcgctgctttccctgagtcctatcggtcgtatcaaagaaacagctggcgtttgattcctcttgttatttga

SEQ ID NO: 102916 - DNA, 282 bp, Enterobacter aerogenes
gtgtatcctgaaaatgaatatgtggctgcggcaaggaaagccagaaagaagctggcattttactttcacttctttatctatttaattgtaaatattctattactaacgattaacctgatacagggcgggaagctttggtttttctacccgttattggggtggctgttaggaatattgattcatgccttctttactttttcaaatctgcatgcacgttgctggcgaaaaatggtcgagaaggaaattaatgtacttgagaaaagtaaaaatataaggagataa

SEQ ID NO: 102917 - DNA, 246 bp, Enterobacter aerogenes
atgactacaccaacggctttggaacaattgtgtgaagaagtggccaagattttaaaggtaaacacggtcgatgcagattgcccactgggtcaattaggcattgattcattaaatgtggtggagttaatcctggcttgccagttgatctacccgaacgtgatggatttcgacgatctcagctttgacgaacactctacgctgcgggagatcgatagccgcatgatggaaagcagcgttacggtctga

SEQ ID NO: 102918 - DNA, 777 bp, Enterobacter aerogenes
atgccaactattgcaaagaaaaaggtcgggtttatcgtagtgagagtattgctcattacgtttgtcgtgggcaatgccattgcctggctgtccggcgccaaacccattgatttccccaagttgccttatgcggcggctgaccaggctgccgtcaagcaactggaaagtaccccgatgggggagatgtccagcgaacatgcacagagtctgggcatgcactatttcctgcacaatcacctggaggaggcggatcagatcctccaaagcgcattgaacagggatgagagcaatgcttccctgcaggcgttgaaggcggcaaatgacgttaagcgtgcgggagaacgtctggatctgctgttcggtcagatcaagctttatgacctgaagcaggcgctgcacacactaaaatcggtgtctgacgctttgccggagcagttggatattcaacttttggcgctgtgggcgtttacttcggttcccgatatcaatgacagcgcgcaaaatgccctcgttattgccaaacgcatcgagccgatactgaatgccgagcagtcgatgccgcaggcgctatccgcctccagcaggttggcgatggcgagactgtatctgcacatggctgaatcggcagacggcgccactccagcagcaacctggcagctgcaagccaggaacgcttggcaacaataccaggcactgaagaacccgccgatctggttggagcgggagagcgctgtggttgcgcagggcattgccgggttacccgatgttaaagcctga

SEQ ID NO: 102919 - DNA, 720 bp, Enterobacter aerogenes
ttgcgcagggcattgccgggttacccgatgttaaagcctgacagcatggaaatcgcagtggccgagcgggtggggaagcactatcagcgtggcgatgtgtgtgttgaggcgctgcagtcagtttctttctcattgcgtcaaggcgagtttctgattatcaccggtgaaagcggcagcggaaaaagcaccttgctgaatctgtgcggtgcgctggatgtgccggataccggggtattgcggctgttcggccaggatgtcggcacgttaagcgatagcgagctatcgcggctgcgaaaagaaaaaatcgggttcattttccaggattttcacctcataccggtattaacggcgcaggaaaatgtccgctacgctttggacattcgccatagcaccaacgccggcaagaaagcacaggcactgctggcctccgtcggtttggcagataaatgccaggccctggtgaccgaactgtcgggagggcaaatgcaacgggtggcgatagccagagcgttggccggttcgccggccttgattgttgccgatgagccgaccgcaaacctggatagcaaaaacaaagttatcgtaatgacgttgcttaaaaatttgtgtcgtgaacggaatgtcgccgtggtgcttgtgactcatgaccgctctttggtcagttgggcggatcgggtgctggtcatgcaggatgggaaggagtgtggcaaagatgaatag

SEQ ID NO: 102920 - DNA, 681 bp, Enterobacter aerogenes
atgaataggttcttttgcgcgttatgtttgctgtgtttttcctttctaagttacgggcaaaacgccgtcttgtacccaacggccattcccgattcggagcaggaacagcgggtgttgaagcaacaactgttgtcgacgccggcggcgcaacgcactcagcaacagtggcgacaactggccatcgtcagcatttcattgattgataatgctgacgcgcccgaggtaaaagaggcggcagcggttttgcaccaggcactaacgatgtaccctcaggacgcggagcttatggccattcaggggagcctgttttgcattcaggcaggcagtcgcaagattgatggcatacaagctatgaccttggcgaataagggattccgccagttggaccgggccgtgattatggcacctgattggctggggccgcgtttacaacgtgcgatcaccgccagccgagcgccggtttttctcggtaaacgcccgctggcgagggaagatttcacttatctcatagcggcggtaccggccacccctgaaacgcaggtgctgagggcgatgttgctttatcaatttggcgagctatcgcagcaggacaaggcgttggccagctctctgtggcaacaggcggcgtctctggaaggcggcgtctggagtgcgcgagccagagggcgtctgtctccctga

SEQ ID NO: 102921 - DNA, 894 bp, Enterobacter aerogenes
ttgattgatttcaacagctacaccgagcaggcgaagcattacgatgagacgattgaactcgttgccaaaatcaccgccggaagtgtcgaaaatctgagctatcggttgtatcggcagagcgccgagctaactgatgtgatcattgtttatcacggcgggggcgttaaccgtgacgccggttacgatattcttgcgcgtcaacttgccgcctttcaaggcgtggcggtttgcttggttgatattcgtgggcatggctgttccgccggtgaaaggggaaccgtcgagcagcctgagcgaatctggcgcgatgtcgatgtgatgatggtggagatgcggcgctatttccctcacgcgcacaggcatctgttaggccattccagcggcgctggaatgttgcttaattattttactcgttatcctttcgaacagcgtgctgacagtctgattatgctggctccggaactggggccgttcgcgggcacggcgcgtaatggcgcattgagctttgcgcaagtgcgccaatggccctttatcgtcaatgcgctgagcggcgggcggttatgcgggcagttccgtgccgtcaagttgaatttcacgccagaagtgctggaaatggcccccagctttgtgcggcaatacagcgtcaacatggccaatgcgctaacgccgcgccaccccggcaagcagttggctgagttgccgattccgacgttgctgttggccgctgcgcaggacgaattatttagtccgcaggcgatgcgcgactttgccgggaagtatggcaacggccggcttgagtttcgctttattgagaatagtatgcacctggactgtgtgtttaaagcccaccgttatatccatcagtacattgccggcgagcggcggggggcatga

SEQ ID NO: 102922 - DNA, 1230 bp, Enterobacter aerogenes
atgatggtgcggttaaagttggctttgcgaaacctgtttcgaaacaaaagaagaacgctggtttccgtcaccaatctggcgttggcattggccgcaatcctgctgttttccggcttttgcgagtcaatgtatcaagggttgcgtgagagtatgatccgctctcagcttggtcatattcagttattcaaacaaggtttcaatcaattcggtgctttgagcgatgccggcatgctgctgccggaaccgttgaaaaatcgcattgtggcgcaggcgcaggctttgcccgacgtagaaatcgttacgccgcggctggaaaccgacgttttagttacgaacggcgatgcgcaaatgtcgtcgcatatcgtcgggatcgatcctgataaggaagcggtgctgagttcagcgatccaattgctgcagggaagcaatctgtttcctgaacagcaggacggcgtattgttgggcgaggctctggcgaaggcgctgaaggttaaagtgggcgatagcttgacgctgttgggcacggcggcgaaccaaaccatcaacgcgatggacgtgactgtgatcggtattgtcaccactggcgtgcaggagcgggatctacggacggcctacgccaatttgtcgttggtggagagttttctcttgagcaaaggggcgactcgcgtcgtgattctgcttaacgatacggcgaaaaccgatcgggtatctcggcagttgctccacagcttgcagcatgacggttcgggctttgaattgcgcacctggagcgaactggctacctattatcatcaggttgtgggcctcttcagcgcaattttcacctttgttaatgtgatcttgctggtggtcgcggcctttgccgtatctcatgccctgtcgatgaatgtggtcgaaagaactcgggagatcggcgtgatcagagcaattggtgccagccgtagtgaagtcgtcggtctgttcgttatggaagggggaatgctgggcgttgcgggaggcgggctgggtgttctgctggcttggacgttggcggctctgctgaatcaatccggtttgatgatgccgacgccacccggcaataccgtgacgtatccactgagaattctgcttacaccgcacatgtgtctgtatgcatttgtcgccagcgtattcactgcgttggtctgtagcgtattgcccgcggcgcgggctggaaaactgatcattataagagcgctcaaccatgcatag

SEQ ID NO: 102923 - DNA, 771 bp, Enterobacter aerogenes
atgcatagttcaataagccgacgccggttaatccagctgggtgtcgcggcgtgtttactgcccgcgatagtatttaatagccaggcgatggcagaacagaaagaggctcaacagtggttccgtcaacttggtctgttacgcggcttgcccggagcctttagcttcacgctggacgtcacgtcttaccgcaacgatgcggtggacggtgaaaaccgtttggaggtgatgtttcagtctcatcagcaggttttggtgctgttccgccagccccagagcgcggccggccggcggatattggtcgacggtgacaacatgtggctgaccttgccgagttcacggcggatactgcggatctctccgagtcagcgcctgctgggggaagcgagtaatggggatgtcatcaacaccaactttgcggattacgtgctcaagcaacagcgcgatgtcgtagagaacaatgtgcggttcattgagttgacgctggtggcgcaaagcagcaatcaaagctatcagcgcgtggtttatctgatcgatccggcgacgtcgttgccgcgtgtcagccgccattacactgcagccgataagttgatcaaagaaattcactacgaacgttatgtgacggagcaggggcagccgcgagttgagcgtatgcgcctggttaatccgatcttcagcgatcgctataccgtcatgacgttgggaaaatttacgcctaaagattttcccgtcggcatcttcaaaaaagagaacctgctgaatttggtgatttag

SEQ ID NO: 102924 - DNA, 918 bp, Enterobacter aerogenes
atgcagaacgaagatgaaattgacgattttccggttcgggatgggtgtcgcattagctgtcgtatctaccgccatgcgcagccacagtcagtgctcttgctcttgccgggatttggtttaagcagcgacgattatatttcattttgcgagcgtctggtgaataccagcccgacggttgtctacagccctgacttgcgagggcatgggaaatcacagggcgtgccgggggatgtcgcctatatcggccaattgcaggatgacttgagcgacctgttgacggcgatcaaataccgacacccaaggataccgctggtgttggcggcccattccggcagcagctctttggcgattgcccatctggctgcacggcaggattcggcggttcgggcgttatatctgatcgcgccggtattctttggatacatggagtttgataggcaggttaaacctgcgtatcgctacatttactatggccgataccgttgctcgccgcatgaaaatgtggcttcgcagtttaacgtcaatcagcagttccgctattcgctgaagcggcacctgatcgcggcagcattgccgtttcagcgcaaaatatgcgtgttgcaggtgcggcgcgacgaagagcagccgtggaaaaaatacagttttcgctttttgcaaagttaccgttgcccccaccttcagagcgctttggagaagatctcggtgccggtacgggttttggtgggcgccgaggatgaagtgatgttgcctgatgccgtggtcagcacgttgaactggcatctggcccccgacattttacgtgaaatccggtgcctcagaggcatggggcattttagcattctggccgtgtccgctctcttggtcagccaatggttgcgcatgaccatggctgaattagatggcaagagacaactgtaa

SEQ ID NO: 102925 - DNA, 1149 bp, Enterobacter aerogenes
atggagagaatctatggttggtttggtgcaagcggccctgctataccgggcgaaatgcagcaaacggtttatcatattgatgggagtgtagcagggcaactctctgagtcggctttagtttattgccagtggaacgccgggcggcgtctgttgatcctgtcgcgaacgacagaggcggctttgccgctgtattacttatgccggcatgggcagctgttgttttccaatcacttgccgtggctattgtcgcagctcggcgatgtggcttcggcaatcgacatgaactgcctggccgatctggcgatcgtcggtttcgttgcggcaccgcgaacgcagtatcgggatgtattccaactgccgcccgccgcacaactccagtggtgctggggagaggccacgcccaacgtggccttgttgcaggcatcgcgagcggcaccgccggccgtcggtgttactctcaggcagcggcagggcgggaaatcgcccgacattgtgcagttgtccgataacgtgatgatgtataacgcgattccgcatggcgctacaatgcttggcgagtcgcatggcgatccggcattgttgcggttgtcattacatatgcgccaactgcgcgcagagggcgcgcattttcggctggggccgggtgcgcaggcgcctgaggcttcggctctgcaacggttgtctgtgccctggctgaaacgtcgatggcaacgccgtttgcatgattattggcaaaccacccgagtgcctgaaatagcgcgatggtttgccgcagaagaaacgatgtcggaagccgaatggctcagtgcgctgattgccagtgaacggcaacgcatcattcgtcttatggcgcaagcttatcaacagcaggccgatttctattacgccgccaaggagacggaactgcatttatccgcggaacaagtggatgaaagttttaatttggatgtgccagaggccggcaacttattctgccatgccgttctgctgggaaagtcatcgctaaaggtgaaacgatatatgacgttatcacccgacaaaatacggcgtgaatggggtaaagaaagcaataggcaattgatagggatgatctgcgcgatttcatcgttggactatcttgacagattttattatcgcctgcctgtttga

SEQ ID NO: 102926 - DNA, 1476 bp, Enterobacter aerogenes
atgcacagccatataaagcattcactcgcagatatatataacgaattagccaatggtttgccgatgccagatattcgcgccgttggtgaacaaccgctgacattggccatgattgaacgctggcgcgcggcgctgatcgcgcgcggtgtgatgcacggcgatcgtttgctgctgttggctcacccgagcgccgccagcgtagctataatgatcgccgcttggcatgtgggtgcggtcgtttgcccgttgccgccgcaaacgccttcgccggcgctgaacgttatcgctcacgactgcggtgcggcctttgctctcgatggcgccagtgaagcgtggttggagacggagggcgagccttcgccgcggcagtttatctaccgcacggcgccggcggtaaccggcagcgatctggcgttgatcatctacagttccggcagcaccggcgcacctaaggggatcatgctgtcccacaacaatgtgctatcggcgctgcgttcaattacggcctatctgcaattgcatgacaaggacaccatcctttccgtaccgccgctgcattttgattacggtctgtatcaggtgctgttcagtttcgcggtgggatgccgggtactgctggcgccgccgggctgcaacgccatgcagatgttgaagttgatcaaaacggaacagccgagcgtgttgccgctggtgccggctatcggcggaggtctcgcgaagctgggcaatgcgctgcgccagcagcatgactcgattcggctgatcaccaataccggcggccatttgcccgccgccgtcgtccagaacctgaaacgcgtgtttccgcaggcggcggtattgctgatgtacggcctgacggaatccaaacgcgctttgttcttgcccgcagagttggcggccagtaagcctgactcggtggggaaacccatgccgggtttggaggcgaaagttttcattcaagagtggcatgacgggcgccaaattttccgcgagtgtgcgcctgaagaagtcggcatgctttatgtgcggggcagctcagtcatgcagggttatacccgtgaagaaaatggcgctggcgcacgcatgattgacggtgcctaccgtgacgataattggttggcgaccggcgatctgttccgttatgacctggacggcgacttctatttttgcgggcgagaaaaggagttgatcaagcaagcagggtattgcctgtatccgcgcacgctggaagcggttgccgaaagccatgagttggtcatcgattgcgccgtcgttggcgtgagcgatgcggatggcgatgaacatgcctgtttgttcgtcagggccgaaggccacttggaaaagcatgatcttttggcgtggctgaaaacccattttgaacaccactacttaccccgccgtatcgaaatcatcgagcactggccgatcaatcagaatgggaaagtcaataaaaaggcattgtgtgagttgctatga

SEQ ID NO: 102927 - DNA, 1152 bp, Enterobacter aerogenes
gtgacagagctaataaaaaaactggctgacggcctggcaggggggcattattcttttgagtctccgtgctatatctttgatccccgcctgattaataagaatttggatgaacttgaagactgcctggggactaaggtcattatttctattaaggcaaacccgaatgtggatgtgaatttgcgtttggtgcatcggcagggcggggtggaggtcgcctcattgaaggagttgaacctggcggcgcattctgctcaggtttatatcaataatccgtcaatggacagaaacctgatgcgtgcggggattgcggcgaatgcttatttcatcgtcgatacgctgcagcaactcaatagcctggtggaattggcgggtaagcggccgctgaagccggtgattctgcgctgcaacgttgcggtgattgctcagctgcaatccggagcgcctgcgattcgcaaagatcatttcggcatggatttggaaacgctattcgaagcagtacgtattattcggcaaagcgacaagctgaagctgcatggattccatctgtttgccggctctcataccttcctgcgttttggcactttggtggccgaaaccgcattgttgttactgccgcagatcgaagcgcgttacggcgagaagatatcgttgatcaatctgggtggcggtttcgctgaacgctggtcggaacaaacggcaggcttcgaagcctatcgttctctgctggcgaagtttccgagccatgtcacgttggtccatgaggcgggacgggcggtgtttgcctccagcggcgtctttatgaccaaagtggtggcgaccaagcgggtggccgatcagcactacaccatttgcgacggcggcatgaatcagagcttcctgctctgccagacggaaaacaactttcggaagttacgccaaccttatctggtgcgccaaaacgaaggtgaggtgtgcctcccggcgggcggcgcggagcatacggtcttggtgggatcgacctgtagccgtgacgatgtcatcggtcaatacggcgaccggaatgtgaaagcgggcgacatcttcctgtttgaccactgcggcgcttatcacagcacgtataccgttagccgcttcctggggttaaaggaggcgacgcattatgtcatctcatga

SEQ ID NO: 102928 - DNA, 1062 bp, Enterobacter aerogenes
atgtcatctcatgaaacgttagcgagtatgcatagttatggtgaatgcatcacgcggcatttggcgcggcatatcgcgattccggcggcgacgcgccggtgcttgaatgacagcgtattgcgtcatctggactcgcgcatgttgattgaagatcccctgacgccgttgcagcctttgctagaggcgaccccatttcctctgccggcgatggccagtctgccgatgctggatgagcatgtagatgccgtcggcagagagggatttggcggccatttcctgaatatcatcggcctgttcggccatatcatgctgacgcttgccgggagcgagcgacaaaatgagcaggtcagacagtgggttgccgaagggaagcgcggcgcattcctgatgacagacgcaggcggtccatcgcttcatcagtggcgttcgcaggttatcggcgatgcggcgcaaggcagccggataaccttggataaagagtggggcatcggcgccctggaatgcgagttcgcgatcgtcgtgttggcgcgtccggggcagatgatcccccaggcctatctgttgccgcctgacgcctgcgctcaactgaatcgccaatccataggcaccgcttatctcgatggccgcgttcagctgggcaactgccagggggatatggcaagcgatcccgattgggccttgcgccgtggcgggctgatggcggtgaaacagtttttgacctttgttcgcccgcgatttgtgcgggcgttaatgcaacatctgcattggctggaagctcaaggccggttgtcgcttgacgagcagcaaaacgagatgcgcacctatcttgaggatgtggcgcgtcagctgtctgaacaacagagcttcacccgttattccgaagatgatgtgatggcgctgaagttcagttctaacgccttgttgttcgatttggtcgagaagcagcgcgtcccccagttgatggatcaacgcgacctgctgggattcacgaaaatggaggggagttcttaccgctgtctgttggagatttggcaacgcaatcgggggaagaagcatgcatga

SEQ ID NO: 102929 - DNA, 831 bp, Enterobacter aerogenes
atgcatgatctgcgtctggcccgagcggcctttacacgttattctcgcccgctgatctccacgtcggccgcgttggagcagctgtcgcccgcattggcggaggcggttgggcagcaggtcgcccattgcttgaccggttatgacggccctccgcccgatcggcactttctctgttccaccatcatggacttgcccttcgccaaccggcttatcgattggcgcacgttgcaacaacagatgcgtcgttataccgacgccgcaccggatacgctggtgaacgcgtatgaatgcgccagctggggatactgcctgcggcaagcgctgattgcaccgcaaccggtctctcgcgtgatgtgcaccattgtcgatctcaaccttatggatctctctttttggcagcagaaccccaactggggtgcttccgggtttggcattgcgacgctgttgtttaacgtcgaacccggtgcggcgaagcatctgaatgtcggcgtggcgaaaagcgcgaacttcatcgccgagttcagcatcgcggtgcgtcactgtttggaagagaaagcggcatgcaaactggccctgccgttttttcctgaacaggtgacccagctgtttcaacgtttattaccgcaggccgacacgctgccggatcttcacccgctgctggggcattgttttggcgccgatccctggatttccttaatcgagcacgccaaagaggccagagacggtcaacggtttttggccacgtcggtcgcgctgaacggctattgggcgatggcggatgtcagccttgaacccggcggtgtttatcgttttacggaggtcgggagatga

SEQ ID NO: 102930 - DNA, 522 bp, Enterobacter aerogenes
atgaatgactgtctggctttttacggtaagtttttagggcatccgttcccttatggcgtcagccgggcgaacgcaatggtgttgccgatggaacaggccgaggattatgaatcgctcagccggatgccgaagccaatgcaccaatcgccggtactgtgcagcttctcggaaaaatatctgctgcttgaacagatcgtcattgcggcattcgcccacctgcattcgttggatcgatgcgtcatgacggccatgatgccgggcggtgttcggcttccggcgcgtttgctgatggaggatgtttttctggtgcatcacgtcgacgatgaggccgagcgactgcggcaaggcgggtgcagtgtgttggcgatagaagagtcgatcattcgtcatccgttggaggcgggggataacaccttgcatttgcgctggcttggtgctgaggaggcaacttcgcgccaggactggaacgggtttctgggcgtcttatccgtgctgaacatcgcgccagcgtgcggagcctga

SEQ ID NO: 102931 - DNA, 882 bp, Enterobacter aerogenes
ttgtccggcgctgagctcatcctgttttgcagttccggcgaggttgaggtgctgcagcaaccttgggtggttgaatggatggcgagagaagcgaggcgggggacgccgccgcgacgcgcttttgtctcgatggcttgcgccagctggtacgccgcagtgctggaattcatgcgtagcgattgccgcagcgccgagatttgggtcattgaagcctgcgcggattttattcaggaacgtttggattgcgcggggttggggggcggcggcgagggattattggccaacggcggcgtagcgtgcatcagtctgcgcaagggcgacgcgcgggaaagcgacgtgcgcctcgatgactgtgcgctgttttccaaaccggcggggttacggggaactgaattgctgattaaacgctatgcacagtggctgttggcgcatcagagcggagatgaacgcgccgactgggtgtccttcgccatcgaaacccactggtccaggcaactgcaggccggtttggcgctgtgggggaaagacgccatgagaacgttagactaccaaccgagcctggaaaaggggaaagaccattatatggcgctgaaacccctgcatgaactggccgctcatcttcagcgtcccctggttcgcccggtgattctgaccacgctggcggcaggcgggcgaattggctgcgctatttttcgagcctgtggagatgatgcggtgaacgccacgccggcgggggatattttgccgattcgtctgccccccgtcgcgctaccgatcggcgcccctccccgttactgcgagcgggaataccgttatcgcgacaacgaatattttctgactgagctggatggggccgggccagtctttctgatgcattcataa

SEQ ID NO: 102932 - DNA, 1812 bp, Enterobacter aerogenes
atgaaaaatttacctgtttatcgggcgccgttggctgacattcgttttgtcatctgggaacaaaatcagcttgaagagagcctggccatcaactatccgcatctgacgcgcgccagggtggatcgggtgttggaagaggctgccgcttttgcgcaagacgtgcttgccgacagctatcagcaggcagacagtcaagaatgttggatggatgagcagggtaaggtgcatgtgcctgacagctatccgtcgctgttggcccaattccggcaaacttggggcgagcggctgaagccgcaagaccagggcggattggggctgcctcctctggcgcaatatgcggtattggagatgtttatgggggctcatcccgccttcatgacctatgtcggtttcaatggcccggccattcagctgttgacgcgctatggcaccccggagcaattggctgagtacggtccggccttatccgagtatcgttggacctcctgcttatgtatcaccgaagccgaagcgggtagcgatcttagccgcctcgttacacaggctgaacggcaaagcgatggccgttacctgatctccggggagaaacgttttatctcggcgggcatgcattcgttggctgaaaacattctctatttcgtgttggctcgggttaaaaacggtccgcagggcatgttgggcttatcgtgtttcattgtgccccagtttgatcatggtgcggataatcaggttcgctgccgtgaggtggtgaagaaaatgggccttaagggatgcgccaatacccatttgcagtttggtgaaaacgggaagtgctacggctatttgatgggcgggaaagagaacatcgggttggtgcaattgctgagcatgatgaccccggcgcgcatcagtacgggtatttatgcccttgggatggcttccagcgcctatctgaatgcgctggactatgcgcaaaaacgggttcaaggcaaacagttcgatcgggctatgagcgccagtgcgccttctctgcctatcattgcgcaccctgatattcgccgcatgctgtcaaaaatgaaagcgcaaaccgaagggtgccgtgcactgttgggcaaactgggcatggcggaaacagattatcgcaccgcgttacagcgtggggagcagacggcggcggagaaacatctggccttttttgaactgcttacgccattggtgaaagcatactgctccaacgaggcttggaacgtggcggagaacgctatccaggtgatggggggaaaagggtatctaagcgcgtatccggttgagcaatatgcgcgcgactgcaaagtcctgtcgatatgggaaggtaccaaccatattcaggcacagttcttgttgcgtgacaagttggggatggggctgcgagaaacacacgccttgcgggagttacgcgcgcggctggatgcattcatcgcacaggcgaagtgcgaggttgcgctggcgccgctgacggaggagttgttgacggcgcagcaggccttagaggggagtttgaccgaattgggtgacgccgtgcggcaggggcacttactgagcgtgccggcctgcgccaatgtgctgatggaaatggtggcggaactgattatcggttggtgcctggttgaggcggcgtattgtgctcgcaccctgacggatcccgttttgcgtgacgggaagttggccacggcgcgttatttcttgtctacgtcgttgacgttaagcggggcgaaagcgcagcaggtgcgttatctgatccaggcggacagcgtttccaacgtggccttctcgtggaacacggctgatgcctga

SEQ ID NO: 102933 - DNA, 1317 bp, Enterobacter aerogenes
atgcctgagtggatgatcaaaaacgcggctttagccgcgtttgtcgcagccggagtgacaccggctttcgcaatggaatggcggcctgaactgcaggctcaagggcgttactcgcagcaagagtacaatgcgggatctgccctctctccccaacgttttagctctgccggcagcgcgttttctgacgtggatgtgctgttttccccgacgctgatcgtcgaccaaaatctacaaggattttttggcgcggcggcgggctggcagagggccgggggccaggagtcccacgagctccggttgctggaggcgggggcctcactgagtaacgatcaacaaacggaacgtcttacgctcggtaaagtgaaggtgcgttggagccaggatagcgtctatcacccgctggatcttttcggccggtataaccaacccaaaagcactctgggagttaatgagttcgatgattttaaaaaagaaggcaacgtcatggctcgctggcaacgtaccggcgacgtcctgtcccatgacgttctcttggttgatgcggataacaacgcgtcgatgcccaccgcgtatcaagtcgcatggcgaggcgtcatacaaagcggagaaagcgagtttagtctgattgcggaaaaatcggcgaattaccacccgcgctggggggcggggctcagtcaggggatgggtgagcaatggacgttatacggtgaatatttgctcagtcgcgatcgggacattccggtcttacggcaggtacagcccgaaattccgttgtcaccgggcgtggcgttaccggcactttacgattaccaacgggacgataaacagagaaattggcaaaaattattgctgactttgcgctattacctccaggttggcggcagcgttgaaggcagtctgttttacaacggccacggcctcaatcgtcgcgagtggtcacagtgggaaagccgacaatggagcgccgcggaaacactgaccgatcctcaattacggccctacttggccgaggggaatccttatatccccatgttgggcgaatccgcccgcctgatgcaggatttttacttgcgaaggttttatgcttcggtgcgcctggatagcctggagcgttttacccaagggcggatcgaaataaatatgatcttcggcctggaagacggtagcagttcattgtggatggcgggggaatatccgttgaacgagaaattgctcgttaaaccctacctgatgctgcaaagcaacatgcgtggcgaagggcagatggcaccgttgagcgcgttgtttgggcttaattttactctggcgctgctttaa

SEQ ID NO: 102934 - DNA, 804 bp, Enterobacter aerogenes
atgatgaggctcaatattgccccgccgccgtggcccggctccccggtggtggtgctgagcgccgggcttggcgggggtagcgcgtactggctgacgcagcgggcggcgctggaacagcattatcaactggtgtgctatgaccataacggtaccggggagaaccgcggcccattgccggaaaattacagcatggcgacgatggctcaggagctgttcagcgccctgcaggcggcgggcatcatgcgcttcgcgctggttggccacgccctgggagcgctgattgggatgcagttggcgctcgactatccgcgcgcggtcagcgcgctggtgctggtaaacggttggctaacgctttccccgcatacccgccgctgctttcaggtccgcgaacgcctgttgcatgccggcggcgcccaggcgtgggtcgaggctcagccgctgtttctctatccggcggagtggatggcggcccgcctgccgcgtctcgaagcggaagacgcgttggctattagccatttccagggcaaggagaatctactgaaaaggctgcaggccctgaaacaggcggatttttcgcgccgcgcggcggctatcgcctgcccgacgctcatcatcagcgccaccgacgacctgctggtccccgcctcctgctcgcgaatgctgcaggcggcgattcccggtagccgactcgtggaaatggcctggggcggccatgcctgtaacgttaccgacagcgacacgtttaaccctattttacgcgacggcctgacgaccctgctgccggtcgccgaggagaatatatga

SEQ ID NO: 102935 - DNA, 276 bp, Enterobacter aerogenes
atgggcattgaattgattatcggcctggcgactgcatttctggccattgtcgctagcgcatttgggttaggtcattcacgcggaaccagcaaagcagaagcgaaagccaaacagcagcgaaccaaagatcacgccgctgctaccgtcgccgcggctgaacggaaagaggaagcaaccagagaggccagcaatgtacagcagactgttagccatatgcctgatgacgatgttgatcgggagttgcgcgaagagtttacccgccccggtggtggttga

SEQ ID NO: 102936 - DNA, 750 bp, Enterobacter aerogenes
atggcaaatgtggacaacaacggtggagtcattcctagtgtcattgaaattatccgacgcatcaaggaagggtctactcaaccatttctgtgcaaatgcgatgatgggcaaatgtatgttttgaaatcaaagccatcgatgcccccaaaaaaccttctggctgaatttattgctggttgtctggctaatgacatagggctatcactgcccgaatttaagattgttttcgtccctgaggagctgattgaatattcaccagaacttcaacatgaaatcttccccggccttgcctttgcctcaagatacatagaaggtgcagtcgaccttacttttacccagtcaagaaatgccgcaatcataccaactgaacaacaaaaattaatatatgcgtttgataaatgggtactaaatgctgatcgcactctcacagacaaaggaggaaacgtcaacattctttatgatgttggccatgataagtattatctaattgaccataacctatcatttgataaaaatgctggtccggaagattttacagtacatgtttatggcccgggaaatcggaaatgggagtacgatttagttgatcgtcttgagtacagacaaaaggtagtggactgctactgtaagctaccagcaatcattcaagatatccctgaagaatggattgttgacgatgattttttaccttttgtacaaaatactttagagaaaggcgatagcgatgaattttggagcgacatagcatga

SEQ ID NO: 102937 - DNA, 828 bp, Enterobacter aerogenes
atgaatactccatgcctatacagcattgttcgatacgcaccctatgcggaaactgaagagttcgcaaacataggtgtggttatgtgcgcgccaaaagaaaacttttttgacttccagataacaaagcgcaacgactctcgcgtaagaagctttttccatgacgactgtattttcccggtagcaaaagacacgattcaaagagagttacagtttgctaaagcccaagccactcagatcagtggtcaccatcaacttgctcaattttttagatatttcacagcaaaaaaagagtcaattttccaatttagctctgtcagggtcattctcagtcagaaccctaagtctgagatggatcgaatttacaataagtatgtaaaccactcagactatacaaaagaacgccgtgaagacgtactggctcgggaactaaaacgaagcattgacagaatcgatggacttaagaatgcgtttaagcttgaatctattgaaggttcatatgccaagttcaccatgcctttggttgcaaaaaaagataatgaaattcaatgtgctatcaaaccgctcgcatttactcaagttgaaccggggaaaatgatggaacatagtgatacctgggtaatgagggttacccgtgcggccgaagagaacttgctagatatcgacgatgtgctgtttactctagaagtacccgaatctcctacatctggccaacggaaagtgattaatactattaaaaaaacaatggactccaagaaaataaatcatacagcagcatcaaatcataaagacacgattgaatttgcaaaaaaaattttggttcaaaaatag

SEQ ID NO: 102938 - DNA, 138 bp, Enterobacter aerogenes
atgaatcacgatgaatttgatgatggtcgttgcggtatgtcgcgccggtgctggcgaaacctgacacgcatctgcattggcttgatagccatatacctgctgattgccttgtttgtgatggaggtcttccatgattag

SEQ ID NO: 102939 - DNA, 1905 bp, Enterobacter aerogenes
atgcaaaaagaaacgattttttctaaagttgaaactgctaatagcaagcagcttgctattttgaaggctaattttccgcagtgttttgataaaaacggcgctttcattcaagaaaagttgcttgagatcgtaaaatcatcggatgttgaactctctaaagagtcatacagcttaaactggctaggtaagtcttatgcccggctgttgggtaacttaccaccaaagacgttgctcacagaagataaagaccataaccaacgtgatgagaacaagagcagtcaaaatctgttgatcaaaggggataacctagaagtaatgaagcatatggttaatgcttattctgaaaaggttaaaatgatttatattgatccaccatataacacaggatcagatggatttttatataacgatgatcgtaattttacacctgaacagctttctgaactggctgttatcgacattgatgaagctaaacgtatcctcgattttactgttaaaggatcaagtagccatagtgcgtggctgacttttatatatcctcgactatatatagctcgtgaacttttacgtaatgacgggataatctatatctccattgatgatcacgaacatagccaactaaaaatactgtgtgatgaaatttttagcgagcaaaatttcgttggaaatatagtcagagcgacaggtcagactacaggacaggacagtggtggattaggaaattcattcgactacatcttagtttatacaaaatcaaataatatcgatcttagtggactaccgttaactgaccatgatctcaaacgctttcagaataaagatgatattggctattatgcttatgatcaaatgagaaagacaggcagtaatgataaaagagaagatcgtccaaacatgttttattccgtgcaagatcctgacggtaatgaaatttatccaatagcatctgctggctatgaaagtcgttggagattcagcaaggaaacttatttacaacaagtaaatgatgatatgattttatggaaaaaaacaactcgtaatggacatgaggtatggtggccatacgttaaatattatgttgaagggagaactaaacgtccatcacctctatggactgaattagaaggtaataaaaaggcagcacgggatcttcgctcattatttgatggaaaaaaagtctttgattttccaaaaccacttcaagtaatacagaatctgatacatatagtgcctaatgcttcaaaagatgatctaatcttagatttctttgccgggtcgggtacaacagcacatgcagtaatggctatgaatgctaacgacgaaggtaatagaagatttatttctatacaaatcccagaacaaacatctcaaacatctgaagcatatgaattaggctttaaaaacatctatgaattaacaaaagaacggctctccagagcatcgaaaaaaattagaaaagaataccctgattttaatggtgatctgggattcaaaatatatgaaatagtccatgattttcgtacaaaagatgagtctgaacttacgctgtctaaccatactttttttgatgatgttgttttgactcctgagcagtacgataccttattaactacgtggtgcctgtatgatggcagcttgctaacaacatcaattgaagatgttgatcttaatggctataaagcgcatttatgcgatggtcgtctgtatctcattgcgcctaacttcaccagtgaagcactgaaagcattacttctaaagctagataccgacaaagcatttgcccctaacaaagtcgtgttctatggcagtaactttgaaagcgcaaaacagatggaactcaatgaagcactgaaaagttatgctaataaaaaatctattgatttagatttggtggtaaggaactaa

SEQ ID NO: 102940 - DNA, 282 bp, Enterobacter aerogenes
atgatatcaggtcttgatggtggagttttcatccttagctcgatggctaaggaaagagtcaaatcaggtctacttgacagagcaacaatagaaggctctaaaggcgagtataccgtgatttttgatggttcagagtgggaaggtaagccattagtcttatgtagctccagacagccatatgaagcacgagtcttcaaaagcattgatggtgcggcggcagaactactacgcataggcttaagtgaagcttcaatcaaaaacaccaccaaatcgaaagcttaa

SEQ ID NO: 102941 - DNA, 1257 bp, Enterobacter aerogenes
atggcgctaactgatgtaaaagttaaatctgcaaaaccttccagtaagccaatcaagctcactgacgggtttggtatgcatctacttgtgcaccctaatggttcaaagtattggcgctttcaataccgcttcactggtaaacaaaagatgctggcgcttggcgtctatcctgccgtctccctagctgaagcaagggagagacgtgacagtgccagaaaactgattgctaatggcattgatcccagcgagaagaaaaaagcggataaaattgaagagagtggcgctttaacttttgaaacggtagcaagaagctggcattccagcaataaaacatggtcagaaggccaccgcacactgatactcaacagcctaaccactcatgtttttccgatcattggtcagagaaatgttactgacctgaaaactcgtgatttattggttcctgtaaaaaaagctgaactgaacgggcatctggaactggcctcacggcttcaacagcgtatcaccgccattatgcgctatgccgtacacaatgcccttattgagcataacccggcttatgatctggcgggagcaatagcaacagccaaaagtgttcatcgtccagcccttccccttgaacgtattgctgaattgatggaaaggatagaggcatacaaaggtaaaggacttacccaattggctgttcgattgtgtttgctgacctttatccgttccagcgagttacgatttgcgcgttggtcagagtttgatttcaaaaatgcgctatggacgattcctgcagaacgagaacctcttaaaaacgtcaagttctctcatcgtggctcaaagatgaagactccccatctggtgccgctgagtaagcagagtctcgccgttctaaaagagatcaaagctatcagtggcgctcataaatttgtattcgcaggttttagctatgctgacaagcctatcagtgaaaacacgattaataaggcattacgtgcgatgggttataacacccaaaaagacgtttgttgccacggattccgcacaatggcctgtagcgctctgattgaatcaggattatggtcaagagatgccgttgaacgacagatgagtcaccaagaacgtagttctgttcgagccgcatacatccataaggctgaacatctggatgaacgccgtctgatgctccagtggtgggctgatttccttgatgccaacagcaacagtatgatcaggccgtttgagtttgcccacaggaatcaaagctaa

SEQ ID NO: 102942 - DNA, 435 bp, Enterobacter aerogenes
gtggtctatcccgggatgcatgtcgatgtcggcggcgactgtaaaccgtcagaactcggcaaagtgcagaccgacgcccgcagcctgctgtcaaagattgtgctgcacgatatgtatgccgccgcctttgatgccggggcgccgctgagcgtacccgaggaggtattgcccggcggcgccaaaggtaaaaaatatcgggtaatgcaaggggatgtcgcagatcaattcaaaatctccgcccaggccatcaccctgtttaacgcctgcagcaggcggcggcgcccgcggaaagcaaagggccgcgagaagtgccgtttatcgataaggatcgtctggatcgtgcggcgtggggctatgactttatccataccggtatcgtggcgctgctggatattattcccaccacgcaaaccagcgggtaaaaataattattga

SEQ ID NO: 102943 - DNA, 573 bp, Enterobacter aerogenes
atgataaaacatatccgtattttgcccggcggactgatggtgctggccgccgttttgctctgcctactgacggcctgtcgcgaccacagtcgcgacggcatgagcggcgctgacataaatgtctataaccacggcccggatgacattgtttcggtgcaggtaaacggttacgggggccccagggctaatccctacggcggcggcggcggcttctgttgcgtgatggtgccagatgtctggcggccgggactgacggcaaaaatcacctggacttccgatcctaatgcctggatgaaatcgagtgagatgccggacgactatgaaactcactatcagaaacatgggccgattactgtccctatcgaacgttgggagaaggggcaggcctgcggatttgatgtgcatattttcccctgcgataaagtgcggatagtgcgttcctgcatcccgccgggacagtcgggatatccggttccccagtcgccgccagactggaagcaaagagctcagaaaatacttatccaacatatcaaggaggaagttgtatgtccgacgccgcagactccacgttaa

SEQ ID NO: 102944 - DNA, 156 bp, Enterobacter aerogenes
atgtgcgagtccggccttcgcaccaagtcgacaataagatcatccgatggcactttttatgtgaatttcagtatcggtttaatcacgccgtttaacgaatgcgagcgttatccatccaccaaccgcactaattcggctgcaaatttttccggataa

SEQ ID NO: 102945 - DNA, 276 bp, Enterobacter aerogenes
atggaaatttactggacgcttaaagctcaggatgacctggagcgtatctaccgtttcgcccttcagtacagccgccagcacgccgatgatgtattggagcgcctgattactggctgcgctggccttacggtgaatccggcaattggtgtacagcagactcggtatgaaccccgggaagtccgaaaagtgttattcgatgattacgaggttcactacgaacgtcgtgacaatgacatctatatcgtggatctctggcataccagagaagaacgatga

SEQ ID NO: 102946 - DNA, 204 bp, Enterobacter aerogenes
atgccggaattaaccaccgaagcggcactcaacattctgattggctggctgcaggacaacatcgattgtggcagcgagattattttcgacaacgacgaggacaagacggattcggcgacgctgctgccccatatcacccgggcattacaggatgttcgcgatctccaccaccttcgacttctgcatcaagccagaataaattag

SEQ ID NO: 102947 - DNA, 492 bp, Enterobacter aerogenes
atgaagctatgcctgacggtagaagccaataccatctacattctggcccgcaacatggtccggatcgctgtggatattgacggtattgaactggccgacctgataaatgtggtgaaccagaacggttattcgcttcgcgttgctgatactccctggcagctgattgttgaagatccgcttcccgttagcgcccgctacaacggcattcgatgcagtaccgcacatatcacccgtgaggataacgatctgctgcaccagttatcacgacaggtactggactttgatgactctgaatgggtcggctacacgggatcgggctatctcattcgcctggatgcgtgggcttttccgatactgcaactgaaacggcgcggactgtcgaaagcaggtcgccggttgattgtcacccttatgcgccgctaccacctggggatcattcaccttgatgcctttggtgaattgttgccaggttttgagaccttcgactggtaa

SEQ ID NO: 102948 - DNA, 378 bp, Enterobacter aerogenes
atgcaaacccaaccactatcctcaacgcaggaggctacaccacgcccgtcccccgtggaaatctggcaacggcttctgagccacctgctggaccgtcactacgacctgacgctcaacgacacgccgtttggcaacgatggcgtgacccaggagcatatcgacgccggtatctcgctgtgcgacgcggtgaattttatcgtggagaaatacgatctggtacgcaccgatcgccatggtttcagtacagaaacacagtcgccgcttctcaccagtatcgacatcctccgcgcccgcaaagccaccgggctgataacccgcaacgattacaaagtagtgaccgatatcaccatcggcaaacaccgcgaggtgcagccatga

SEQ ID NO: 102949 - DNA, 360 bp, Enterobacter aerogenes
ttgtcgaataaaataccgcctgtaaaccacgatatcgctgacccatggtggggcctcaaggccaccgtcacaccctgtcttggcgctcgtctggtgcaggagggcaaccggctgcattacctgaacgaccgcgccagcatcaccggcaccttcaccgacgcggatttacgccatctcgaccaggcatttccactgctgctcaaacagcttgaactgatgttcaccagcggtgaactcaatccccgccatcagcactgtgtcacgctctacgcaaaagggctgacctgcaaggccgactccctcggctcgcatggttacgtgtacctggcgatttatccgaccccaacaacaaccgcgtaa

SEQ ID NO: 102950 - DNA, 486 bp, Enterobacter aerogenes
atgaccgacattatcaaccttaacgataccctcccgttacagacacaatctgccggtaccggttctgcacccgcgctgaccgccacccttgtccctgacgagcagcgtgtgggattctggccgcaacacttcggcaacataccgcagtggataatccttgaaccgaccgtcttcacgtggatggaccgcttctgtgcggactacagcggcggcatctggaatttttacacgctgagcaagggcggtgcgtttatggccccggaagcaaatgaagataccgatgagaagtgggtactgtttaacacgatgaacggcaacggtggcgaactcagcgctgaagccgccggaatagccgtctgtctgatgacgtacagccaccacgccatgcgcaccgaatgcgacgccatgacggagcactatttccgcctgcgggactacgcgctcagtcaccccgaatgcagcgccatcatgcacatcatcgactga

SEQ ID NO: 102951 - DNA, 819 bp, Enterobacter aerogenes
atgagattagcaagccgcttcgggcggacaaatcagatccgtcgcgatcgtcccttaacccgtgaagaactcatgcaggtcgttcccagcgtcttcggggaagacaagcacgtgtctcgttctgaccggtactgctatatacccaccattaccctgctggagaacctgcagcgcgaggggttccagccgttctttgcctgccagtcacgggttcgtgacccggctcgtcgtgaacataccaaacacctgttacgcctgcgccgggcaggccagataaacggtcagcatgtaccggaaatcatcattctgaattcgcacgatggcgcttcgagttttcaattacttccaggagtattcagaagcgtatgtacaaattcactcgtctgtggacagtcctttggcgaaatcagagttccgcaccggggcgatatcgtcgggaaggtgattgaaggtgcttacgaagtactcggtgtctttgaccgggtggaagagaaacgagaggccatggaaaccctgttactcccaccaccagcacaacaggcgttggcgaacgccgcgctgacgtaccgctttggggaagagcaccagcctgtgaccgccacgcagatacttacaccgcgacggtatgaggaccgccaggacgacctgtggacaacgtaccagaggctgcaggagaacctgctgaaaggcgggctgagcggacgtaccgcacagggtaaacgtacccacactcgcgcggttaacggtattgatggcgacgtaaaactcaaccgggcgctctgggtgatggcagaaagccttctggaaagcatgaagtaa

SEQ ID NO: 102952 - DNA, 234 bp, Enterobacter aerogenes
atgcatgacactgacgatccaccgttacctcccggtccgttcacccgtgaacaggcggaggctgtggtggcggtttaccgcaatgttgctatcgaagacgaccaggggaaccattttcgcctggtcattcgcaacggtgaaaacctgttgatctggcgggcgtggaattttgaagcaaatgccggggagtggcttaaccgctacatcaccagctacggaattccccacccttaa

SEQ ID NO: 102953 - DNA, 246 bp, Enterobacter aerogenes
atgatgaaacacaaagggctttttcttgcctccctcctgctgttaaccgcctgtgatgagcccgggggaaaacgtgcttttatgcgcgaatgcacctcagggggcaataccgccctgtgtgactgtgcctgggggaaactcgttcagcgttatggtcaggactgggggaatcccccccgaatttttacctcgtctgcctttattacttacagcgggcaggctgctgctgaatgcatggctgattaa

SEQ ID NO: 102954 - DNA, 963 bp, Enterobacter aerogenes
atgggatttaatgataatggtaagcgcaccgaagtgccaaaacacttcaagcttgaaatgctcctcagcaggagcagcgaaagagaactgatgtattacattcactttttacagaataaaaaggaaacaagtcgttatatcaccagcgtagattacactgatattagtgcgatcaaaaaccttatccgaaatgcaattgaaaaatcccaacttcaggtgggggatattgcttcagatatcgaaaaaatgctcagcggttatcatgacgacgccatttcagaaagtgatattagttggttaaaagaggaccgtagagcgtgcttctggtttttgttcaacgtattgattaacgatactgatgtgaaatttgacagagacattatcaataataacgcattaaatactcagtctgattcaatttattattcagttaccgcatggcttgacaaaatgttctattcatatcgtcagagtgaattattgcgtaaaataatgaaatatgaaaatagctggagaaaaataaaaacaaacaaagtacacccctggctggaacgaaaaaacgagcacgatgaaataaaatattgctatgactatcttaaagataaggggatgaaaaacatactatcctcgatgtctgaaagagatgccgcattaatttttgaattttgtgataactcaggatttaactgcaaggacattgtcatggcattttttgactatattcatggcaatccagatcatggcgatattattgctgatagtcttaaggcgaaaatgtcgagtgggctgtcctcatggaaaaataggaaaaataaagatgaatatacagacctgcactttgacattaaaaatgaaaacatcccaaaactcgaagagattcagaagatattaaaactttattctaaaaaagatgtggtcaatgaattgattgagcacttttacgaaaaatataaaaaatcttaa

SEQ ID NO: 102955 - DNA, 588 bp, Enterobacter aerogenes
atgggctaccacaacattaccgataccaatcttaactacgtccagcaccgaacatgccagcgttacctgcgtcatcacctcgccgaattatttgaacgctattccaagcttctgatgcttcggctcgatttttactaccaggtggacagtgatgcctggctccatgcagataaacattccacggtggcagacatgaccctgttactccagcgctgtgatgctatgagcgagttagtcggatttgcctgggtgctggaacataccgatcaacacggttttcatatccacgctgcgttttacctcaatggtcagcgacatcggaagatatggccgacctttaaagccctgcaagctctctggaatgaggttacagcgggtgaagggcatgctttccgctgtgcgcctcagaagtattacaaagtgcagggagagcgggtgacgtcacatgacgatactcaggggcgtaagggcatgcagtacatcctgagctacctgagcaagcaggaccagaagggcgagaaagtgatttgtcagctaagcgatgttccagcgccatcaacggcaggcagaagacgtaaggcccgttga

SEQ ID NO: 102956 - DNA, 207 bp, Enterobacter aerogenes
atgactaccccaaccagtattcttagcgataaattcgtcgatatggcgtatatcactcaactcaccggcttaaccgataagtatttctacaagatcatcaaagacggcaggtttccgaagccaattaagctcggcaggtcgtcccgctggctgcaaagcgaagtggaggcctggctgcagcagcgtatagcagcttcacggggctga

SEQ ID NO: 102957 - DNA, 387 bp, Enterobacter aerogenes
atgtacgccaaatcctttatcgcgcttgatggtaacgggcatttgaccggtgccaccaccgcacagatttacccttacgaccgttatacctgccacctctgcggcagtgctctggtatttcaccctgagtggctcaccaatcgcccgtggtttgaacacaccagagaatatttaaccgctaatgggcgggaacattgcccctatatccaccctgagcctgtagaagcaaagcgtattcgtatgctgcgccgttacgtaccggatgcacttccggtggtacgcaagactgactggcactgttccggatgcgacagccattaccacggtgaacgctactgcgtggattgcagtaccggtgaatacagcactgaactctaccatcagtaa

SEQ ID NO: 102958 - DNA, 939 bp, Enterobacter aerogenes
atgaagaataaaatcgatgtcagcgtgattatccctgctcacaatgccgcagctaccattggttgtctggtcaataaaatcctcagcgaaactcgcatcgctattgagcttatcgttgtcgatgacggctctaccgatggtactgcaaacgttatacgccaaatcaaggatgagcggctcgctcttattgagcaggtcaatcagggagtctacgctgcccgtaatgctgcgttagccttgcatcgaggggagtgggttatcttcctggatgcagatgatgatattgccgacgggttcattgaaaaacgatggagagcatctacggagtcgcaagccgacgttgtgatttttaatggctggcattctggcgctgaccaacatcgaagagcagtccaccgaaagcagccctatgcgacgacgctgtcaggccatgagtggatcagacactgcgttacccgccgtgagtggccgcattacctgtggctgcaaatggtcagatcatcctatatcaaacagcattcactgcacttccagcccggcaagagccataaagacattctgtggacggtacacctcgccgcttgtaatggttttttctacgtgtctgacattaaggattatatctacatcagcaacacagcctctatcacgcaccgaccggattactatgatgttcgtgcgatgagctatgtcgaggtgatcgcggaaatcatccgactagcggaacaagagcaaaacaaaaaaataaaggtgtttttgctcagacatgcgctagtggaagcacgtcactttctgggactgtaccgaaagaaagtacaaggtcgaactgaactgcaacaaaccttcagatgcaggatccgattgattggcctagctaagggaataagccgtctgagcgatgtattttttctgctgaagcttttttataagcttcggtaa

SEQ ID NO: 102959 - DNA, 321 bp, Enterobacter aerogenes
atgatacaactcaatctggcgagagtgctgctattgggcaatgaacgtaacggctatatccgttatgagatcttctcgaaagagggcgaagacccccattacccggaaaaaataattgtttatcgtgagtgcgtcattggcgagcatggtgactgtagctggctcaaaactaatgatgaaatcagtctggaacacctcggatttcagcccggagagggattccagagagcaataacttaccacatgcgccccgcacgggatatggcttctgcaatgggtgaatgccgacgacattaccaggaaaagtacggttctgagtaa

SEQ ID NO: 102960 - DNA, 735 bp, Enterobacter aerogenes
atgaccaatgcgctggcacgacataagcgaggcgaggcggtggtcattcctgtgatcttaagagagtgtgcctggcatcagttagaattcggcagcattatggcggcgacaattgacggcaaacccataaccaaatttgccagccacgatgaaggttatgttcaggtcgtcgatgccgtttctcgtgccattgctgctatggaggcgagaaagccacagcagagtacacctgttcctgtacaacctttggttagtacagcggatacagtttttacaccgcgttccagcaatctttctctaccaaagagttttactgatctcgataaagatcgcgcccgtcgcgagggttttgagtatgtagctcgctattttgcaaactcgttggacgaactcaaaaagcgccatgcagggctagacgtcgatttccatcggcctgatgcagattctttcacttgtgctgtgtatatcaatggtagcaaggttggtcagtgtgggatctggcgtagcaatcaacatcatgggatgggggatatctgttatagccaggagagtgttgttcgaaacagttttaacgaatgcctgaatcttgctgataacggtcaaacactcggttttcgtgctctgatgggaggatatatcggtggaaattcacgaggacagttgctgaccaacgaaggaatgtctgaacatctgtgggatatgttcttcaattccgtaaaacagcgtatggcctga

SEQ ID NO: 102961 - DNA, 1392 bp, Enterobacter aerogenes
atgagatctaatctgacttatactcttgatgaaattgcagagatttatgatggccctcatgcaacgcccaaaaaattagaggcaggaaatgctgtttttttaagcatttcttccatagagaatggaagattaaacctagaaaaatcatcctttattaccgaagatgattttattaaatggacgcgcagagtaacacctcgtgccggagatgtcgtattttcttatgaaacaaaaattggcgaagcatcaattattcctgaagggttacgctgctgtttaggtagacgtatgggattactgagagccaaacaagataaggtattatctcagtatctgctttatgcttatttatcgccagcatttcaggatgtcattagagaaaaaacgatccacggtagtactactgatcgtctttcaatcaaagagatgccctctttcgagattaaactacctgatatacatacacaaaaaaaagtaattcagattttaagttcaattgataataaattatctaaaaatgctgagataaatcaaaccttagaacaaatggcacaagctctgttcaaaagctggtttatcgattttgaaccggtaaaagccaaaattatgatactggaagccggtggctcgcaggaagatgcaacgcttgctgccatgacagccatttctggaaaagacgctggctctttgactgtatttgagcaggtttatcctgaaaaatatgctgaactcaaggctgcggcagagttgtttccgtcaacaatgcaggatattgattcagttaaaatacctagaggttggcgcttagttccattaaataacatagcctcattcgcatcagggaaggtcaatgtatctgaattgaccaaagatacatatatctctactgaaaatatgcttggtaaaaaaatggggatagagcgtgctacatcactaccttcagctaataccacaccatcttttaaatctggacacattttaatttcaaatatacgtccttattttaaaaaaatctggcttgcccgattttcaggggggcgctctccggatgttttagctttcgaacctaaaaaaaatatcacaaccgaatatttatacaatattctttaccaagactcattttttgacttcatgatgcaaacctcaaaaggtgtgaaaatgcccagaggggacaaaaaggccataatggaatggtcatgcatcgaaccaacggttgagttagttagtcttttttcaaacaaagtgaaagagttttattcttatattgaaagccataataaagagaatactcagctttcacagttacgcgataccctactccccaaactcctctcaggcgaaatccccctgccagaaactgaggaaatagccaaggaagctgactatgtttaa

SEQ ID NO: 102962 - DNA, 1197 bp, Enterobacter aerogenes
atgtttaaagtcgatcagcccagcaatagcctgcaaccccttcaggaaaccaccttcaataacgcgggtttcaccgagcgctaccacttacaggaatggctggcaaaacacccgcaggcattaacccgtaacagcgatgatgaactacttatcatccagaaagagtttgccggatttgacgacaccaaagagcggttagatctgctggcgattgataaagacggcaatctggtgatcatcgagaacaagctcgacgattccgggcgtgatgtcgtctggcaggcgctgaaatatgcaggttactgtgcgaaccttcgcaaagaacatatcgtagagatcttccagcgttacctcgatcagaacgaaccagaagaaacgcgtcctgcggctgacgtgctggctgaatttcttgagcacgatagcctggaagaggtgcaaattaaccagaatcgttcacagcgcattatgatggtcgcagcaaatttccgcaaagaagcaaccaataccgcactctggttaatgcagttcaatattcgcgtacagtgctttaaggttacaccttaccgttatggtaacgatgtatttattgatatcaagcaggttatcccgacgccggaagcggaatcttacatgatcggtatggcgcagaaagaggctgaggagcagtccacgactggagaatccaaagctcgccaccatttacgtaaggcgttctggacccaggctctggagaaattccgcgttagctcatgttcactctacaataatatcagcccgtcaaccgaccactggttaagcgcaggttctggcatcagtggcgtttcgtacaatcttatcttcagcaaaaaagaaattagggttgagctttggattgccaaaccgtcagcacaaaccaatacatttgcatttgactggcttcatgaacgcaaatccgctatcgaaaatcgctttgggcatgaaattgtttggcaggccgtaccggataagaaatcctgtcgtattacttacagaaaacccatcaacggcatcgcagatcaggaaaagtggccggagatggtcgactggctggtagaacatatgacggcatttgaaaaagccttttcaacatgtctaccggaacttaatcagttgattaagcgaacctttaacgggcatgatgaagctgaaattatcactgaagaagccgaacacgtttaa

SEQ ID NO: 102963 - DNA, 2457 bp, Enterobacter aerogenes
atggccaaaatgattccggcattcggacccattgataatgatagttatggagaaaaaacggtttatgccctgttaaaagaagggctgtccgatgatttcaccgtgattcatagtctcccgtggttgagttcggcggcccgacatttgggtatgaaactacctccaagtggagaaatagattttcttgttctccatcgtatctatggtgttttggcattagaggtaaaaagtgggatatatcgcgtagacggccctatttttgtacatctcaaaacaaataataatgtcgatgtagtcaagcaaacacgtaacaatgtccatggattagcccgttggttagggggagcaacaacgttgcggttgcgtattggttatggttttatttttcctgatagccatttcgataataaagttataaatacagcaatggttgatgcgtctgtaagaccatttagaaaaatattcgttgataaaagccaactaccggaaattgcaaagtacactattgagataatgcaatactggaaatcagcattaggaaataatgacttaggaagtgaacgacttgaattaataataaaatccatatgcccgcaatttgatggcacgcctgactggggagcccgaattatttatgataatcaactctggttaagactcacacatgaacaaattaaggtcattgaactcctgtcagagtatcaacgatttgttgtaactggatggccaggaacaggtaagactttgattgggattgaattcgccaggcggttagttaaagaacaaaaaaaagttttatttattactttcaacaaccgtctttctgaatacattcgacaacaaacgccagtttcattatgcgatgtttttacctggcacaaactatgtcatcaggctcgcaatagattagccctgcctcccgagtctccttcaggctggtttgaatcaggatgttgcgaggatttgcttagtgcattaaagaaaaacatgctaaaggattatgatgctttaattattgacgaagctcaggcgttacattcttcgtggttggaaaccttattttgttggtttgaaaataaaagaattattgcattttgtgacgaaacccaaacgttctcttttgaaaaagggacgaatcacattggtcttcaacggataattaattcccaattttccttcagcttaactattgttttaagatgtcctaaagccgttactgattatttaatggctatcagaccttcatcatatcaaattacgtcccccagaaataacgaaccagatacgttaaaagaattagttgttatcgatccactttccacattgcttaatgaaatcttacgactgaaagaaagttctgtgccatctgatgagataaccgtccttgtccctacagatttagtgaaaaacttcctccagaaagacatgaaaacttttgatataaatattgaaactgtatctcgttttcgtggtatggaatcacctattgttattacattggattctgaaagcatggaggatgctcaattattttgtgcttattcaagagcaacaacggctttcattgcaatttatgattcggagaaattagcatggagagaaaataataactttctgtataaattgattaatagagaggaaatccagaaagcaattaatgaagcaaaacataactcatcctccaaagttcttatggctaatttcttcagcgaaggggatctgaaactcaacactgtaaaattagcatggtcaaaaaacctttcttcttggcttattgagtttgatgaagaaaattctccagcggaaatgtgggttgattatttatattcccaccacacttacccaattatatattggttcagcgattcacggaaagttgtttattacattgcaaatcaacaattcgaattaaacacattaggtataggaacacatttatcaataaaaatttgtgccatatgtgaaaagatgataccttttgattctgagaacaattgtttactttgcaataagaaaactgaagaatcgtcaccaaccagatatgaaattaataaaattcgcgatcttgatttaacaatttctcaggatgattttaatacagattttcaaaaagaaaagagacgattattacccataccgttagcggcggcgagtgcccgaagagtagcatttgaaaaaccatatagaaataaagtactaagcgaatcattacctggcggaaaacttctctacagaagtgcattagcttttatacaggcttgggttgcattattaccaccaaataaaacacttgtattggatgagataacagatgcactacgtagacgctatattcatcttgagaaattggatcgctctgaattaaggaatgctttagcctgtgcactgtcaacttgctacaataaaaagcatcttcttaaagttgaaaaagggaaatattcacctattgacgactaa

SEQ ID NO: 102964 - DNA, 531 bp, Enterobacter aerogenes
atgatattaaaacctgaaaacctcactaccccagaacaaattgaccaaaatgtagcttcattttgcagaactttaagtacagaggcacccatatatatagatgtaaggcctgagccatggtgtaaaaaatctaactgtgagatgaatgttgataaattcatcgaattgcatggtggagataaaattattggctataaaatttggtacacaaagcgaaagtatattgaagcagaacgtcatgttgtttacaaaaaggaaggtgagtttatagatcttactttcaatactgatggtgaaagaaaaatattgtttattcctgatgacaagaacttaacttatgatgaaagaccattgaaattgagacgagggctaattcaaaaagctagaatattggctaagaatcttgatgaacgagacgctaatattctacagatgagtcaggaagattcgtggaatacaatgccttctttcgaagaatggcttaaagaaaaaagaatgccaaatatgattccagtaccaattaacaagtaa

SEQ ID NO: 102965 - DNA, 864 bp, Enterobacter aerogenes
gtgacattattcgaatatctggaaatgcaaaaatatttggtgaaagacattaactcgatacttagtaagcatggtgtcaagaatgaaattaatttatcggatattacgataactgacaatttggtttctgatcttgtaaaagaagataaagttttatcaaattcaatcgtggagtctatctggccatctatagaaagcttaacggtttatcactacacatctaaatattctgctgaatcaattctgaactctagtgagttccgattatatagtttactcaagagatttgatgagcaggaaataaaatcattttgtgaaaatcataaactcaatggatatctagaacataccaatggagttccgaagtataaaacactaataatgagcaatatgtactatgcatcttttactgatactaacctgacagtcgatcaagaacagtacttctggaatgttttcgctcctattgatggcgtaaggctcaaacttaaagtgacggcatcaaatccaaattttcgtaaaatggtttatgaaaaaacaaaaggaaaatcgttagatttattaagcgatctgtcacagtgtatcaaaagtaaatatgataaaaactttatattggctggaatatctaggctgtgtgccttctatctagcaaaagaatttgatgttgaaaatgaatatcgtgctttatatagagcgtgggatgggtttggtccggcacctaaatttgatggaagtcatgaatatataggtatccctattggtataatgagttgtactggttatcaaattgacattgaggaaatacaatccaatgaaaaactctctattccaagtcagtacatcgttgtgccaagaaatacataa

SEQ ID NO: 102966 - DNA, 531 bp, Enterobacter aerogenes
atgtttgacttaaatcacttcagaacattaattaataatgttgatgcagccactacaaatcaacaaaaaggtcagtcttttgagcttctttcaatttatatgtttgcgcatcttaatggagtagatattaccgagcatgatgttaggatgccttcagaggaaatagacattgttttgtggaatgcacagacagaagagatattaagaccatgggattcagtgatcctcgttgagtgtaaaaattggagttcggctgttggcgcatcggtattagataattttgtgaataaagtccgcagacgagctttaactaccggtatatttgttgctgccaatggtgttacgggtggctttgtgagaggcgacggaaatgaacctggagcaattggtattttaacaagtgctttacaagatggtattagagttattgtgattactatggatgatattcgctctttaacttctttagatgatatcagggcgctaataaaaaaacgatactgcgggctctatgtgcacaaagtgctttaa

SEQ ID NO: 102967 - DNA, 933 bp, Enterobacter aerogenes
atgaaaagaattggattattaaatagtttatcgcatgaggccaacaggctaaaaagctcactcaaaaacatgtcccaattggaaggctatgaagtagaaactattgatgacttttatcaacaagagactgtatcaggtgctatgtggggactgattaatttatgtgatgtattagttgcgttcgttaataaaaattctgaaagcttgtattatcagattgggttagcccatggtgcaggaaaacccgttgtaataataactgacaacgagtattcgttaccaccagagattagaggtcagagaatattaagcgtatcgaaatatgattttcttgataacaaatttgtctttcagttaaaagaagcagttgacgatgcaacaagaagaaaatctggctatctaggccctagaagtgagcacaaaaaatattccgcctcacataactttcagcccgctgtaaattttcgcgatcttttttccgtggaaggttataggcgtgcccggttatttgaacaatggcttgcagagagggctgcaggtatcgaaggttgggaggttactgcctctgaatcgcttgatcgtagagatactggtttcgatttggttatttggaactcccaagaagattctgaactttctattttagggaatccaatagccgttgaaattaaagcaattaactcaatgagcttggcaaatcttcataatctccttaagataagtaagaagtcaggaattaaagggttaatattagctacgactggattaaatgatataagaaccaaaagactactcagcaggcttagggttgaggagggcatcaatgttattgcgttagaccgagatgatcttataaatgttataagcccaagtgatctattatatcttgtcaaaacgaaagttagagaactcttgtacgggaaggagttctaa

SEQ ID NO: 102968 - DNA, 1128 bp, Enterobacter aerogenes
atgaaaaagaccgcttggcttatcagcctgatgcctccgatactgtctcttattattataagaacataccttggttattttaataacggctcgttatttacagagaacctgtcagcaacggggatatttaattacgtctttatttttatggtactaaccacaacaggggtcgggttgatttttttcttaccttcactcattttttgcttgtccttgccgaaaaatgtgaaaacaattcacaattaccgtgacataaaaggaaggatttctctggctgctctgctgtcctttcctctgactgtctttacattttttctgtgggcttatctttccgctggccacccggattatgagcctgcactgggatggctcctgtcactggcagggatctcatcggtcgctctaatcaattacctttttctcagacaagcggcgaaaaccgctcaggaatttcagcgtactaaagctcgcagaaaaacagcgtgctggcttttcatcggtagtccgcttctcattttcaccattattctttgcttcacattttgcgtcagtaccattatcagatgggtagatacgcaggtagcgggagacagcattgctgcaatactgaaactggccaccttgatttcggggttaggcgtattgttaatgttacccggtgcggtatatgtaaatactgataacgctgcacggaatgagtcatggcatatcagattcacccttgtctcagttagcctctggcttatcataaccagcatatatgtgtcatcgttttatcctgttctcatcgacaaaacgatggcatttgcgggtatttcggactggcagacacggcgttttcaggttgaagaaagtaagtttccggcctcacatttcggccatcaggactggcatgttgctgataatatcccgggaaaaagttatacggtgcagggcattatggtttattcccttaacaacgtcaggttgctgtgccctgaatccgtcagaaaacaatacaggaacatgcttcagtttattccctgggatcgggtttatgaccagaacagatctaacgaactgaagaaggcctcagccagatgtcagccatttgtacagggtggcattacgcggctttctgaaaaatag

SEQ ID NO: 102969 - DNA, 795 bp, Enterobacter aerogenes
atgagcgttataaaccccattagttccaatatatttaatgccgaatttttaaactccccggcagccgcagttgcagcatggatttccattattggaacgcttataacggtgataacaataattgttagagcacttttcagatacagaaaatctcataataaaattttgaaaaaagcaggagtccctgctttcgtgctgaatttctttatatttaccattccggtaaagagtcttccagcgaccggatggccagaaaaaatacttgctggcgcactactagttattttcctgggcggaagcggttatttctctccagagttaattcttgcttccaagacacctgatggatcagcactgtggaattgggagtctactaacgaaaatttttatatatccaagttacgagcgaccgaagcaacaattacctccccgccaaaatggactttaaaagcgtctgattgcgatttagcatctgccaagatcagctatgacacaaagttcattacagccgaacatgccacacaattatgcaacttaatgttggtttctcctgaaaaagaacgattagaaaagtccatcataaatttcaaaaagaacagaatgattatatttttaatatctggagtcatcgccttttatttttcatggatgatacttggtttaatccttagcctcatttactctcaaaaagtaagaagatatattctggctgagcaaagaaaggctatacattgcgctcacggcgaattcagagccgaaggtatctatgcaatatatcaagagttagagcgatag

SEQ ID NO: 102970 - DNA, 222 bp, Enterobacter aerogenes
atggccccggtgctgttgtggttgatggaaaaccagccggatgccatcaacaatcccgaactgtgtgaaaagctgttttcctttgaggtggatattctgcgcaacgatatttgcgatatcagtctggatttgcaactgacggagcgcattctggtgagcgatgagggcgggacctcaaccgttaaggcagggccggagccagatgtgcaggaagaaatgtag

SEQ ID NO: 102971 - DNA, 1431 bp, Enterobacter aerogenes
atgtccggattcaaagaaggttttctgtggggcggcgcggtagcggcgcatcagcttgagggcggctggcaagaaggagggaaggggattagcgtcgctgacgtgatgaccgcaggcgcccatggggtgccgagaacgatcaccgatggcgtactgccaggccataactatcccaaccatgaggcgattgatttttatcatcgttataaagaagacgtagcgctgtttgccgaactgggatttaagtgtttccgtacttcaattgcctggacgcgcatttttccgcggggcgatgagctggaacctaatgaggcgggcctgcaattctatgacgatctgttcgacgagtgcctgaaatatggtatcgaaccggtgatcacgctctcccattttgaaatgccttaccacctggtgactgaatacggcggctggcgcaaccgtaagctgattgatttctttgtccgcttcgcgaaggtggtgtttacccgctatcagcacaaagtgaagtactggatgacctttaacgagatcaacaaccaggccaacttccatgaagatttcgccccctttaccaactccggcctgaagtatcagcccggagaagaccgtgagccggtgatgtttcaggctgcccattatgaactggtggccagtgcgctggcggtaaaggcggcacgtgagattaattcggacctgcagattggctgtatgatcgcgatgtgtccaatctatccgctcacctgcgcgccggacgacatcatgatggcgatgaacgctatgcatcgtcgttactggtttaccgatgtgcacgtgcgtggccgctatccgcagcatctgctcaactacttcgcgcgccgcggttttacgctggatatcaccgacgccgatagccaggcgttaaaagagggttgcgtcgactatattggttttagctactacatgtccttcgccaccaaagcgactgacgataatccacacctggattacgacgaaagtaccagcctggtctccaacccgtacgtcaagaaatcggattggggctggcagattgacccggttggtctgcgctactcgctcaactggttctgggatcactatcagttgccgctgtttatcgttgagaacggctttggcgccattgacgtgcgtgaagctgacggcagcgtggatgaccagtatcgtatcgagtatctcagtgcccatattgccgaaatgaaaaaagcggtagtggaggatggcgtagatctgatggggtataccccgtggggctgtatcgatctggtctccgccggtaccggcgagatgaaaaaacgctatggatttatctttgtcgataaagataacgacggtcgcggcacgttggcccgcagccgtaaaaaatcctttgcctggtatcagcaggttattgccagtaacggcgaaaatctgtaa

SEQ ID NO: 102972 - DNA, 564 bp, Enterobacter aerogenes
atggaacacttaaccattcctcctgcggtcgctcgtaatgagcttgcgttaaaattttcggctcacccagcagttttggtgatgctcaatcgtatgaagaattcacagattgttgttttgtgttcacttcttcggggtgaccgtttgacttctgctggaaacaatatcacggctgattttgaagtgactcgactcccagcgatcattgagattcttgagaagaaatacttcatccctgttcagcactgtaatgtcattacgacatcggttacagcgcggagtgcaacaactcaaacattctatgtaatggacaaggacactatctctcagattctttctgagcctgaagccgtttttcaggagaagcggagagccttggttaaaaccgaagccttgaaagctcagaaaaaactagatggcttaattaagaaacatggcggagtcaccgaaaccttactgtatctcactcatcatgcttacaaggataaaatgttaagtaatgaagagtggagggagctggatgagaagttcattgagattctgaatgaactaaacgctgcgtag

SEQ ID NO: 102973 - DNA, 411 bp, Enterobacter aerogenes
atggctttcgtatctctatcaacgatggctgcgaaaactggccgtatggtacaaagcaaccacgttactgttactcaaactaaacgcgccactggtgctgttgaactgggattcagaattggtcgcactgccatggatgcaactggtatcgaaacaggtgaccgtgttgatatcctttacgacagtgaatcatcattgtggatgataaaaaaaatcccagagggtggttttggagttgcaggacaaaagaataaagcaggtgagtattcatcctgtgcaatcagaatcacactacggccagggtttcctcgcctgtctgatgatgatgatgcatcggttaagcagttttcacaggattcagacactcagatggagaaaggacaaattatcttcaagttgggtgatgagtag

SEQ ID NO: 102974 - DNA, 876 bp, Enterobacter aerogenes
atgtcgaaacttacaaaacgcatggaaaaactcgccctgctggctggcggcagttttaaaacagtccatgatcgcctccgcatcgccgggcgtttaagccagcatctgcacaagctgaatatccagattcaggatctccagcatctgaaatcgtcacatatcgaaagctacgtgatggcgcgacgggaagcaggcattacgccacgcacgctacaaaacgagatggctgccctgcgcaccatccttgctcagtctgggcgtcaaaaatttgcccaatcggagcgcatcagcaataaagcgctcgggctgggtaacgccagccgggctggaacgcatctgccattaacctcagaacactggttgtcggcgctctctgcttttcatgaaaaagatgaaggactggctctgacgctggagcttgccagagcaatgggtttgcgttcacaggaagcagtgcagtgttgtcaatctctgaaaacctgggccgctgcgttagagcgtggagaaaaccgattgcaggtggtttttggcaccaaaggatcacgtccccgtcagacggtggtgctcgaacctgaaaggctacgcaacatcctgaaccaggctatacccctgatgacacaacgcgggggacgtttgctcaataaacccgatctgcgcgccgcaatgaattactggcgtgccagcgcagttcgcgctgggctgactggcccctatgcaccacacagtctgcgctattcatgggcgcaggaggcgatggcgcactaccagggactggggctgagtataaaggaagccaaggcgatggttgcgatggatcttggtcatggcgatggtcgagggcgctacatccagcaggtgtatgggaggcaatcatga

SEQ ID NO: 102975 - DNA, 984 bp, Enterobacter aerogenes
atgagctattacgtttctgccgtctccgatcgggcacgcaataactggccgaaaatatttgaacaacttggcattttcattccaccaaatcatcggcatggcccgtgtccctgttgtgggggtaaggatcgcttcaggatggatgatctggaggggcgcggcacatggttctgcaatcagtgcggcgcaggtgacggactggatctggtttcccgcttcttcggttgcgcactggttgcggccgccggaatggtgcaggacatggatcctgtaccgctggttccgccagccagggaaaaatcacaggctttgaatatggaatcgcgtattaagacactgcttcgtcattgcgaatccggagaagcgccgtatctgacaacgcgaggctggcgacgagcccagtggcttctgactgagcgtagtagccggacaatctgcggcgtgcatttcggggcgggtacgctggtattaccaattcgaaatacaggcacgcagctgacaggtgcgcagttcattcatcctggagggaaaaagtacctgctgcccggtagccatctgaaggattgtttttgcccggtacatcaggcgagccgcaacggtaggccggaaccctgggcaccagacagcaaaccaccggaaggcatcatcattaccgaaggatatgcaaccgcacttgcggtctcatgccttcatcattttccggtcgttgccgccctgtcggcacacaacctgaaaaatgtggccatcgctttccgggcgcagtggcctgaatgccaccttatcctggctggcgataatgattgcagtcaggaaaaaaataccgggttgctgaatgcaaccgccgctgccgaagtagtgaagggctgtgtggttctccctgcagacaccacattgagcgactgggatgaattttaccgtcactacggtgaatccatttcccggattgtgttcaaccagcaacttcctgcaaatctcaggtcgtaa

SEQ ID NO: 102976 - DNA, 1053 bp, Enterobacter aerogenes
atgacagcatcagaccgtactctcaccaccacccttccactgcgccggggctcggaagggtttaacaccagtcaggattatctggttaaaggactcatccccgccggggcgctgtgcagtatttacggccccggcggctcttttaaatcctttctggcggtatcgctggcgtgccatattgccagcggtacgtcatggggcggaaggcgagtcaatcaaggggctgtgctgtttatcgccggagagggaggaaccggtgtatcgcggcggatccgcgcctgggagctcagcgttaatgatgagatggcactcgataacctgtttcgcgtcgactgcccgatctttccagccgctccgggaagcatcgaacaggtgatcctggcggcgcaggacattcagaacatgaccggaatgccggtacggctgatcatcctagatacgctggcccgctgttttggtaactcagatgaaaataccgcgcgggatatgggcgcatttatccagggttgcgacgccattcggtatcatacgcgcgcagcgatgatgatcgttcatcactcgggtaaggatcaggaacggggcgcacgcggttcaagtgcttttcaggctgcgctggatgccgagtttaacgtcagacgcgagggacgtcgcaacgctatcaccctgagttgtacaaagatgaaagatgcggagatgccggaggtcaccgcctacgatcttgaggaagttgttatctataccgatagtgatggcgaaccagtgacttcactggtgctgaatgacgagccccggcaacctgacgatgacttactgagtagtggcataccacccggcgtacctcatatcacccgcaaccatacggcgttatggcgctgtgttaaccaacgcatcagccagaataagccttgtacccgcgcgctcttgcgcgacgatctacgcgcaaagggaattaacgtcgagaagaaattttcgcgctggctggagaagctgctgcgcgagcaactgattgtgctcgatggagaacagatcaaactttccaatcagaattcttaa

SEQ ID NO: 102977 - DNA, 786 bp, Enterobacter aerogenes
atggaaaataaatatgagattttctttaattttataaggtcctactttaatcaagacactgtatatgagttagagacggatgagcttgagcctatattggatctttatttatctgaagttaatcaggatggtgttaaagagttatttatagatatttctgacttcctcttagataataaactcaatgatctcgattctttctttcaaaaggagtttcactcttatcttgatcttactccttttaatggttttttgtttcttcttatagataaatatagtgagaaatatttatcactagatattgcgaaacatactaataatgttttcaaaatacgtcaaaaaagccctctctcacttgtatcaagaagaaaaaagcgtgctttttcttttttaccaagtatagctgcatatggtgactcagttaaaacaagatatacgccaaggagtagagttactcgcatgcaacaagcaaaggggcggtggatagaaagtataactataaaagaacatggctttgtttatggtgaagttcaggatgacatttcagggaggcttatagaagcgaaagttgaggttaagtctaaaagttctgataatcattttggtgtctttaatgttaagggaaggtcaaatctaaattcaaagtttaagagaaaaggtcgaggtggtgtgcaaagatacacaccaataaaaacaactacaaaaattgaagccgaaaataaaaagctttttgaaaagttgagagaaactctcttagcaactgatttgacagtttttagaacttaa

SEQ ID NO: 102978 - DNA, 465 bp, Enterobacter aerogenes
atgtcttctttagcttctgattcacaacttgaaaaaaattttccgacacaaattccaattattctatctcagcatgagaaagaaaaagatggaaaaacgggtgggcatacaatagctagacacgttggcaaaagtattgctgagttgcgcagtaggttagcacaatcaacacgattgaaatcaatatctactttcgatgatttaaatcttgctgaatttgcatcgactgaatggtttggttgttatttagaagattttaaaaaatggttgaataaacctgccaaatatgaagctaggttttctaaagaagtggatattccacaaaaaattggtgttgcagttaaaagtgatgatgctactgtagttcatgaaactaatagaatcaatcttactatgatagtcaaacagcataataacatgccacattatattcttactgcatttcctgtcttgaaaaaggtttag

SEQ ID NO: 102979 - DNA, 204 bp, Enterobacter aerogenes
atgaaaatcaccgtagaacaaccctcagccagagaactggtcgatcgctcgcgaattctggtgcatgtgatgctcgagcatcctgacgatatcggcccgaattatgcgttgcttctcatccttgccgaccagctacaactattaagggatgcttttgaagaggatgagatcagacggcttagagacgagaaattacctcagtaa

SEQ ID NO: 102980 - DNA, 132 bp, Enterobacter aerogenes
atgaccaagttaatagctgataaatcagtggtggatttaaataaagaaatcgcaaaattgaaaaaagtcgccaaggatcttgagtgttcattaccagagaaaaaacacgaacttattcagtggaacaaataa

SEQ ID NO: 102981 - DNA, 1065 bp, Enterobacter aerogenes
atgaaaaccatttcactatttaataacaaaggcggggtaggaaaaacgaccctgacctggaacttaagtgtatctctatcggcaaaagggaaatctgttttgctgatagatttcgatccacaatgtaatttatcaatagctttacttggtgagactggcttctctaatcttttgaagaaggatgcggctaatccttatggaaaaacgataagagcattttgtcaaccatttatacaacaagatatcacccccgtcgtacatacattttcaccactgcatcccatggaatctggatcaggaaggttagacatagctccaggggacttttggcttaataatctttcagatgtgattagtgtaggtacagatttaattgctggaaacgcagtaaccagattcttaatacctagtttaattgctagtaaagctcaagagttaaataattgtgaatacgattatgttcttattgatgtgccgccgtcatttaataccatagtcagatcggctctctactgttctgattatttcttagttccatgtactgccgatgtattttcggcttactgcataggactcattggtgaaactttaccaaaatttagagacgactgggagcaaggtattagaagaagttcggcccaaaataattctctaataagccaaaaaggtgcacctaaatttgcaggatgggtcttcaacggatttgataaaagacggaatcctggccaactagtctcatcagaaatcgcagctgacgctgcccatagagataaaataattgactcagtaaaaaatgatcttcgcccaaaattggcatctataacaacatacccagcagtggcttcttttgctccggacacacctgtcgcaaaagttgaagacctaaatgtaatggctccagatagtattttacagggggtccctctcagatatttatctaccgtagcacctaccaggggggtgctggccagaggggcttggtcaggacctcagaaaacccttatgcagactatgtcggcagagcatgacgttttagctgattatataatccaaaatttcgtttaa

SEQ ID NO: 102982 - DNA, 570 bp, Enterobacter aerogenes
atggctgactcaggacacgataaacctgctgcgttgtcattaaatatcggcagtaaaataagacgattgcggcagtcacgagggatttcgttaaacgacctgtctaaattgtcagggggttcaaagggagcgttatccaaactggagtcaggatcttccagcccccgtgttgatacgctggacgctatcgccaccgctttacgtttaccggtcggagatttgctgagcggtggcggcaggatgtatccccgctttgaaaaacatcgtcctgtgctgggcgagtattcgcagatgatgaaattccgcatcggccccggcaatacctccgagatatggttgctgcaaatggagccgcaggtcaccatccatagtcccggtcattcagagggggcgcatgaacatattctggtgcacagcggaattttgcgcctgcgctttagccagtatgaagtcatcaccctggaacccggggatttttatgctttctccgcgcaagtggcgcacacgtacagtgcaacggaaacggcggttagcgcaacggtggtgatgactcatctcgagcccggttaa

SEQ ID NO: 102983 - DNA, 363 bp, Enterobacter aerogenes
atgcgtaaagttaatttaaaagaaagttttgctcttttcagcgattactggaatccgaaaattgtcggcgaaatgaataacgaatatgtcaaattggctaaattatccggaaaatttgactggcatcatcatgaacatgaggacgagctttttcttgttatcagcggccgcttgcggatggggttaagaacgggcgatatcgtgcttgatgcaggtgagtttatcattgtgccgaaaagaaccgagcattgtcctgaagcgttaaccgaagagtgctgcgtcgttttactggagccaaaatcgaccctgaatacgggcaatatcgtcaacgaacgtacggtacatgagctggataaactgtaa

SEQ ID NO: 102984 - DNA, 147 bp, Enterobacter aerogenes
atgacaacacgttacatcggcatgaaccgcgagacagggcgcgctaacactgacgttgagcacgtcggtcaggccggtcggctctcgcgtgatgcgccgcgattagtcaccactaaaatgcccgtactcagcatggaagctgtttag

SEQ ID NO: 102985 - DNA, 636 bp, Enterobacter aerogenes
atgaatactcgcgcaaatcttcaggacgctttacgtctcctacgcaatctgatccgcaccggcgttatcgtcgaagttgacctcgataacgggcgctgtcgtgtccagactggcggcatcgttaccgattggcttcagtggctgacgtcgcgcgctggtcgctctcgcacgtggtgggctccctctgtgggcgagcaggtcttactgctggcagtgggcggcgagctcgataccgcctttgtgctgcccggtattttctctgatgactaccccgcaccgtcggcatcggctgatgcatttcacattacctttcctgacggggcggttatcgagtacgagccggagactggcgcgctgaccgtaagcggcataaaaaccgcagacattacggcgtcggattccatcgccgtgacggtgccggtggtgacggtgaaagcggagacccgcatcaccctcgacaccccagaggtggtccgcaccaacaagctgacgaccgggtcattcgaggtcaccaaaggcgggacgatgaaaggcaatattacccataccgccggatcgctttcttcaaacggaaaagttcttcatctgcataaacaccccggcgacagcggcggtgaaacagggacaccactatga

SEQ ID NO: 102986 - DNA, 1359 bp, Enterobacter aerogenes
atgtcgactaaaaatatatattctaatttggaaaaaagcttagagaaaactatttctgagtccaggagtatacggttgcgtgattctggctatatttctgaggcagcatcgagttcccttgcagggatggaaaatctagatagtagatatgattttgtgaaaagctctgttgccttagaaagcgtgcgtgctgattctaatgaacaacattacgggataactgaattagtgaggcataattttggaaagcatggccgattaatgccaagttttggatgtcatcctgatttcgataatatggatgaaggagagttgagaaatggctactcagttactatgtttatggatatcattggctccactaaacttggtgtaatcttcagtcctgaaactgtttttaaaataaaaaatgatattattagatgtgcaatagaaacagtaaactctttcgatggacatgtgcatcgtattatgggtgatgctgtgatggccttctttagaagtgataagtgcgagagagaaggtcgcattgcagacagtgccattgatgcattgaattgcgcgacatatttaatcgatatgtttaaaagtacggtaatccctaaactaaatgagctgggggtagatgaaaatcttggcatacgtataggaatcgactatggagcacatgaccaagttatctggggtaaatatggttatatggaaagtcaggaggtaactgctacatctttttttgtcgacgtagcagctaaactacaacaaaaggcaccgaaaaactcgattatgataggtgatagtttagcagaacttttaggctttgataccaatcaactggcagtgagaacaaaaataaaaaataatgaagaggtttctcttcattatatcaccccgaattataaggatgcgtcggggaaatcaattaattacaggcagcatcttttaaagaatgagtcatactacaagcttttgccaacagggatgcttgatagtgatttctatatacgagccagtctgaaaagggacaaaaacgatccatctgatgataattatatttcttgctctcgggtggttagaaaaggaatgggtatttcatttaaggggtattatcattctacgataacttacgacaaccccaaatttaaatttagagtaaaaaatactggagcggaagcggcagatgctgagaacaatggagatcattatttttttgagcctgcaaagtattcagatggtagatatttcgctccgcattgggaagatacaaaatataaaggccttcatcatatgtatgtgtctttctgggatggtgaacaactaattgaaccggaaaaatgcttctcagtattcataaatgactga

SEQ ID NO: 102987 - DNA, 546 bp, Enterobacter aerogenes
gtgcgaaaattaagcaaggggaatgaaggcgcgatagacaaaaaaattgaattaatgataaaggttattattcgtactgactcttatctaaactcagcaaacactaagtctactatattacttagtttgtcatcagcactattagttgctctgtctgtaaacttcaagaacatcactggtatggtgatagttgattcagataaagctgttcttgctgttctgataagtttgatgatttttttactaataacgtcaattgttttctcgcttagaggtattactccatatattaaaccaagtacggtaagtaacaccttttcatttgttgatatttcaattaatttccatgagttacatttatataaagaacgttttaattcagtatctaaactggagtatttaaatgaattaatttcattaaatcataatttatccaaagcgctcgttgcaaagtataataagcagattactgcaataacctgtattgaagcaactgcgtacgtcctgtgtttttcagtgtatatgattattatagctaattgctaa

SEQ ID NO: 102988 - DNA, 450 bp, Enterobacter aerogenes
atgaatgactttaaaccgttcgacgataagctcgccaggctgattgcggcgctgtcaccgaccgcccggcgcaagatggccgcagatatcgcgaagcccctgagagcccgacaacagcgccggattaaaacgcagaaagcgcccgacggcaccccatacgccgcacgaaaacgccagccggtgaaagcgaagaaagaccgggttaagcgggaaatgttcgcgaaactccgcatcagtcgctttatgaaagccacggcgggaaatgatgtggcggttgtggagttcactggcaaggtgcaaaggatggtgaatgtgcatcagtacgggcttaaggacaaacctagccctaatagcggctctgtagaataccctgcacgtatcttgcttggattttcgccttccgatattgactttgtatccacaaagattgttaattatctatcggagtga

SEQ ID NO: 102989 - DNA, 1662 bp, Enterobacter aerogenes
atgtttaagcgcgaaatatcgacagatccaatgcgccctctgtatatttactgggggccaatagctaaggctctagaggctggcgtacatgagtgggagttatatccattcaaacgttctgaaagtaaaataagcttcactcaggctgttttcactgcactttccatgccgctggcgcaaggggctggctcatcaaatcttacgttgcatcaggttttgcgtgttttatacgctgatcaaccttctgtgcatagtccaattttccgatttgatagatttgacaatgcactgacacgtgaaactgtagggggatacctatgtggggtttataacgatgaattgtacaatgcacaactctctctcagagatgtagaaacagagttaacaaagaaagttgccgaattaaaaagcatttttaacgttttaggccgttctggtcaagctcctgatatgcaaggtattgatgaaaaaataaaagacctgaacgaactacgaacaattgaaaataaaaagcttacagatgggacagcatttttatctaatgataaagttgactcagaaaaacgtgtaaattcgttacgagatgaactaaaccatgctaaaggcaaaacagccaaactgaaaaacaaaattcagtcattagagtttgagatttcagactctgaaatgtttatatcagaactacaagacagactgaaaaatttggaacagtccggagaaacccgaggcatatttgatagcatgaactttgaattttgcccaagttgcctcacgaaaatcgatactattaacaatagtcatacatgtcatttatgtaaatcagaacaatcagatgataaagcgacaaatcagttgctaagaatgaaaaatgaacttacgcttcaaataaaagaatctcttcaactgatgagtagaagaagagatgaattagctcgattaaagcgagaagttcctttagcagatagtgaactaaaaagacttgaacaagaatttttcaaggagtcgaactattgggcatcccctcaagaagcagctataggtgaaatatatagggcaatcggacgactagacgaagaaataaaaagagcatacgaggataagaaacttattgtcgtaattaatgaattacaagaacgacgtgatgaattacaggctgaaaaaaacagactagatgatcttatagatttatatgaaaaagctgaagagcgacttaaagataaaatctatgactctgtaagcaccatcgcacaagaattattacaagaagatttacctttacaaaaagagtttatcacacccgaaagcgtagaattcagttttaccgataacagtgtttatgtcaatggtagcaaaaatttctccgaaagctcggcagttgttcttagacatattttccatttagcacttctttctgcaagtatggaaaatcattcaatgagactcccaagattcatgatgctagatggaatagatgatggcggtatggaaaaaaatagaagtcataatttacaagagataataatcaatgagtgttctcattatgaacatgattatcaattaatttttgcaacatctgagattaaccccaaattcactgaaagcgaatttgtggtcggagagtattattccccgaacaattactcattaaaaataattgagtga

SEQ ID NO: 102990 - DNA, 501 bp, Enterobacter aerogenes
atgttagtttatcatccagcgtatgatgcctatcattgtctttttagaatgatggcaattatcgaaagaactggtgaagttgaaatagacaagcttaaaattttggatttttatgttttgtttccgtttttattaagcaatgtaaaaatgcctcgccaacatgtaaaaataaaaaagactgccgaacggatttataatgaatatcatgacccactgaatccagagataatttttaaagaaatgcgacatattcaggatgcggcaataaaatgtatgctggcagcaggttatattggctccgatgaactaaatacaggttatgttgtaaggacagataagaaattaccacaaaaactggccttggaaatgaaggaattcctggacaacaaagaacctttttcatccttcattatccaaagcatggctaaatttcatttgattggaccagatggactcaagtctagaactaaactcatggagcatagatatgacattcattaa

SEQ ID NO: 102991 - DNA, 567 bp, Enterobacter aerogenes
gtgtttagcaaacaagaacaatctggtaacagggttaatggagggagtattgttggcggggaccaaaaaaattacataactaatattgctcgcagcagtaatcgaactctggatcgcctgtaccaaaaactttcacaagaggatggggtaagtagtggacaggatttttgtgataaattaaaacattatttagcaacagacactaaccctgacatcagagatttagaaacaaaactaacagacagtgacagaaccgaacttatatatttcgcaacggaccttaaagaaaaggcgtttaaggcgatattgaagtgtcagtcctccaaaactgcacaagaaatttatgcgctaatattggataaaattcacactgactttatgttgaagatcacaccgcttatacaaggtgaagaagatagggtagttgtcgatgagaaaacatcattaatattagagaatattagtgaaatgttaggtgataacttgttagatttatcagaaaaagatcttttaggattattatattttttaggtggaaattgtcatataaggtgggataaatgttag

SEQ ID NO: 102992 - DNA, 183 bp, Enterobacter aerogenes
atggaatatttaagcgaaatcattagctttttagctggcgcgggcattagttgggtagccacgtttactgtatatagtttcaaattgaaacaaataaatatgaatcaaagcactcccacacagaataacaacacagtaacgaacggaagcgtagtcggacgagatcagactaattctcactga

SEQ ID NO: 102993 - DNA, 417 bp, Enterobacter aerogenes
ttgttgtggttttatgaaaaagagcccgatattttctgccatgccgagttaaaggagtatgcgggggaaggacgactcacaacggaaatcgattctgcattaaataacggcagaggaaccattgcattacaggggaccgtgacgcatcctgacgggaaaagctatcattactatgtccgaaaatatctgacatataccgttgatgatgatgtgcttttaatgaaaagcacccgtcagccagtatttatttctcaggataccgatctcagtacactgaaaggatacattcattcgtttttcctcagcaatgaggcgaccgagttttcattacgcattaatcgcctggccaatcgtgatgatgcctgggtgatgtcttcaaccggacgcgttccccatttcgtttgtgtccctaattaa

SEQ ID NO: 102994 - DNA, 204 bp, Enterobacter aerogenes
atgaccaaacaggaatggcttttacgcctgagacgttgcaccgctaaagaaactctggagaaagtcatcgacaaaaataaataccagttaaccgatgaagagcttgaagtgttttacagtgcagtggatcaccggcttgcagaactgacgatgggaaaactttacgataaagttcccgccagtgtctggaaatatgttcactga

SEQ ID NO: 102995 - DNA, 2175 bp, Enterobacter aerogenes
atgccaggaggtactgagctttcccgggcaggatttgaaggcccggtattgaaaccagaagatgaccgttacgggtttgtgccaattgccgacggactggctcgtagcatctgtgccctggacgataatatcagtacagtaataggaattgagggcaggtgggggtcaggaaaatccagtctgatgcaactcctgtcgactcagctaagagcccgtgtgccaaaaacaacacagcttattcctttttcaccctggctgaattcacctgatgaaagccctgtgtcgtcgttattgatgacaatagcggccagactcgataaatgggaaaattccacaaaagtttccccgacgcgtctctcaccactggcagaaaacatacttacttacgcacaacagacatcccgcagactagctccattaacacgtttcgctggtaattttatgccgggagtgggacttattgctgatggtatggatgccattgcaaacaccgacctgcagcagcgcgagaagactacgtcagaattacgtgaaattattgagagtaaaatttcagtcctcggtgtcagcttcattgtgatcattgacgatctggacaggcttgaaccggaccaggccgtggaaatattacgaatggtgcggtctgtcgcggatttctcacgcatccgctacgtcatgtgctacgatcgggatgtactagcccacgccgtggagagaggcctcggtgtaaaggacggcgcactctatcttcagaaagttatccctctgtcattcagcctgccaagacctgaaagttttgatctacgccgtgaattccgtcagggggcgctggcgctatggcgtgaaatcaatggaggcgagcctgatgatgaacttatccgcgtgctggctcactatacagcttgctacggcgaagccctgtccagcccccgggaagtaaaccaggttctgaatgccgttcgttttcgctatcccggcctacgagattatgtatactttccggatctgtgccttattcagcttcttgtcaccgttaacccagcactggccaactgggttgaacattacctgacagaatggtctattgtggtgatgcatgacgggcaagtcagtgaagaggaacgattgctcctgagggaaaaactgatacaggctatcagccagtttggtgctatccgggcgcgttccgtctgggaattgcataactggctaccaggcattaatggtatcgatgagaaaacactcaacctttttgttcccgcgccggaaaacagtcaggagcactccgactcacagcgccggttgtccagtccggtgtactggcgatattatttttcctttactgccccgcagaacgtcatgtctgatgcggatattcaggaaatactctctctcgcaagtttcgactacacagcactcgagaaacggttacttgacagtgtgacagctaacggcgtgtcctcccgaacctggtttgaacatatactggcccggctgacgccaactatgactctgagtgcgggttatcgcgctcaaaaaaatcttctgctgtttttcttccagtgcagtgattcaatatttcctgtctatcgtgaccgaaatttatttttcaggccggaagagttgggtatcaatgccctggcatcacaactcatcaaacaactgcagcaaaagcaacctgcgctggcgatgtcataccttagccgactttttcgcgatggcagaagtttttcatgggcgaccacctatttgcgtttcctggctcaacaaggggatggtgacccagttagccgcgaagaagtgtctaatcttcgtctgataatgaaaatccggtttgctgacgagagcatccaacaagcgatggttggtattccttttttgtacagctttctatatgcctgcaaggatatggtcagtaaggaagagatctgcacgtggattgtaggagagcatctgaacgacagagcgtttctgcagatggtattgaacttacgttctcctgtcagcagcagcaatgttggtatctatctgcgccttgacctggacgcccttcaggcggtatttggtattgacggaattaaaccaaggctggctaatataaaatccacaggcgaggagtctctgaaagatatggtagccgaagttgaagatgcgataaggatgaataaccaatga

SEQ ID NO: 102996 - DNA, 1095 bp, Enterobacter aerogenes
atgaaaaataaaattgaacaatgtgcgactaacgtgcaccctgtttttttaaaaggtctgtttacatccttatttttattattattgagttcaagcgtaaatgcatcttgcagtcttcatgatggagttaaagtaactaacattgtgattccattatctggcactatgacgatttcaaatgatttaagcactatgaacttatcgagcatcgtcaaaagtcgttcacttcgacaagtgaaatgtactacatcaaatcctttttatggtcagattaaacatgcgggtacagaggttttcacgtacttcaatgataaatattacaaaactaatgtggatggtgtgggttttcattttgagcaagaaaacgctaagagtcctgacaatttatatccagtagctaactgtttaactgctgacaaatctatttgtacggaccagagtattacattcaaactgttaaaatatggagatataaaaccaggtgtattaaacggttcaagtatacctgttataaaaacataccttggacagtcagactcaatggtacagcttagtcaaataacattttccggcagtatagcctttacattacctacttgtaagacacctgatgtattcgtggaaatggattctcatccatccagtgagtttacaggaaaaggaaccactaccccgtggaaaaaggccaacattatattatctgattgcggtattttttatgggtataaaacaagcgttgtctatggtaatgatttatcaatatcatctggacatccatataatacaatacaaaacaacaatttgaatcttacattaacaccaatgaacggtgttttagatagaagtaaaggtattatggcaattagccctgttactggatctgcaaaaggaattggcatccaacttggatatggtgatgttacttcagctgatactgatttagttgatttttcaactataagaacacatgtaatgcccaaggatggtacaaaaacaatgtcaatccccttatcagctcgttatattcagacagaagataaagttataggtggaagagcagatggtaagcttatttttacaataacatataaataa

SEQ ID NO: 102997 - DNA, 279 bp, Enterobacter aerogenes
atgagcggtaagcgttatcccgaagagtttaaaattgaagcagtcaaacaggttgttgatcgtggttattctgtttccagcgttgcaacacgtctcgatattaccacccacagcctttacgcctggataaagaaatacggtccggattcttccactaataaagaacagtcagatgctcaggccgagatccgccgtctccagaaagagctgaagcgggttactgacgaacgggatatattaaaaaaagccgcggcgtacttcgcaaagctgtccgactga

SEQ ID NO: 102998 - DNA, 1329 bp, Enterobacter aerogenes
atgacagcgacaataccggacgagtttatcgcggcatttaactccgtttggcgtctgccagcgggcatggactacaacgcaatactcaatgctcctgagtttctgctttttcggaagacaatagataagctttgctatgccaaaatcaaaggaaacctccttgagccgtttctgctttgtggactccaaaaacttggggtaccctgcttgtttattgccggctcgccgctggccgctacggatagatctgagacggctgcacgttgctacgaggcattaatgaaacgccacgcgtatcatatctatctctgtccgctcgattgtgctggcgatataccgcaaattaaaacggccaacgcgaatatccggcgcttcagtagaaacgagctggatgaactgctgaattctttaccgcagcaaagacagccagggtacgtcactgcagatactgaggggttatcgcagtttttatggttagtcgtcagtcatgatgaggcgctgagtgtagattttgctgaacgctactggttttggaatacccgcaaggatactccaggaactgtctatccctacaaataccactatccggaggccgtggaagatgccattttcttattgctgctggcaatttgggaagaatggcaacttaacgaagaatatcactggcgccccttcaatatcccctgggtgcacacgctctcagacgatattttttggcaacaaccaccgatcccatcagcagcttcactcacctgggttccttgttcatatcaggatgaaaatacgggctggcacgagtatgaggccccccacgaatataattacagtctgaccagtgaccaactgatgccctttgttgacactccagccttcaggaaccttgaaacggccacaaccaatggcctcatcaattcggcggctcgacatcaatttgtgaaggcgtttcgatccgatggcgttgacgagttcctggctcatattgtcgtaattgacgcctgtgttggcgaaaaatcagtgaatagcgcactggaaaaagaacttaaaaggctcggtagtactggtagattaaaatacaggttggcagggttacttaatgatgtatctgtcaaagaaaatctccatgtcctgtatgaagctcgtagtaactatgtacacggcaatacgcttgaaaaaatttcaggtgaacacgttcttcaagcacgaattctggccagaaaaacactgaatgccattattaccgaagcaggccaatccccgggattaacgcgggaggagtttcttgacgatgttctgcgaagaggatggaaccttattcagcggggtctgtag

SEQ ID NO: 102999 - DNA, 630 bp, Enterobacter aerogenes
atgacggatcaattcgagggcgacctacatgattgcctgaataacattatgtacttggaagatcagggcgagattgaggtgacgaaggtcatctctgctggcactatctattacaagttgcaggccgaataccacgacggaaacggcgtgtacttcaacccacgaagcaacaaccgcttttcgttgtccgatcaatccaaatggcccatgtacgtggctgactcgcctcatacggcgggtagtgaatttttccaagatgaagagttcattgatcgttcggactttgacaccaactgcatggcagagatcacaccggaacggccattgaaggtgtttgatctaacccgacttgcccctcatctgagggtgcctgtaggtgatttgatggcgccaaaagcgacctatcccttgacgcaggaactggctaaagagatggcacaacatgcagacggtgtagagtatttgtccagacacacgggtaaaccgtgcctggcgatttggtctgacaaggaaaacggggatggcatcctgtcgactacgtcagtgacaccgctgagtcagtataagtaccagggcagaactgcaaagcagatcctgaaagccgaatgtaatataaggatagctggataa

SEQ ID NO: 103000 - DNA, 675 bp, Enterobacter aerogenes
atgacaaccctgaacatgaccaaatcggcccgtgctcaccggctcaaccctgagcacgttgaaaaagcgttgatccagtcgcgcatcgacaacgtaggcaaaaaatttgtcgatgcactcgataccgtggatgaaaataaattgctgtccctattaaccctttccgacgatgagttctggtcggaaattaaaatcatggcgctcactcagtcgctgataaataacatcagcaaggaaaaagaggagcaggaagattatgcagaagcccggcttgcttttttaaaaagcctggaaagatatggcggtgtgcataaatccactgccgtcaagaatatcttgggcgtgtctgtaccgacagtccacaaatacagcaaacagaataaactgatcgttctggactggggtgctgaaaaactctacccggtatttcagttctcggttgatgaaaaaaacagtgaaaatggcatgctcaaaggggtgccggaattattggcatgcatcacccataacgtgagcaatctgcgtaaatgtaacttttttacccgtcaggttgaaatgccaggtagcggtgagaaaaccagcgcactcaatattttacgccgtggcgctacggatgaagaaatggtgcacctgcgaattctggctgaaaacttcggtacccagaacgctgtgtaa

SEQ ID NO: 103001 - DNA, 639 bp, Enterobacter aerogenes
atgttttctccagacgatttggataaagatgaatgccctgtctactcatggatcaccattccgtttgacgatttcttcggtcctgaaagatatttacaggatgctattgatgacttgaattcagggaatgatagaagacattataataacgccatgagaaatgctaaatctgccctacatatgagagtggatatcctttgccatagtcttggcggagagtctttctttaaaaaattgagatcctttccacggaaaatggattttttagaaagtataggtattgtaagaccaaggataattttaaagataaataaaataaggaatgagttcgagcacgaatataaagacatcaccaaagaacaggctgaagattttgtggatatagttatgctgtttattgaggcaacaaaatatcttaatttcagatttcccaatgaaatatcttttcatggtatccctaataaatgtaatgatgaggttttagatagaatacagtgcaactactctaatggagaacttatgttttacttccaggatagtagcaatttatataacaagcattatgttgaacaatcattatccgtagaggataagctatataaagactgggtgaaatatataattacaaacaatgaataa

SEQ ID NO: 103002 - DNA, 1719 bp, Enterobacter aerogenes
atgcacgctatactatctcaatatattgaagatttatcgcatgaattcgaaattcagactaaagaagaatcaaaattattcgagtatttctgtaattatgttattacatcaaaatattttcttggaagatttaaccctatagatataacaacacaggaagacgatgcgtctttagatggcattgcaataattattgatggtgaattaataataagtgtagatgatgcaacgactgcgttcgaaacatataaaacatcattgcctgtagatattattattacacaagcaaaatcaggagagagttttttaaaggatgatatttcaaatttcaatcttgggttgcaagattttcttagcctggagccaaaacttccaaatgggatctacaatgggcaggcgatagaaatcataaaaataattgtggcaaatgtaaaaaaaattaaaaataaaatgccgaatttaaaagttttcttttgtactagtggtgtctataacaaagagagagaaatctcagcgagttttaaaatgctcgagagaacatgtgaaaatgctgatatattcaatgatattgaagttttccccatgggacgaaaggagttaatgaaactatggagttcaatatcagataaaaatgaagcttctcttcaactcattgactatatcggtataaatgagatgcccggaatcccacaggcttacatatctatagttaaagcaaaagaatttcttaaaaaaattgctatggatgatgaaggcaacatcagggaagaggttttcgatgaaaatgttcgtgcttttttggggggggataaccctgtaaatagggatatagcaaaaactcttcatagtgaaaaatcaaagcagtttgcagtcttaaataatggggtaacaattattgctcctgagatcgctatacaatcaaatacaaaagttatgcatctgacaaattatcagatcattaatggatgtcagacaactaatacactctatgagcattatgctgaccttgatgacagtgttgagcttgttgttaaatttatagagtcacagaatactgatgttgcaatagaagtggtgactgccaccaataatcagtctgctgttgaaaacgaatcattctatgctcttcgtgaaaaggcaagactaattcaaaagttttttgatattcaacggaacgatgaagcaaaagaaaaattattttttgaacgtcgtgaaaatgagtacagaaataaatccattcaaactacaaaaatttacgatatcaaagagttaactcgatgctttatttctgtttttaaaatgcgtccacatgatgcatcaagatatgtaaagaaagtactaaacacaagtgatattgttttcgatgaaagagacaatgaatgtgcttattattgcgcagcctatatttgttacaaattcaacacgctgatcaacggcaggaaaaatgatgcgcaaaaatataacaggcttcgttggcacgttgcaatgttatacccctgggttgttaatggtaaaatagacacgccagactcatcatctaaaaaaatcacaaaatattgtgacaaggttttaaaaactttactcaacgaagaatatattgagcattttaaaacttgtcagaaaattatagacagcattgaaatgccaacggatgatcaaataaaacgagggaaatacacatcagaacttaaggatgctgctgaatgtttctttaaatga

SEQ ID NO: 103003 - DNA, 183 bp, Enterobacter aerogenes
atgcaaagcaacattaaaaacgcaaagccttacgaaaactgcaaagttgttcacattatcatcacttcattactacgatatgagcaggctgcatacctcagtaaatatgatccgaccgctcgccgcagtaagcaggcgaacgaagtgagagtgcggcgaggaagcggaatgactacgggctga

SEQ ID NO: 103004 - DNA, 666 bp, Enterobacter aerogenes
atggtcccagccagcctcaggcatttatactgcaggtggggccatggtcccactcagcctcaggcatttatactgcaggtggggccatggtcccactcagcctcaggcatttatactgcaggtggggccatggtcccactcagcctcaggcatttatactgcaggtggggccatggtcccactcagcctcaggcatttatactgcaggtggggccatggtcccactcagcctcaggcatttatattgcaggtggggccatggtcccactcagcctcaggcatttatactgcaggtgggaccgtggtcccagtcagcctcaggcatttatactgcaggtgggaccgtggtcccagtcagcctcaggcatttatactgcaggtgggaccgtggtcccagtcagcctcaggcatttatactgcaggtgggaccgtggtcccagtcagcctcaggcatttatactgcaggtgggaccgtggtcccagtcagcctcaggcatttatactgcaggtgggaccgtggtcccagtcagcctcaggcatttatactgcaggtggaaccgtggtcccagtcagcctcaggtatttacactgcgggtgggaccgtggtcccagtcagcctcaggtattcacactgcaggtgggaccgtggtcccagtaaggccctga

SEQ ID NO: 103005 - DNA, 285 bp, Enterobacter aerogenes
atgaggaaaaaattaacatggtttttaatgttactggaattaagtctcgggattacactcattgcttacgggttagtgaagtatttctcacaatccaccgtatccgaaatctgcacagaggcatcattgtgttccacagacacaatgagttttttcaccttctggctctatctgactattggtgtgatgctgatatgtctgtggtatatgaccacctggcgcgcttaccagttcaaaatgaaagaaagggagtcgatactcgatcctggagacttcgtaaaataa

SEQ ID NO: 103006 - DNA, 285 bp, Enterobacter aerogenes
atgacatatatcgtcaaattcagggaggatgcactgaaggaatggaacaggctggacaagaccattcagcagcagtttgctaagaaactcaacaaatgctgcgaaaatccgcatatttctactgaaaaactacgagatataaaggatttctacaaaataaaactacagaattccggctatcgattggtctatcaggtgatggataatcaactcatcattgccattgttgctgccggtaaacggaattgtagcgatgtttatcaactgacaagtaaacgtatatga

SEQ ID NO: 103007 - DNA, 252 bp, Enterobacter aerogenes
atgccacatatccttctcagtgacattactgccagcatcagcgaacttaaaaaaaatccgatggccacagtcagcgccggcaatggatttcccgttgcgattcttaaccggaatcaacccactttctattgtgtgccagctgaactatacgaaaagatgcttggtgtgctggatgatcaggaactcattaaactggtcgctgagcgcagccatcaacacctgcttgatgtggatctggatgagtatctatga

SEQ ID NO: 103008 - DNA, 1536 bp, Enterobacter aerogenes
atggataataatactaaactttcaggatgttgcattctttttgccggaagtgtttccggttccactgaagactcacaaatagacaccgcacatacctttgtcactgcattcgtgagagaggccatttcagcgggagcgaattttgtcgcctattttgcggcagagcccgtcaatgaaaatcagaagccattgctgttcgactggacagtggcgagagctattaatgcccttttacctggagaaaatgaaaggcctcgtctgaaaataatcgcctcaccggaaaggttacagactaaagcaaacccggagcagcggcgtttactgaatggtatgattgcccgtggagtagcagaactttatccacttgaggaagaagttctgactggcgggaatgtgggtgatgagcaggtagtccatgccaccgcgatgattgctttaggcggcggtaaaggtgtttctgacagggccagaaagatggtcagaaagtcggctccggtcattccgctggatttgctactcggggcaaatagtgaagatggcgagggagctatcagtatacttaagtcatttaccaaggcgccgttaacgtatatgccattcaccggaaatactgtggtcagaaccctgtccgtactttctctccaggagcccgttcttgagcttcgggatattgcgaaacgtattgtggatattttgtacctggaagagcaggccagagtggccgctcttcccccggatgtccttgtgttgaccgcattacctgtagaactggcagcagtaaaacaggcactgggtattgcaccggaagcgtcgcctgtgacgatcggtacaggtttacacacctggaaagtaccggtgagtggcaggaacggaagaattaccagctgtatgcttgcctgtttttccggggctggaaatattgatgcctcaaccgtgacagcgacgcttcttaccgaattcaaaccacataatgttgtaatggtggggattgctgccggtatgcgcgataaatgtgcgcttgctgaggttgtcctgactgagcgtgtcgtggcttatgacggcaaggcggtactggaaggggggagggttgagtatcgtcctgagattacaaggctttccttccgtatcagacaagatctggccttctatttgtccgatgtttccgggttggaacagcgtctccatcgacattatgagcgaatggcgattgttcttccagaaaaagcggatgctggtcctgttgctgcaagtattattcccagactggctacagttgcgagcggtgaaagcctgattcgtgatcctgacaggtttcgtcagttgcgtgagcttcacggaaaggttgaaactgctgagatggaaggcgccggtgtttttgccgcatgtgaagcgcacaacaaaccggtactgatgattcgtggtatcagtgattttggtgattcaactaaagataatcgatttcatcagtgggctgcgcaaactgcggctgctgttactgtagattttatcgcttatggactcacactggagccgtga

SEQ ID NO: 103009 - DNA, 948 bp, Enterobacter aerogenes
atgtctctgacgaatacagacctccagtactacgacagcaatgtattgcgattatcacaggagaaaagaacggaataccacaagcaggtcgataacctggtgagtgagcttcgcaagcacgtcatcgcgcattctgagctaaaaattacgaaagtcgttaaggcaggctctttcgcaaaatataccgtgctgaagaaaacgacagaagatccaattgatgttgatgttgttttctacattggtggtcaaagcgtcgacaagtcgacatatgatggccttaatgcattgatccattccttattgataaaaatttacccgacaaaatcggtcgaggatttcgaaattcagagacgtgcggccacggtcacctttgttaaaagtgggttgagtgtcgacgtggttccggtcatacaggatgactcaaatccggaccatggctggcaatttgaccgcgaaagtggggcgaaaaacttgacctgtgcgccatgccacattcagtttgtccgtgacaggaagaatgaggataaacactaccgtacattggtacgtatggccaaacgctggaagaacttcaccaatccacctggtctgaagtctttccatattgagctgatactggcctatcttcttgatcgtgacggtcccactcaaaatattgaacaacgtttccgtgaatttttgggctacattgcccagactaagttagatgaacgtattgatttcccagaaaatcaggggaaaccatggaaagcattttctgatcctgttgtcatcatcgacccggctaatcatgagaataacgtcgcttcacgaattaccgtagatgagaagaacaaaatcactgagatagcccttagctcgtgggaaaccgcatactatgcttctgcccatggggaaaatgatatctggaaagaaatattcggtaatcgtttcaaaattaaggattaa

SEQ ID NO: 103010 - DNA, 498 bp, Enterobacter aerogenes
atgagttcatcttactcaaacactgaaaccagaacatacactgttgctgatgtagaaaaggttgttcgtagtattcaggcggatttgatgatgattgcaaacagctcgaaggcaatgaccgaggataaagcgaaagactatgctcatgatatcgaattactggcgaaaaaagagtatttaaatgttgttgatgtcacccttttgtctgctgccgggtatgagattaatgcggtcaaatatgattttttgtcagagggggcgtcaggtacagcaagatccgggggagtactctggcccgcaaccccatcagggagtattcgtattgtattgcactgcactgacgcatattttgaacaaaaagataaagtctccaaaatgccattaaaagtatcatggggagcaacatcagtagacacaaatcacagtactctctcggctagcggtggtcgtggatacagcagtaatggctatggcgctaacaggagcgatttttcatga

SEQ ID NO: 103011 - DNA, 897 bp, Enterobacter aerogenes
atgagcaattcaacggtttttgaagttaaaacagatttacctgctgctcagttcgacgcccttgcagacaaattgttgggctttgaatcacgatatttacgtgtgagaaagcagctacagctgttgttgcaggccgacaaacttgaatcatggagtcaaaaacaccacaaacgtatactgtcggttattgggctgcttagtgaccagtaccccctggcgatctttcatggtgacgttggcaccggaaagacagcaaatgcagaggctattgcaaaccgattagcgcgggatgcgaaaattgaagatgctattcttttcaaattaagcaacaaagtccgtggtactgggaaagtaggggaaatggggacattgatttcacaggcatttgatgaaataacccgttcaattggaaccggaaatgcacgtgcgtttctgatcatcgatgagggagattccctgggagcttctcgcagccaggagcacagccaccatgaggataaagtgggcgtgaatacgttgatccagtccattgataacctgcgtaaacacggcggccgcatctttgcgatactgtgcaccaatcgactcagtgcgttagatgcggctgtgttacggcgagcctccattgttgaagagtttcttcgcccatcggatgaagagcgggctgagctgtttatcagagacctctctgatatggggatttcatctgctgatgttgatcggctggtacgtgctaccgcacagcgggatggtaaacctgcatggacatattcagatatacgtacgcgtttgtatcccgcagctgttgcactggcattccctgatgctcctttaacgccggaacatttccatcaggctgctcttgttctgcaaccttctcctgtcatggcagggtga

SEQ ID NO: 103012 - DNA, 564 bp, Enterobacter aerogenes
atgagtaccaagaaagaaatttttatttcggtggatatcgagactgcaggtcctgtcgtcagtgaacatagtatgctgactctgggggcttgcctggtctatcagccggaggaaaccttctctgttatgcttcagcccgtgacggataaggttgatgaagccgctctggccgtgtcagggttaactcttgagaaggctaaagaagatggaattgctcccgcaatagcaatgaagcaattcgctgactggattgcgcaacatgtccctgaaggcgggatgcccgtgtttgttggtttgaatgcgccttttgactggtcatttgtgaattattattttctgaaatttctgggagaaaaccctttcggatttacggcgctggacatcaaagccttatttatgggagcaacagccagtacctggcaggagactaaatcgagttcgatagataaacgtgtctgcccaacgcttcagggaaatcacgatgcgctacaggatgcgaaatatcaggctgaactattcagattgatttatcttctgagtcgtaaaccacgatcagggatgtaa

SEQ ID NO: 103013 - DNA, 450 bp, Enterobacter aerogenes
atgaacgaagaattgaagtctgcaggtgatcatgcctggcgatattttgaactacatgcccgacagcgaatgacagtgtttaacttttatatcgccatcactgggcttctggctgctggtgtcggtttttccatgcagcaggggggaaaatatgtatatttatcttctgttatagggttatttatagtgttcatctcttttattttttggaagttggatgagcgggtatcgatgctgattaagagtggtgaggcaggcctcgagagatttgaaagagaattatcaattcaggagtgcagaatagtcaaaaatgatagcgataataacctgatgaataatgggttgcaatctgtttggagttatggacgttgctttcgtctagcattcttgattgtgggtgtatctggcctagttctttgtattcttcctgtcttgattttttgtttgtaa

SEQ ID NO: 103014 - DNA, 273 bp, Enterobacter aerogenes
atgaatgatagaactaagggttataatatgattgatgaattccacgtaatgtatatgtataaaaaaatccatgctgaagcggctacaactgatttaaaaaccttgaatcaactgttgaagaagttccgtaaggtagtagcggagcgccgtgaagaatactatctggaggttggtgagaaaagggcacaagagctaaggggcgagaggctacaaaaaatatggggggaaatgaaacgtgacagggttttaccagaagatcttattggcaggtaa

SEQ ID NO: 103015 - DNA, 351 bp, Enterobacter aerogenes
atgaaagagaaagtgttaaacagttatgataaaacaaaaaaccatcttatcgctaacatcttacaaggattctgtgatgagatatatactattcatgaagaagatcctgaaacagcaatctatattatgagttggggtaaactttcagaagttatttatgatgtagtgataactcgtgagataatgaaatattctattaaaaatgatgtgtctggtatcaataaaaatgatttaaaggatgaaatcttacattggcatcttgagcatatcattgaacttgtttcaagaaatataaatcaggatgaaaatcaagatcctgtttactggaagctgaaaatgacagttgtttga

SEQ ID NO: 103016 - DNA, 297 bp, Enterobacter aerogenes
atgtctaaagaaaaaattagtattaataaatcaaccgaactgttctatgaacttgcatgtagatcgtttgccgcaagctggaatatgttcatggaagttaatggtgatggtgacgccaatgactatctggatgacccggattttatgagtccatttattatccatgtgattaaccatattcagaataactttgaaagattcactgctcaaaaaggaaaccgtggtgatattaatcaggttaactttgaactggttgctgcgatgttagtagggtattcagaaaactttagaaagtaa

SEQ ID NO: 103017 - DNA, 315 bp, Enterobacter aerogenes
atgaataatcaaaaaacaaaagatatcaaagaatcatcgacaaaaacttttattgagatggcaaagtatttttatgtggctggaatgttgatatataaagagcaaggagaacatgagttggtcgcatctattatgttagataataatagaacggaatcgtatcttgcacatgttaaagattatctggctaagcgttttgatggacatatggaagaagcgggtaaaagagaaagactgatttatgttgatatggataaagttatattggaaatgaaaagtgtccatataaaagcattactttttggtatgagctaa

SEQ ID NO: 103018 - DNA, 213 bp, Enterobacter aerogenes
atgagaaatgaaatcgcaggaaaaacattaatccgtgtccctgaagttctgagaagagtcggatttagtcgaaccacaatgtatgagcttatcaaagaaggacggttcccggataaggtaatcataggggcaagatgtgtagcttttgtggaaagtgagattgatgcatggattgataatgccatttcaaactcgcgtgttaaacctaaataa

SEQ ID NO: 103019 - DNA, 894 bp, Enterobacter aerogenes
atgaaagccagcgacacaatgaaggctgttaagcagtggttcaagttaagcaactatgacgtccttcaagagataacagttaacgacctaagttatgaaatcagtcggcgtgtatcattgcaccgacatgattttactaaagaagaacattcccggcatgaacgctatctgggagaggaagccaagattttggctggtcatcctcttttagcgagttcgacagaaagaaccgcccctaccactaaaaagaaaaaccctttagtggatgcgcggctgcatgtcagacatatgaccgtcaacgacattagtcgctacgaggcacggctacgggaccttgagctacttcacagagtaggttactcatccgatgcaccgtcttcaccgatctcaaaagaggtgggggtgtggaagctgagagacatcgacgaatttgatggtgggcatccactgtatttgtggttaaacattaagtttctgactgacgatgaagtcattgagcatatcaaaagaatgcttcctcaatggcgaaaggagcataccgttggcgagccagcaattggctcgtttcggttcggactaagcactgtcaagaagatgatcaatctcagggttatcccaatgctggatctgctgctttgggcgaagcggaatgatgccaaaatctcttatgagcagttttcccgtctcctctaccctaacgactctgaagtcatcagaggcggctctcaaatcaaggataccgacaagccgtttgctgacaaggtgctcacgcgtgaatttgatcgtctgtttaacctctggctgagtaaaaacgattacatgatggataccaaggtagccgaagcgatgaagatgaacgaaaaagaagaggaagacgagagaaaagggaagtaa

SEQ ID NO: 103020 - DNA, 1050 bp, Enterobacter aerogenes
atgactccgaggtgtctggtaaacccgtggcgattcacaccacttcgaatcctgatttttaccgagatatctggtctgcttgcgcttgtttttccctggtatggttcgctgtatcataacgtgccggcgctactggtcgtgcagtgtatcgaagcgctactcagcggcataagttacccggcgctgacgttgttgttcaaacgtggattgcgccacgttgaactcccagctgcaacggctatggaaaccatcatttttgcctcacaggtgttgttggggaccggactgggtgttcttctgtttgaccggattgctgcgcagcatctgcttgccattgatgcccttagttttacggcatctacgattctgcttatgatgtctgccgctgctttttgcggagcagaacgttggccaacagaggctacgctggtcagacagaaatccctctggcgcgtcatttcacccttgcaaaaaagaagcattttgttgttacctgcgcttgccgctgtgggagctcccgcgatggcgcttttacctgcactggcacaagaaataagacctgaagattctgccgggctggccttgccgctactatttgcacgaagtcttggacagctttgcgggccgctgatgctggatgccagtaaattgcagcagtatgccgttaataacaggttgttgctgacctgtctgagtttatttattggaagctattttttattaccgctatctgccggatatccatacaccggactggttcttatcttcagtgcgcatatggcatcgaatattgtatttgctttgggtacgtttggtattttgaggaacttcccgcagacacaggttgcaaaagccagtgcgatgtcatggcgtgtgcaggtaatgaccgccactgttttcaccggtataaccagtacagtggcgcaatacttcggcgcattttatgcactttattgtatgtcgctgttcagtctcggagctgtcggagttttgctctggttaaacagggcgagggcactaaataaagtgaacctgcgccttcgagagtaa

SEQ ID NO: 103021 - DNA, 1119 bp, Enterobacter aerogenes
atgaatatgttaagttctgtcaccacttttcagcatgagcagacgcgaacaatttcgcctgagaacatgaccggagaaaagggtaaatcatgtatggctgctagccatctcggtccgggccgtaaagggagtggttttattcgaattcctgcaggtgaaagtattactattgcagatatcaaaggaccggcagaaatacgacacatgtggtttacgttgacagataaaactcatcgtggcagctttgtcttacgagacgttgtgatccgtatttactgggatgatgaaacagtcccttccgttgaatcgccgattggggactttttctgtaatggttttggtgcgcgctgcgatataaattcgttgccgataatagttaatccgacaggcgggtttaactcttatttccgaatgccttttaatcgctcagcaaagattgtgatcagcaatgagcacgaagcagatattgagcatttctttttcacaattaactatgcgttggtatcctctccatttactgaccctctctacttccatgcacagtggcgacgtcagcgtgttaccactcctggagaagattatgttttgctggataatgtgcaaggttacggatattacgtgggcacatatctggctctgaccgcgctggaacgatactggtggggtgaaggggagtttaaattttacgtggatggcgactctacctatccaacccaacattctaccggttctgaagattattttggtggggcctgggctttccatcagagaaacgatcttggccacgcatcagcacaatgttttcagacgctatatgttggttatccttggcagtcgaaacgggatcatacccgtgatttcttccagactggggatgctaacccggtacatggtttcggtgatgatgcattgcctatgcatgggctgtaccgctggcacttacccgaccctgtagcgtttcatgaagagattaaagtaactttccagcaaatgggcaatgatgacattcgactctatgaaagacaggatgacatcgcgacagtagcttactggtaccagagtccgggtaataaccaaaacccgaaattcccgaatcaacaacaacgtcttccgcgttga

SEQ ID NO: 103022 - DNA, 1260 bp, Enterobacter aerogenes
atgagcaatagagcattttatcgtaatccaaattattggttttcctcatgttacagcatggtttactatgccgcgggaagtttagttttttcattttatgcaatctggttgagtagccagattggacttagtgcacggcaaacaggtattgtttattctctgaacttcttcattgcattaatcattatgtttatctatggagtagttcaggacaagcttgttttaaagaaaaatttagtctggttccaaagccttataattacatgtgcagctcctttcctcattaacgtttatgaacccttactccgcgaccatttttatataggagtagtgacggggagtgtatatcttggtctgggatgggtagccggtatggggcttattgactcctattgtgagaaaataagtagagcatttggttttgaatttggtcaggcccgtacctgggggagtatagcctacgctgctggaaccttacttgcaggaatactcattgctaaaaatcctcaccttaatttttgggccgcttctgttgtaggtattctgtttatcatcctgaatttcacctttaaaccggatatgtcacactacagttcagcgctaatgaaggtaaatgatcctttaacctttcatgagatcatggctgtttttcgattgaaagacttttgggttttcgttgtttacgttcttggcacatacagtttgtataatatttatgatcagcaactgtttcctgtctattttactcaccttttcggaaatgaaggtgaaggctataaaatttatggcgtgttgaattcattgcaggttttcctggaagcaggggtgatgtttacggtgccattcatcgttaaccgtgttggcgcgaaaaacgcattgatatttgcagcctgtatttctgctgcaagaatccttatgacaggatacacaagctctcttgtttttatttcgattataaaattaatgcattgcatggagattactactgtcctggttgcagtttttaaatatatcgcgattaattttgaccgtcgattatcagcgacagtctttctggttggatatcaagttgctggttctgttggggttatcctgttctcaactgttgcaggaaatttttatgataaggtcggtccagcgaccacctttaaaggtttgggattgattgttgttatcttcatgatattcgctgcaatattcctcaacagtgaaaaaaagagccaggtaaaaataaaaactaacgatacttcttttagctaa

SEQ ID NO: 103023 - DNA, 327 bp, Enterobacter aerogenes
atgctggctaacacaattgattatggagaatggaaattcggaattcgaaacgatggcttagtctacagtggcggcagtttcagtgccatccttggtagcggcattgcttctagaggcattggttggatccttggtatggccggatacatacctggcaatgtaactactcaaccgattattgttctctttacattacaaatcctatttatctacgtcccaatcattttgagtgcattatctctttttttattacgactctacaccctggagaaaatatacccatcgataataaaagatctttctttgcgcactgaaaatatttattga

SEQ ID NO: 103024 - DNA, 276 bp, Enterobacter aerogenes
atggctaaggttgatgcaagatgcccgttttgtgagcaaacggctgcggtaaaaaagcatggtctgggaagtgcaggccaccaacgttatcgctgtcaggcgtgttgtcgtagttttcaacttgattatgcgtatcgcgcctgccagcccggaatgaaagaaaaaattgttgacctcgcgatgaacaatgccggtattcgtgatactgcccgtgcgcttcatatcagcattaatgccgttgtgcgcacgttaaaaaactctcgccgcgatgtgtaa

SEQ ID NO: 103025 - DNA, 999 bp, Enterobacter aerogenes
atggcaaaaaaaataaatttcagccgtattgccgagttagctggcgtgtctacgacaaccgtcagtcatatatttaatggtaatgccgaacgacatcgtatttctgatatcacaaagaaaaaagtattagccattgcaacacaatttgctgatcaagaacatatacgcagagcgataataagggcatctttaactagaaccatcggtgtaattgtacctgacatgtctaatttcagttttgcgatgtttctgcacaaacttgaaatgatatccagtcaccaaggtatacaaattatcatatcttgtagccattacaacccagctcaggaggtcaatgctattaataatcttttggaacgaaaagttgatggtattattaccataacatcgttagatgatgatgtgctctattcaaaggtaagcatcaaaacgcctgttctattatacgatcgttttatttctcatagtcaattaccttttgtctcttgtgagtcaatttgttcagttacaaaacttatatctgaaaaagctaaactatttgatgagttctggtttttaggcggtgatattcaaatatcaactatcagagagcggctgattggtttcagaaaaggcttaaaaaaagcaggcctaaaactaaataaagaatggattgtctatgataagtatcatgagaatcttggttaccatttgatggagaaaataaccaaaaaaattggacgattaccaaaggctatatttacaccgtctggaaacttgttggaaggagttttgttatatttgaaggataataaagttgcacaaaatgagatttatctttgctcttatgattacaatatgtaccacgatttccttttttatgatgttgatattttatcacaagattatgaacaacttgccagacactgttttataaatattcagcaccttattaataaacatgctgttgagcatagaataacaagggtccctcctaaattaattgtatcttcaagataa

SEQ ID NO: 103026 - DNA, 2346 bp, Enterobacter aerogenes
atgatcaactccaagtctttaactgacacttatgatgttggtttgcttgataatcagtttgatacaccatttgctgctctaagtgcggttaaaccatttattattattgatgaacctcataagttccctacagctaaaaaaacatgggaaaatattgagaaattcaatgctcaatatattattcgttatggcgcaacctttagtgaaggctataaaaacttagtttatcgtctaacagccgtagatgcatttaatgaagatcttgttaaaggtattgatgcttacattgaagatcttgttggtgatggtagcgccaacctcaagttcgtaaaatctgacggtaaagaagccatttttgagcttaccgaaaatggtaataaaaaaacgttcaagttagcaaaagatgaatcgctaacgaaaacacatagcgcaattcatgatttaacactcgatgcgttaaataaaagcactgcagtgctgagtaatggtattgaactaaaaattggtaattcaataaaccctttctcttacgatcagacactcgctgataacatgatgcttaaagctgtcaaagaacactttaagttagaaaaagagtatctgacacaaaggccacgtataaagcctctaactcttttcttcattgatgacattgaaggctatcgtgatggtaatgatattgccggaagcctgaaaaccaagtttgaagaatacgttttggcagaagctaataaactgttaaaaacagaaaaagacgaattttatagaaactaccttgaaaaaactgttcaggatgtatcttctgttcatggtggctatttttcaaaagataacagcgacaaagatgataaaattgagcaggaaatcaacgaaattcttcatgacaaagagcttttattatctctagagaatcctcgccgtttcattttctctaaatggacgttgagagaaggctgggataacccaaatgtctttcagatttgtaagctccgttcgagcggtagcaccacatctaaacttcaagaggtagggcgtggtttacgtcttcctgtgaatgaatacatgtgccgtgttaaagaccgcaactttacactcaactattatgttgattttacggaaaaagattttgttgattctcttgtcaaagaggttaacgatagctctttcaaagaaactataccaagtaagtttactcaagagcttaaggataaaatcttatctcagtatcctgaactttcatccagaacactgatgaatgaaatttttgatgctgaaatcatcgatgagaatgaaaactttaaagattctggtgcctatgctcgattaaaagataaatatccagcagcatttcctaccggcgttaaaccaaacaaaatcaaaaaatccactgatggtaaaaaacgtactaaaatgcgtgttggcaaattcagtgaactgaaagaactgtgggatttgatcaatcaaaaagctgtgattgagtataaaataaatagcgagagtgaattcttatcaatattcaagtcgttcatgctcgaagaaaaagataggtttactaaatcaggcgttcatactcgcattgataggatttatatccataatgatacggcaatgtcgaaaatcataattagtgatgatgataactttgctaaactgaacacaatgagttatcgagaatttattgataaattatcacaaacaatgtttgctaaacatgataccttgcataaggttttttgtgatataaaagacactatcaatatcactgactacctgaacattcaaactatcagaaagattaaatctggctttagcaagtatttgttgaacaattcgtttaacaagttcagtcttggctacaatgtgatatcaagctctattcatcctacaaagttgactaatgcagatggtaatcctttaaatgaggtattatcaagtgatcttggtgtattgcaggataatacaaaatcaccattggattcttatctttttgaagaagtattttatgactcagagcttgaacggctcaacataacagatggagagatccaatctgtagctgtcttcacaaagataccgaagaactccattaagatcccggttgcgggtggctatacatattctcctgactttgcttacgttgttaaaaccaccaaaggtgattatctaaactttatcattgaaacaaaaaatgtagatggtaaggacagcttacggcttgaagaacaacgcaaaattgaacatgctcaggcactgttcaatcaaataagtaagacggtcaatgttgagtttaaaacacagtttgctgatgatagcattgctaatttaattaagagtagcattcattaa

SEQ ID NO: 103027 - DNA, 549 bp, Enterobacter aerogenes
atgaacaaacaaattaaaaaagggatctccctgttagaactcgtattggttcttgggattatatctgtattagtggttgcagcatttatcgtttaccctaaagtacaagcttcacagcgtgcacaggcagaaagtaataatatagccactattcaggcaggtgttaaatcgttatatacttcagcatcaagttttactggtctttcaaacactgtggcagttcaggctaagattttcccggataatatgttgagtggctctgagtcagcagtgaagccaattaatgcatttaaaggtgatgttatattgggaactgcagcaactggtccatcaaaagtccccggctcttcttttaatattacatattctaatgtgcctgcagcggaatgtaccaaaatagtaactgcagccgcaggaaatttctatgaggttggcgtaggagtcgcggcgaatgtgaaagcagcaggtgatgtgctggatgtggctaaaacggctacgcagtgttcagcaggtggtaatagcaatactcttatattcacagcgatttga

SEQ ID NO: 103028 - DNA, 399 bp, Enterobacter aerogenes
atgactgacgctattaaagctcttaataacatccgtacccttcgcgctcaggcacgagaaacagatctcgctactctggaagagatactcgaaaaattaacagctattgtcgaggataaacgccaagaagagacaatcgcacagcaacaaaatgctgaacgtcagggaaaaatcgaagccctgcgtgcacaactgcttgaagatggcattgacccgtctgagctgctgggtaatgttaaatcttcacgtcctactactgttcgtgctcctcgtcctgcaaaatacaaatacattgatgaaaatggcgatgaaaagacatggacgggtcagggacgtacaccaaaagtgattgcagctgcacttcaaagcggtaaggttctggaagattttgccatttga

SEQ ID NO: 103029 - DNA, 354 bp, Enterobacter aerogenes
atgaatgataatgaaataaaaaacacctatctgactggcaatgtttttcagaatgatagaaacagaccggaaattaagaaaacacttgagcagaaaattgctggagcgcaaaataaattaaattacctcaaagcaaaagaaaaaagagacagcaaaaaagaaaacacgcgacaaaaaataattcttggtgcagaggttgccaaggttttaaactgtgatataagtgaggtagataagcaattactctttggtttgttgttagaagttccatctttgcatacgcacgatatcgaacggtataaaataaatggacaaatctacattgaaagagttctcaagaaattcagaccataa

SEQ ID NO: 103030 - DNA, 252 bp, Enterobacter aerogenes
atgtataaaaataacgatgaagccatcgatcttgaagcaaaacgattacttgataatggaatctataccgatctggaaaaagcgtatagagaagcagaaaagataatcacagaagtaagagttgaatttaaaaagaaacaggaaaagaaacagttccgttcccggattaaatcaatcaaacgagcactttcagatgatgagttcagaagtaatattccttacaatcataggcatcagtggagaaaagaatga

SEQ ID NO: 103031 - DNA, 1122 bp, Enterobacter aerogenes
atgacaaagttcgttgctattaaaattcattacgaccatagaaaatcacttaccccatacttgaaatactcgaaagcaccaacacatgaagaatatgcagagtatcttgaccttttccatgatgaaggtattggcggggcaggttttcatgaatgtatgaactttacagttagcgaagacacacccacaaaaatttatctaccacctacttgcatacccggtgaaaaatatcacgatgaagagattgtatttttctctttcacttacaaatatgataaggaaatgccatccagcataattggtgttcatgctggagcaagactcatatctaatggtaaagattccattgttcgtaatgatattgaaacagtagaaggtgctgaacagttccactatcatgctgaagcgccaagtgaatttaccacattaattactcctcccataaaatacgatttcaaggatggcatttatactcctgaatacgcatcttggggctatggattacgctacataaccgaagagcatgctgctaacattatagatgcagctcttttaggtgcaaaaaaaagattgtcagcatcatcagtttccgaatccattatcttagagcgtgaaatatctgttctagaagctatacaaagaagatattcccttccctcatcacaaattaatttacaactagaaaaaacaaacaagtcgaactcaggatggaataatactcttccagataaaatgattggttttttaggtgaacaatttgtctatgaacaagaagttgattacgctattaaaagtggcattccagtaagtgaagttgaatgggtatcacaatccgacccacaatcgccatacgatattaaaacagtacgtataactccatatggcaggcaagaacatttcattgaggtaaagtcaagccggtgcataaatgaaagcaatatttatatatcttcacgccaagttaatttttttcaaagacatgaatcctgttccactctcaaatttgttacttttatttccaacactcaagttgatacagtccgtgagtatactttgaaagagcttatgaacgagtttgagttagtccctataaaattcaaattacagagtttaaaaagataa

SEQ ID NO: 103032 - DNA, 153 bp, Enterobacter aerogenes
atggcgataaaaaataaagcaatgcccacttacgcattatcgcttcgctctaatgccgtggggtctaccgacggttgcctgccgcaggctaaaaccgtttccttcggaaacaaaatcaaggtcaacgtcaaccccggcgttttccttacgtaa

SEQ ID NO: 103033 - DNA, 1404 bp, Enterobacter aerogenes
atggcgatatacagttttaaaatggagaacatcagcagaggcgaaggtcagtcttcagttaactctgctgcatatcgtcaccgtaaagttttcttcgataacagaacaggtgaagtttgtggtcgcaaaacagcacataaaaaggatcttgcctttgcgcagatttttgcgcctgaacatacccctcctgccctgattgttgacagtgaaacactctggaatgctgttgaagcatcagagaagagaaaagatgcccgtcttgccaaagagtttaaaattgccctccccgctgagctaacaccagaacagagcattgaactcactgcagcttttgtttttgagcactttaccaagcaaggcatcatagccgatgttgttatccacgatatcaatggtcataacccgcatatccatattatgggaacaacccgtgaagttctttctaccggctttggtaaaaaggtccgtgagtgggataagcctgaaaccctcgatagctggcgtaaaggctggcagaacatctgtaatgagtttcttgagctgtatggtcacgatgaacgcgttgatcaccgttctatcagggttcagtatgaggaagccatagaacaagctaccgctgccgctacaaacgaagagaaagcaatctggctggctaaagctattgaaacaaaccgcgatccaatacttcatattcctcgtgaccgctggggaactgtagccgctcaggaacaacgtgctgcagagcaagctatacgtgatgagcttaaaaaagaagctggcgaagcctactttgcctttaaggatctgccattagatatcgttgttgatgttgccagctttagggttcatgcactggctgaacctgaagaaattgttatcccggataataccgggagagcttcatctacaggctcgcagaaaccagttctggttgctcctgcgcctcatacacgcactacactgaaaaccccatcctcttcaacggctggagcacttaaacgcgctcctgttaaagttaagaggaagaaagttgaacctcgtcagactggcgtattcaagcgtttcacgctgttggtagtcggatacataaaagagaaattcgtctgggccagaaagaaaccagcccctgtttcagtcgatgctgaacacgataagcgtatagcagaaaactatgtcttcgatgaggttcagggcatctatgtgccacgcgctgagcatgaaagacgtgccagatttaacagtgacacttatagtccaacacctgatgagatcaggcgttttccaagtcgtccacacatatccgaacgaacaaatatcactcaggactatatatctacacattcgaatgacatgaaaaaaactctaacacagttgaaacctccatttatctctcgaaaccggtaa

SEQ ID NO: 103034 - DNA, 1218 bp, Enterobacter aerogenes
atgaaatcttatattaaaacaaccattcaaaactcattatattataacacacctaacaatctcagatcttattgggctggtatttatctatccgtgctagaatcaatggtttatcaaaacaacatcaagactgggtttcataaattagcaaaagaaaaaaaaccattaacacttgcatcactaaaaggaaatacagacattactgatttaaactatatatttaatacaacattaaaaaaccatagctttgagtatttattgagaaatttatttaatggtgggttttgtgattcgctctttgagtcaattgtgttttctatcgctgatcattatgacttcgaggcacacaataacttgcgttattatcttttcggccaagactccataactgatgatttaccgctggataattttaactataaaataccaacccataatggttggataaaagacaaatccaaaattaaagaaatgatcaggcattgtgatgttgggatagagttatttaaaccattctcgcaagaaagaatattaatccttggcgaagtggaaggtcttaatggtcaaaaacttctaactgaaagctactggataaatgataaaaaagctttgtctgacaatcgatactatcattttggtattggaattactcctacaaacgtcgatcttaaaactgccaatgaaataccaaagcaccagataaacaaacaccttttgtcaatctcaaaatatcaaatcaccgtttacactttcgatcaaataaccaatttacctaaagatatagaatatgcaattgaagatattaaaaaaatattctccgatggaaaatcacaaccagtaaactctttattcaacaatgatttttatactagcctgaaggatatcactcaactaattattgactattggaatgaagacattagaaaccttctatttattttacgaggaatctgtggtgacgctaacaatagtgatagtaatttaacaacgatttcccttagtattcagcatataggcgaaggttttggcattacatgcaaacatggcttttatatgaccttccctccccttactgcaactgagcgtctcataaatctctcaaaaacgtatgagaaaagtaatagaagagataaaaaagcaaacgacacgaatgagaacattgaaataagttctatattcacaggaaatataaccctacctcaggaaaggaaaaaataa

SEQ ID NO: 103035 - DNA, 552 bp, Enterobacter aerogenes
atgaagaagattttgctcgttgctggcacagcacttgttctggcgggatgcggtgaaaaaggcgactttgagaaagcgatcaacgcgaaaatatcacagtcaaagctgtgctactcactgcaggacaatgacgttgtattcaacaaaggttttccaattaaggttaaccgtggctaccgctctgccggatacagtgccagtgatgaaatcctgaaaggacttgttgaacaggggctgctcactgtttcacaacaggcaaatggctttagcaatgttgatgttctggaagtaacagataaaggccaagaggttgagttttgggaccgtgagaatggtgcctgtgtcggtcatcgggaagtttctgagatcaaggaatggaccgaaccgggaaacggtaatcagaaagttgttcgagtgtcctatacatggaagttggcggatgttccttcatgggtagacaaaaaagcgttctccagcgtcaagggcatgaatgaacctgaagagagcatgattaatcttgttaaaaccagcaatggctggaaagcgatctaa

SEQ ID NO: 103036 - DNA, 378 bp, Enterobacter aerogenes
atgaaaaaattgtttatcgcggcactgatgatcctgccccttaccgcttgcacgacttatggcaataaatccctgaaagacgaatcccaacaaaccgtaaaaaccaaaatcgttaaagggaaaactacccagcaagatattattaacgcattcggggaaccacaaacgcgagctaccaatgacggtcaggaaatgtggtcctactccagcatgtcaggcgaaagccagatctcgaactacatccccggtctggccctactgaagaacagcaacacggctcacatgaactcccttgatatctggttcaaggggaatgttgttgaccgatataatttcagtcagacggcgagtaaggtttcgcgtgggttgttggattaa

SEQ ID NO: 103037 - DNA, 822 bp, Enterobacter aerogenes
gtgggaaaacaaactaatcaccatttcattccagcctgttaccttaaaggttttaccaatgatggggatagggattccagactttgggctttcccgaaaaatggggtgaaaaaggcatatggaacaaatcctaataatgcttgttcaaaaaataattattataaacttgaaaataacacgaaaccgttactaatagaaaaatggtatggggatgttattgaacctaaaattggaagtttccttgatgatttaaaatcaaatatgactcttgatagaaataatgaaggatttatctggttattatcctcacttttcttgagaccccccctatggaggaataacgttgaatatccacttaggagatgtaaagaaatagcgataagcatgaaaaatgacattgatgctgctggaggaaatttagatatttctaatgccaattttataaaggatgatattatttgcattgagctagagcagataaaaacagttgctaatagtttattttatttcaattttaagttatgtacaacccaagataatataaatataatcacaagcgactccccgtttgttttagctaatcctgacagaaaaacttttggtttattatcaacaggaactatattacttatccctataaataaagacatgtacattgtaggaacgaaagacataccattaaatggaacacattacgctagcaaatatgatgttgctaacattaacactattatatggaacgcttctgaagaaagagtgttttcaaataacgataaattcatcatgttagatgatgatgataatattatttattatccgtag

SEQ ID NO: 103038 - DNA, 918 bp, Enterobacter aerogenes
ttggacattcagattactcctgtcttgattacgttagtttatgaggctcttttgagatcattttggcgaaaacctgcgttgaaaaaatttttgctatcttgccatatctcagaaagttttatatcaacatggcgtgaggatgaatcaaagcggaattttttagaccgcttattcccaaaattgcagagtaatcctaaagggaatagtgttatttttacaatggcaattaatttgtctgagcaaatatcatttcctgatttaagggggtgggaggactctcagcaaatgatattatcggcaaataaatcagttcaagagttaagggtatatatctcaaaacagaaagagaaagctcaaaatgagagagaaaaaaaagaatatagagaccggacgaaaaaagaaagggaagaagtaaaacgttctgaaactgatttactaaaattaagatcagagtttgaaaatttgcataaagacattggaacacaaaatggcggttatgcatttgaagaatggttttttaggcttactgatttctgtgagataattagcagaaaaccatacaaaactaatggtaggcaggtggatggtgcgttaactattgagggaactacatatatagttgagttgaagttccaaaaatcacagtctaatgctatagatattgacactttgaaagcaaaagttaacaaaatggcagacaatactatggcaataatgatatcgatttctggatattcatcagttgctataaatgagtcatctggtagtcgcaccccacttatattgctagattatagccatttgtatttgttcttatctggtggtatgaaatttgacgatataatttcacgagtaagaagacattcatcacaaacaggggaagcatatcttgctattagctcttttggtggactttaa

SEQ ID NO: 103039 - DNA, 189 bp, Enterobacter aerogenes
atgaggcgttatctcttgctgttgataggcttaaaatcacgcttgcgatacatgagtgatcgtaactatctgtttttgatgttttttcaatcactcttgttggtaatttgtttttactactacttgcccagcattgagtttttcatagcgaagtatcatggtaaaattctgtcatctatttataaatag

SEQ ID NO: 103040 - DNA, 627 bp, Enterobacter aerogenes
atgacctgcatagttaaagatgttgaagagaatgaacacgggataaaacttactctcgaaaacggaaataacatttatttcaaagattacgactattacttcttatcagaatctgtaaatgattgtgatagggaacgaatggtaaatgtttatgggagattaatatctgaactcagccaagtcagcgaagaaacaataagatcactgatgtcagaaacccaaacctacaacagtcagcatcccaacacgcccgttagtgttctggatgattactattactgtggcagggtgaaagtcaatgcaccagatgaagccgcattgatgaatgcgcttggcctgctagatctgcgtaaggccatagccgaagataactccttatccgaagtggaagcccttggcggtatcgtacttcacgctgacatgggctatccagtagctgaatacaaaggtacagacatcagaatagctatagaaccgatataccttacacatatgagagatctgaccaatggctatgtggtaatgttcaggaatggtgagtatgagcaggagatgaaaggagacctccatgaggcgttatctcttgctgttgataggcttaaaatcacgcttgcgatacatgagtga

SEQ ID NO: 103041 - DNA, 765 bp, Enterobacter aerogenes
atgaatgaaatagaagttgatttagatttaggattaaatcctttttgctttgagacagagataaagattgaaacaagaaagaagaacctgactgtttcaagggggacagaacttattgaaaggaaggataccagcaaaacctattttgccaatatcgtacatacacaagaggtcgataaagaagagttcattaaactctatacttcacagataaaagcgtattttgatctaacgaaaacagcttacaaagttttttttatctttttacgaatatatcaggatgcaataggaaaagatcacttttacctgagttgtaaaaaagccatgtcgcttgcagaaaagatagatcacttcatcttgtctgaatctatcttttacagagggataaaagaactcattgaaaaacgtattattgctaaaaccaatgaaaaaaactggtattttataaaccctgctattgtcttcaatggtgatcgtgctcgctttgtttcagagattataaaaaagaaagaaataatggaagaacaacccgaaagcgttgtcagcactgaccgaagaaataaaaatattaaagaaaaagatagatcaattgagtcagtcatagaagacgtaaatagccaagaagatatagatttgttaatcgcaagattacaggctaaaaagcaccaaggagcgatgatgagtaaaagcatgggaggatgtatcgctgtcgaggcagcaactcttttaccaccagaagaaccgttagattgggataatatttaa

SEQ ID NO: 103042 - DNA, 429 bp, Enterobacter aerogenes
atgagcaacattaccatctatcacaacccggcctgtggcacctcacgcaacacgctggagatgatccgtaacagcggcaacgaaccgacgataatttattatctcgatacgcccccgacccacgatgagcttattaaacttatttcagatatgggaattacggtacgtgcattgctgcgcaagaatgttgaaccttatgaacagcttggtcttgctgatggtaagtttaccgatgagcaattaatcgggtttatgctggaacatcctattctgattaatcgccctatcgtagtaacccccctgggaactcgtctgtgtcgtccttcagaagttgtactggatattatcccggagtctcagaaaggtgcatttactaaagaggacggtgaaagagttgttgatgagagcgggaagaaagtgaacctataa

SEQ ID NO: 103043 - DNA, 780 bp, Enterobacter aerogenes
atgaaagagatctgttccgcagattcgtcaacatttaaacatgtgcgttttgttctcacagacatggatgaaacgctcacttacaaggggcgtcttgcggctgaaacctatatggcgttggaacggttgcagaacgcgggagtcaaagtgataccggtcacagccgcgccagccggctggtgcgaccagatggcaaggatgtggccagttgatggtgtcattggtgaaaatgggggggtgtttttcagaaggcgtaatgacggccatggtattgaacgtttcttctggcacggcacagaaaaatatcctgacgtcgctgagcgcctgatgcaaattggagagcagataaaaagggaaattcctgccgctcattttgccgacgatcaacctttcaggatgacgtccattgcctttgctaaaccgccagaagcctatcagtgttcattaatacttaacgcattgacgcaagcaggtgcgacaaccaccgtaaacaatctctggattcttggttggtctggagagtacgacaagttatctatggcccgacgagtgctcagggattattacgatctcgacattgatgccgaacgttctgccgtattgtatagcggcgactcgacgaatgatgcgccgatgttttcattctttgaacatacggtgggagtgagcacggtatcagatttccttgatcaaatcccgaaacctccacagtggatcacccgtggcccgggaggtgctggttttgtggaaattgcagatgcggtaattgccgccagataa

SEQ ID NO: 103044 - DNA, 795 bp, Enterobacter aerogenes
atgagtttacgccaggcctgcaggacgttatcgctgagcaggacggtgtatttttatcagcccgatacccggcgtgatgaaccggtgatccatgcgctgactgaactggcagaacactatccgcgctacggttttaagaagctgttccagctgctgcgcaggcagggcaatacctggaaccacaaacgcgttcaccggatttactgtctgctgaaactgaattttcgtcgtaagggaaaacagcgactgccagtgcttaatccagcgccactggcgacgccgcaagcgttaaaccagagctggtccatcgattttatgcacgacgccctggtctgcggcagacgattccggaccttcaatgtggtggatgattttaaccgtgaagcactggcgatagaaatcgacctgaatatcccggctcagcgagtcatccgggggctggacaggatcgtggcaaaccgcggctacccgctgaaaatgtggatggacaacgggccagaactggtctcgctggcgctggcacaatgggccgaagaacacggcgtgatgctcgaatttatcaagccggggaagcctacacaaaatgcttttatcgaacggttcaaccggacataccggacagaaatcctggatttttacctgttcagaacactgaatgaagtacgggaaattacagagcgctggctgatggaatataacaacgagcggcctcatgaatccctgaacaacctgacgccggaagagtaccggctgatggctgaaaaaacggaactctcaaaaagtgcgtggaactaa

SEQ ID NO: 103045 - DNA, 867 bp, Enterobacter aerogenes
atgaaaaatgtagcgtctaaaagtgtagcaaagccaggtgcagatttcactattttcaaattcggtgaaagtgaaattcgtgttatctccaaatctggagagccatggtttgtggcggcggatatttgcaaagcacttcaaattggaaatccaaccaaagcgatcaagaacttggatgatgatgaaaaagccctaactttaattcagggcttgagtaggggtaacgaagagggaaacatcgtcagcgaatcgggcatgtatactctcgtcctgcgctgccgtgatgccgttaacaaagggaccattcctcacaagtttcgcaagtgggttactgctgaagtattaccctccattcgcaagcatggcgaatatgtgaaagggagcaaaacaacggtagaagaacgcacccctttgcgtgatgcagttaatttactggttggcaagaaagggctccgttacgatgacgcctacaatatgattcatcagcgctttagcgttgatagcatagatgaacttggtcttgaccagatacctgtagccgttgagtatgtccatcgaattgctttagagggtgagctgcttgataagcaagaacaatctccagtgatgccgacgatcccaatttccgcaaacggtgaggtcatattcaccttccgtgatgggtacatagtctcagcaacggcagtaaaacctaacgagtttctgacgagccttgaggggcatactgaaatgctgcttcgtcgtgggtatgttgtatgccaccacaaaaagctcagaacggcccagatagatttcatagggcagatgtgcgacgagtctgcaaggcttgaggctgagtggacgttggcgaatagaaatcaccgataa

SEQ ID NO: 103046 - DNA, 168 bp, Enterobacter aerogenes
atgaaaaaaaccaacagaaatcctcaagtcaatatcaggatgcctgatgacctaaaaaaatcactgaaggagattgcagaagagaaagatagatcactgaactatgtaattgttcaggcattaaaggagtttgccactaaatgtagtgaagccccggtggtgctgtaa

SEQ ID NO: 103047 - DNA, 297 bp, Enterobacter aerogenes
atggtgtctgcaaaaggtatgcagtgcggcccgtttcgtctagaagccgccaatgacggtttcatgcatatcaacggacagaagcctgaaactcaaaaaatgacctttctgaagcaaaaggatgattacgataacctcaaaatgcagtggatgatgcccgacaagcagacggggagatggttggggtttgattacatcaaacgtaacaacaaagccattcttaacgtcgagggaattcgtatgaatatggacgagcctcgcgtttttgggacctacgactgtgtgaaggtaaagtaa

SEQ ID NO: 103048 - DNA, 234 bp, Enterobacter aerogenes
atgacggaaatctcactcgcctggctgctgacaaaagtcacgtcacctgtcgtaggggccacaaaaaaagatcacgtcgatggcgcggtaaacgccgtaaatcttcaactgagcccggaggaaatccggtttctggaagaaacctaccagccgcacgttctgacggggatcatggcgcaaaacacgccgaaaactaaagacgttaagcaggtctggacgcgtagcaaacagtaa

SEQ ID NO: 103049 - DNA, 189 bp, Enterobacter aerogenes
atgtcaaaggatatgatattttttaattctattctggttttaatattgatgtttgttagcaaaattctcatttttgaacttgctacgacatcggcggagaacaatatctactctttctgccatcattttaggtggttgcgcaatatttttgtatggtggttttatcaactactctttttggatacttaa

SEQ ID NO: 103050 - DNA, 942 bp, Enterobacter aerogenes
atgagcaacgatatcgcaaacatcaatgcgccagtagacaccgcaatcgctggcactgctgcgacaattttcagtccagagggtttgaaccaactgatgaaattcgcagaagtaatggcgcaaagccgcgtaacggtaccagctcacctcgccggaaagcctgctgattgcatggccgtggcaatgcaagctgctcagtggggaatgaatccattcgccgtcgcgcaaaaaactcatgtcgtcagcggaactctcggttatgaagcccagctggtaaatgcggttatcactacgatgtcgccaacaaaagaccgtatcaactatgagtggtttgggccgtgggaaaacgtgatcggcaagtttgtagagaaaacatcccagaaaggaaacatatacattgcgccggcatggacattgaaagatgaagcaggttgcggtgttcgcgtatgggcgaccatgaagggagaagaacaccctagagtgcttgagttaatgctttctcaagcacaggtaagaaactccacgctttgggctagcgatcctaaacaacaacttgcatacctggcaaccaagcgctggtcacgcctgcactgccctgacgtaatcatgggcgtgtatacaccggatgagttgcaggaagcgcagccgcgcgttgagcgtgacattaccccagcaccggcaactgcgtcaggcatgaacaaactgatcaacacgaagccagagcagagccaggaagagcgacagcgcaaagcagatgaccgtgatcctgatgaaatgctgacagcattcactgatgcagcaatgaactacaacaccattgctgatctggataaggcatacaaatacgttgcaaaaaacctcgccaatgatgatgagcgcctggcgaaagcaacggacgtgtacaccatccgacgcgacgaacttaacgaaattccgatgtaa

SEQ ID NO: 103051 - DNA, 153 bp, Enterobacter aerogenes
atgaaaacagcacattacttcgcaagccgctcagccaaattcctggtgattggcatcaacggcagggtcaccgatgagcgctacgaagttagcggaaaagctgaggccaggaagctagctgctgaattatcggcgaaagcctggaacttctga

SEQ ID NO: 103052 - DNA, 210 bp, Enterobacter aerogenes
atgagcaagccaaccgacgaagaaatcatccaagtgctgagcgatcgcggtaactgcatgacctatttcgttaccaacgttctccgccataaatactggcctctaagtacggcatatgtattgcgccgcctgaagaagctggagtcagccgggaaggttcagcgtgttaaaagcacttacataactcaaatttgctgggggttggcatga

SEQ ID NO: 103053 - DNA, 396 bp, Enterobacter aerogenes
atgacaactgatatcaccgaactggcgcagagcctgaaagcggcagcagagaaagctattggtgcgcatgaacgactcgcagcatacccatatggtgagattatcgatatttctcagcaggaaggtgaacagattgatatcgatattacagatattaatgagttccacgaagaagctaaccctgccaacatcctcgcgctggtagaggcgctggagaaggcgcagcagcacattgcgcgccaggagcaaattctcctgaataaggatgagtctctgtctattcgtcgcggtgaactggaggcggcgcagcaggagcgggagtgctggcgcgcaattgtgcctcccggcgacctggtcgtgatccctatgaaatggccgagtacatcgcgttgctga

SEQ ID NO: 103054 - DNA, 186 bp, Enterobacter aerogenes
atgacaaagttagtcgaaaacattcagaagcaatcgcctgcagaagagatgcgccgtgaaaacctctaccacatgaagctacagtgccttgccgaggtacttggtaaaaaagctattgttgataaacaaggcgccattagcgaagcaaaggaaataaatgctgcatttgatgaaattattttctag

SEQ ID NO: 103055 - DNA, 606 bp, Enterobacter aerogenes
atggcctcagttatcgaaatctgcaacctcgcgctgagcaatatcggcaataaccgcagcattaacagcctgaatgaagccagcaaagaagccgggcaatgctctctttattacgaatcaattcgtgatgctgttctggctgatttcgactggaactttgccaccaaaactgtggctctggcagatactaacaatcctcctccaaactgggcttatgcatatcaatatcctactgactgcttgaggatcaccgaaataccactacccggcgtgagatatccaacggctgaacaacgtgttgagtacataactggttctaataatgaaggtacagggaagttgatttatacagatttgcctggtgcctggctgaaatatgtttcccgcatcactgatgtgaacatgttcgattcaattttccaggaggcgctatcctggcgcctggccgcggctattaacatggttatcactggcaatgctgacctcggcaataacgctctcagcatgtatagccgaatcatcctcagcgccagctctcacagcatgaacgaatcgcaggagccgcaacctcctgttgatccctttactgaagcgaggatgtgctga

SEQ ID NO: 103056 - DNA, 534 bp, Enterobacter aerogenes
atgaaaaaattattttatattattttattaatcccgtttttttctttggcttttacgaaagaaggattctatacgatagatagtaatggctgggttgctaaaagcacaccggctggtgacgtgtttatttgcaatacatgtgataatttggttcaggttcaaatatcttacggacctgaagctgatgttaatgcaccatttcataatgcagatcaattcgttaaggcatttgatacgcaagagaagaaaaataaatttgctgatatgctaatcaagtcagggattccagccgaaggatacgatattataattatcaaagtaagcgatgattatttggggggtagtaaagctataatgtattctgcgatagttaaaatgcctggcgataatgcttctcgcgaaacaactttagttactatgcataaaaatagacttgtaaagttttctgctaatttttatgaaaatacgctggatgaaaaatcagcaacagctattgataatctaagtaaatctttagtttttacaaagggttga

SEQ ID NO: 103057 - DNA, 2217 bp, Enterobacter aerogenes
atgacggtctcaaccgaagtcgaccataacgactacacaggtaacggcgttaccacgtcattcccatatacgttcaggattttccagaagagtgatcttatggtgcaggtagccgacctgaacgaaaacatcacagtgctcacgcttgacactgactacacggtcactggtgctggcggctattctggcggcgcggtagttctggcgtcaccgctggccagtggatggcaaatttctatctcacgggatcttcccttaacccaagagactgatctgcgtaaccagggtaagttctttgctgaagtccacgaagacgctttcgacaagctgacgatgctgatacagcagtgctttggcttccttcgcctggcgctgcgcaagccatcatttatcgctaactattacgatgctctgaacaacagaattagaaatttacgtgatccgtcacaggctcaggatgctgcaacaaagaagtatgttgatgatggtaatgccggttctaattcatatgccgatgcgttattccgcaaaactctacgtgttccagaggtttctgtacccgagtatttcattctcgaaacccgctcaaatatgcttgttgggtgtaatgaccgtggcgagtttgtacctattgcaggtcaaactgaaacagcagatcttgcaattaaattggctgctttaactggtgccagtcttattggcgggctcggttttattacacctgaaatgtatggagcaaaagggaatggaataaatgacgatcgtgtagctatacagactgcaataaacaaggcgaatgaaaactatattaatggaacggggccgactacagtatggctcggatataaatatatggtttctcttaacccaagttcaaccgcaatcaatggcgaggtatcagcgggctttgcctgcttaaacatgctatcaggtgtggcgctgagggggactggtgtcatcagattaaaagcaggtgtgtccggggcaaatccaggagcaatcatcacaaactggactggcccctgtgttgactcgatcattgaaggaatttcaattgatggtaatgcttcagaaatatcagcaacgcggatgactgcaataaaccttgtaaactgtacaaggacatcactgcataagttaaaggtttacaatacaaaagggatcggtggtggaatttacatgcgccgtgatggtttttcttcttctgactatggctgcgtagaaagtcgtatcatgaactgtgatgtttttgatattggctacatcggcatacaggcagagaggccagatggcattatcatcactggcaataatgtattcaatacaggtgataacgccattgatatagaagggaataacgccagcggtagttctggttttggtaagcagatgattatttcaaataacgtctgcagaaataacaagaacggaattatcattgagtcctgctctaatgcaacgattacgtcaaacgacgttgctgatataagtggcattggcatcgttttaaaccgaattaatacaggttcttttaataacgttatttcaagtaacaaactgactggattgtctacccagcttgcctatggcataagggtaatcaacaactcgggcgggtgtacgattacaggcaaccattttacgagcttgtactcctctatgaaatttaatgggcaggctacaagaatttatatcgggacaaataatcactcgagtatcgctaagtttttgatagagcttaaggccacaacatctttccctacagcaatataccgttcgtacattgcaaggcagttttaccagggtactcagacctcaggattccctgcgcccatgtcacccatcaactgcccaagtaatttccctaacagattcaatacaagtacattcgaaaatgcgcacttttctgatctgaacggaatcggagaggtaaacatggtgtacagaacggcaaatctgacactaaacgtctcatggaatgcctatgcgaggttcaataatacaacgacaggctacacagatttgaacggaaactttggggtggttggtgatttccttgaaattaatggtcttgtgtatcagatttatgccgtgacattgagcgttaccacaataactaagtgggatggtgctgcgtatgttgccggtaatttcgttagcgatttcactgatgcttttacagttaaaactcacagacctgtatgggggactttatag

SEQ ID NO: 103058 - DNA, 288 bp, Enterobacter aerogenes
gtgattaatattaaagagaacattgaccacattagagtgtattattatagtaatgagcatcttttcaaaagtgaattaatcaaaattggtagttatgaattctatgataaatacctatgtaatctaacaccaagagaatatcttgatttcttacaattcctaattgatgatataagtgagcgaaaaacgataataccagatgaaacaacctctttaattagttatatgctcggcaaagaaattttaacaaatctgaaaatatattcacagaaaaatatcaagatctga

SEQ ID NO: 103059 - DNA, 1212 bp, Enterobacter aerogenes; identical to SEQ ID NO: 97059

SEQ ID NO: 103060 - DNA, 201 bp, Enterobacter aerogenes
atgactctggtaatcaccgatggagaattttggtggagctggcgggagttgaacccgcgcccgaaactttataacctcatgataaacaatgataaaaaaataattagcgttttgctgcggatcctttacggctcctttgaggttccaccgctgaccagcttgggtcgtttttcagtgttaccgtcatactccttcagatag

SEQ ID NO: 103061 - DNA, 645 bp, Enterobacter aerogenes
atgactgatatcaccgaactggcgcagagtctgaaagcggcagcagagaaagctattggggcacatgaacgactcgcagcatacccatatggtgagattatcgatatttctcagcatgaaggtgaacagattgatatcgatattacagatattaatgagttccacgaagaagccagcccagccaacgtcctcgcgctggtagaggtgctggagaaggtgcagcgtgctaacggctaccttcgcgagcaatcttctgattgggaacgtgaggcaatcggaaactttgaagattgtgaagaaatgtcggcgcgggttgaagagcttgaatcacagcggaaattggcttttgccgccagtaatcgctgggcggataaattcagagaagcagagaagcgcatcgccgaactggaagaaagccacgctcaggccatccagtctcgcgaccattacaaacgcatatcagaggaaggcctgaagaaactggcggagtcccgcaccgtcaccgtgaagctgcctaagcgctctgttggtgaagtaatgcatatgagcggatttagccgcgactacgccgagggttggtgctcaggcaatgataacgccattcatgaaatgcgtgccgctggcatcaaggtggaggctgagtga

SEQ ID NO: 103062 - DNA, 294 bp, Enterobacter aerogenes
atgagcaagtcatacatcgtaattatccagcgcgcttggtgtaacgaaggcgggcatggcatcgaatattcatccgaccttattcactacgagacccgcaatggcgctatatcacacggatttcaatcggttgatagcgacgatttcaacgtcggcgttatcgagggcggaaagttgatttcttttgactggatggataagccggtttgtgaaggtgaagacacgctggcgcagattgccgagctaattggtctggagggtgcatctgatctgctcgagggggccgacaaatga

SEQ ID NO: 103063 - DNA, 453 bp, Enterobacter aerogenes
atgaaagaactgactatggctggcagcagtaatgaggcccacgacggagaatcaacggctatggcatttaccatggataaatgtcgcgagatttcaggctgcccctctggggttgctcttcaagactggctgcggcaactggcggcggaacgcattcatgtcagagctcgccaccttttcattcgtgcgttggctgtttcaatccttgagcatagcggcggccgtcacgactggcgtggagcaatggaggatgcttctgatttagttaaggcggtggatgaagtctatgcccaatcccgcttaacggatcgctccatcgcagtgttcaaggctgatgccattgatgaagcagctgtagagctcgagcggatcgatacggttgcaagcacaagagcaattgctttcaaactccgtgaattctcaaagcagctgcgcgagggggccgacaaatga

SEQ ID NO: 103064 - DNA, 495 bp, Enterobacter aerogenes
atgaatagagacgaccttaactttattatttattactcgtttattttagaaagaatgaactacacactgcttactagaattgacaagttaataactttactattgatcgtcttgggtttttcggtattcgctccgtttagcaattattttgtttttggtgttggcgttgcagttctgtctgttcttcaacttgtatatcgttttggtgaagaagctggtgtatcgaaagagcaaatgaagcaatacaaaaaattgcagattgaagcacctactttggatgataaaactttgcaagaacaattaatttctattcaaaattcagatagcaatccctggagaactcttgaacacccagcctacattgcttcttgtctttattacgacctagaaatcgatacaagcatgactcggctggaggcaatattgtcctggtttgccggcggatacccaatagaaagaaatgaggaaaaacccaaagatgagtcgacccattga

SEQ ID NO: 103065 - DNA, 795 bp, Enterobacter aerogenes
atgacgcagcagatcaataattcattcaaaaaggcggtaactcctgcggttattaacggcattgtcacaatgagtagccgtgaaatagctgagataacaggaaaaaaacacggccatgtcctgagggatattcgagcatacataggagcaattcttcaaatcgaagaaggaatggaacctcgaagccttgaatggtccgagcaaaggggtatgcaagttgttggagacacccctgtttgcggcgtaactctttcggaagaaacgaactggcagaatggtcagcgctatcctgtttatcttttggataagtcagcaacgttaaccattatcgctggttataacattgcattaagaaaacggatcattgatcgctggcaagagctggaagaattatcagctaggccgctcgtacctcaaaccttggctgaagccctgcgtctggccgctgatatggcagaacagaatgccgctctggaagacaaagtgcagcaggacgcgccaaaagtggctttcgttaaccactacgttgaagctggcggcgccaaaagtctgcgtgaaaccgcaaaaatcctgaacatgccggaaaaggccatgatcgacacgctactgcgtgacaaggtgctgttccgtcagtccggcaatttgctacctcatgccctgcgtcagcgtgaaggcctgtttaccgtcaaaacgggtacatcggattatggccatgcctacacccaaacccgagtaactccccgcggcgtccagtggatagcagagcgttacgcctctgaactgatgggaggttga

SEQ ID NO: 103066 - DNA, 246 bp, Enterobacter aerogenes
atgtcagaaattacacctgcagaacaaatccgcctgactatcatcaagaaagttaattacgacaccgccgcggcgaagctggccattgactgggttggcgatagcaatctcaaagctgagctgttcgcagactctttcgatcgtgttttcacggaaagtgagattgtctcgaaaacccgtaaggcgattcaggaagcgaccgaagccctagcgctttttgataccgcgactgagcagtccagttaa

SEQ ID NO: 103067 - DNA, 231 bp, Enterobacter aerogenes
atgatgatgagaccagtggtaatattttttaatgatgaaaaaccttatgtgatggatgtgggcctccatttgaattctattcgcttggaatatccagacggtaatattgctgacttacctgtaatgagcgtgcgggttcataataatgcccggcgcgaagaatattatgtcgcttctgatcgcgaacttaatgatgcagaggtaaccgcagccattaacgaatttttctaa

SEQ ID NO: 103068 - DNA, 183 bp, Enterobacter aerogenes
atgagtacttttatcctgattttttcgctgtatgcatcagcatgggcggataacgatttcgccagcatccgttcacaggagttttcatcgcgggaaacatgtgaggcagctaaggctgaattccttgaaaagtttgaaactgcccgctctacgaatacgcaagcaatctgcgtgaagaaatga

SEQ ID NO: 103069 - DNA, 228 bp, Enterobacter aerogenes
atgcgaattactgtcttagatgacgatccggggcggaaaattaatctcgctcaggaacgatataaagtctatatcgatggcgttgaagttaagcacgtattcactgctgatgatgaaaaaggcgaggtgattgctgccgtgctgaatgatcgcggatacattacggcagaatacggtgaagtgaagcgacagacgctttacggaaaagtcaccattaagcgccaataa

SEQ ID NO: 103070 - DNA, 495 bp, Enterobacter aerogenes
atgttaacagcgcagaagcgaaagtatgctctcgcgctgatgtccgggatgtcccagaaagatgcggcagtaaaggcggggtattctgaaaagtccgcgcgttccaaggggtcgcaacttgctaaagacccggagatcatcgcgtttatagagcggaaaaaacgagaaaaagtagaggttgatgatgaaccagcatatcgcaggaatgttaataccccagcggtaaacaagcctgaagaaaaacgacctcctgccgtatcgtccgccggtgagtatgaagaccccctcgacttcctcaagtcggtcatgaacaacgttggttacgaaatcgaaacccggaaggatgctgcgaaggccatgttgccttatgtgcatcagaagaaaggtgaggggggcaagaaggatgcaaaagctgaggctgcccaaaaagctgccaataagtttgccgttccgccgccgccgaaactggtggttaacaatcgcgggaaaacataa

SEQ ID NO: 103071 - DNA, 1659 bp, Enterobacter aerogenes
atgcctgagtggacaactgcctgccctgactgggctgaacgactgaagaaaggccagtctataattcctgccccgatttacccggagcaggctgaaatagccctgaatgtgttcaggcaactgaaaattgttgatgcaccaggatcgccaacgtttggtgaatcctgcgcacagtgggttttcgatctcgttgccgcactgttcggctcctatgatgccgaaaccgggcgcaggcacattaccgaagtgtttgtactgatccccaaaaaaaactccaaatcgacgctggccgccggaatcatgatgacggcgttgctgctcaactggcgacaggctgccgggtacaccatcatcgccccgacagtggaggtggcgacaaacgcctttaacccggcgcgtgacatggtgaagagggacgatgatctggatgacctctgtcaggtgcagacgcatatcaggaccatcacccacagaggaacggacacgacactgaaggtggtggctgccgacccgaacaccgtttctgggataaaatctgtcggcacgctcattgacgagctatggcttttcggtaagcagcacaactcagaagacatgctgcgtgaggcggtgggaggaatggcatcacgaccggaaggttttgtgatgtacacaacaacacagtccaacgagccacctgcaggtgtattcaagaagaagctgcagtatgcccgcgacgttcgcgacggaaaaattcacgatccacactttcttcctgtgatatttgagcatccgccagagatggttgccagtggtgagcatcttcttctggaaaacctcgcaatggttaaccctaacctgggttactccgttgacgaacagtttctttatcgcgaatacaacaaggcgaaagaagccggggaagaagacttccgcggctttatgtccaaacatgccaacgttgaaatcggtctcgccctgcgcgccgaccgatgggccggagccgatttctgggagcagcaggcaagacgcgtcacttttgacgatattcttcgccgctctgaagtgattaccgtcggtattgatggtggtggtctcgatgaccttctcggcctgtctgtagtcgggcgcgatcgcgaaactcgcgagtggttgtgctggtgtcatgcctgggcacacaccattgcactggaaagacgcaagagtgaaatatcaaaattaaaggattttgagaaagccggtgatcttacgatcgttaagcgggtaggtgaggatgttgagcaggttgcagagtatgttagccggatttatgaagccgagttgctggataaaatcggtattgacccgtctgaagtcgggcaaattcttgatgcgctcagcgaggctggcattcctgaggaagctgtgacaggggtcagtcagggctggaaactcggcggcgccattaagaccaccgagcgcaagctggctgaaggtgttctgcttcatggcggacaacctctgatggcctggtgtgtgagcaatgcaagggttgagccgaaaggcaatgccatacttatcaccaaacaggccagcggtaaggggaaaattgaccccctgatggccacattcaacgccgttacgctaatggcgcttaaccccgaaccggttaaaaaagactaccaggtatttttcatataa

SEQ ID NO: 103072 - DNA, 354 bp, Enterobacter aerogenes
atgcaacttacgctcgatactttgaaagaaacaggtgcctttaccgggcgcccagtagaaaaagaaattaagtggaaaggccgcgacgggaaagagcacaaagcgaccgtctttgttcgtccgatgggatatcacaccacaaaagctgaactgctggcgtataacgggaaatcggacccgattgctgagcgcattgcggcgcatatttgcgatcaggacggtgctgcggtgtttacggcggctgacattcttggaaccgcaaccccggatcgtggggcattggacggcccgattgttatggctctccttgcggcaattcatgaagttaatgaactgggaaagactacgagctaa

SEQ ID NO: 103073 - DNA, 264 bp, Enterobacter aerogenes
atgaacggcatcggcggccgcaccatcgcagaggctcaggagcggatgagccgtagagaatttctggtttggctcaaatatcgtgaaaagtatggtcagctcaacattatgatgcgtaccgagtggggggcgtcgatggtggcctccgtgctggcgaacatcaataagtcaaagaactcgccaccgttcagggtgagtgattttgcaccgcacatcaacgaagcgccattatctctggaagaagctatgaaaagttggcattga

SEQ ID NO: 103074 - DNA, 2433 bp, Enterobacter aerogenes
atggctggcaaatcccttggaacgttaactatcgacctaatcgcgaaggttggagggtttgttcagggtatggataaagctgaacgagcatctcagaaatggcgtgaccaggtaacaaaagatgcaaaagaggttggtgcatcaattcttgcggtaggcgcagcggctgcaactgctgctataggtataggtgccgcaggattatcaattgtaaaaaatactgctcaacaggttacagaggctgacagatgggcaaagtcattaaaaatgtcaacccaagatttgttgtcatggcaatatgcggctgaacaggctgggttaactggcgataatatcgcagatatttttaaagacattaatgataaagttggtgatgcagtcttaaacaagtctggagaagctgcgcaagcattagatacccttggtctttcggcaaaaaaattatctgagcaatccccagataagcaactgatggctatcagtgaagcattgcagaaaataccgtctcacgctggtaaaacaaatatccttgaaagcctcggtaatgacttatcaaaaatgcttccactgtttgagaataataatgaaaaacttaaacagttcattcagttatcaaaagattttggtgtggctcccccgcaagaagacattgataatcttgtaaaagtaaaccagttctttcaggatattgagacaagtgctcgtggcctgaaaatggaaattgcctccggtctggctaaagtggatcttacgccgttacaggctgggcttgatgatattcgcgatgtttttacggatcctgcagtcctgcaaggcctgtctgacttggttggggaggcaataagccttgttggggctgtggggcgtattgctggtggtctgggaacaatcgccgcatacactcgctctcgtattggcgcggtttcagggaattatgatgctgccgatgagagagacatagaagaaagaattagatttcttggaaaacgaggaaatcaaagtagagaacagaaggaagaacttgattttttaaacaagcgcctgagttttcttcgctcaattaaaggagcattgaccgcagatcagatagataaaggagcgaaaggactcacgtctttactttctgaccttggcattgatgcgcccaaaggtaatgattattcgctcgggaaaggggactctaaccagaatcagccaaaaacaaagaccaagagtaattcgactgataacactttcaaaaataaacttcttgatttgcaaaggcaagcggctcttatagacacaactggcaaaaaaactgttgaagttacagagcttgagaaaataaattttgaagttgctagtggaaatcttagcaaactgtcagaagcgcagaaggaacaattacgtgatgctgccaaggtaattgattcaaaaaaagaagagttgcgcataaataaggagaacgcaaagcttgctgaatatgtgtctgggcttgcacggcagaataagatagttagacagggttttaataatcaagtttcaagtcgatactcaggcgataaagaacgtgcgagattacaacaaacaaatgatataaaatttgattttgaatctaagcaagaggacttattaaatcaactgcaatccggtgatatagatcaaagcttatacgataaaaagaaggatgcattacagaaatctcttgatgaaagacttaaaattcaagaggaatattataaaagcttagatgaattgcaaaaggatggggttgctggttttgtatcaggagtttctgatcaagctgccgcttattcaaatctatatgaaaatatgcaacaagtaggcgcgcaaacatttagcagtttaactgatatggttattacctgggctgaaacaggaaagttaaacgcgcaggattttgccgcaacctttatacaatcagttggcgctgcattactacaatatgcagcagcacaagtagctttagctgcgttaagtgctttcacagcatggataggagttccttatataggtcctgctgtagcttctacgcaggctattgctgccgctgccgcggcgggcgttttcatgactgctattggttctgcccttcatggacaggcccacgacggtatcgattctgtacctgaaacgggtacttggttgctacagaagggcgagcgtgtcacaacggcgaaaacgagcgcgaaactggatgccactctggatcgggtcagtaaagactctgctggaggaaaattacccgatgttcgtatcagtaccgttgtgaatggggatcctgaccagagaactctggctttgttgaaggaaacgcagaagcaagcggtacaggaagctctgaatgtgagcgcaaatcagatagctacaggaaccgggaaaatcggcaaggccatgggctatggttggaatgccgggaggaagttaacctga

SEQ ID NO: 103075 - DNA, 240 bp, Enterobacter aerogenes
atgtttgttgaactcgtttatgacaagcgcaatgttgaaggccttaataacgcacgcaccattattctcaatgagctaaccaagcgggtgcacagaatttttccggatgccgaagtcaaggttaaacctatgcaggcaaatgctttaaattcagatgccagcaaacatgataaagagcgtctaaaccgtatgctcgaggaaatgtttgaagaagcagacttatggctggtaaaagaatga

SEQ ID NO: 103076 - DNA, 2343 bp, Enterobacter aerogenes
atgggtggtggatttaactataacggggaaggtgctactggcaccggattggatcgtgatccatatgttcgcgacagcaatggtaatgctattggtgttaaatcaggctatcacgcggagtcctatgggacctcaagtccagccttagggcctaatggcgctattcagattactgctggggttattgctgtgcctggagataagccccgacctgacggtggtagtggtggtgggaatactgttaacaccggaccggcaggacagctcctggtgatgaataaaggtcagcttggatactgggaaactcgttctacgggcgcgggtaacaatgagcataatacgagtgtatttgttgccgtaggtccttctgaggcagaaaaaactgcttctgcagagaaggcgttaaaggaaaaacagcaggcagaagcagcagcaaaagactttgcggctaaaactgctgccgcatcagccacggcggaaaaagaacgccagcaggcaattgctgctgcaactgcagcgggtcagcatcagtcagtttctgatgcccgtaatagcctgaataacgcgacgtcagatgtgtctcgtctgaaatcagctgcagacagtgcactgcaggaggcaaaggcaaaacggaaggctgctattgatgctgtacctgttgcaacccaggcggaaaataaatatcaggagctgcagcagaagattaaaggcctgaagctgaaaaatggtgagtatggtacggaaaaatgggaaataattggctctaataaggagcatgatcactggggatacaggttttatccatccggaattaccaaagctcaggttgatgtggcgcagagcgatgctgtgaataagcgaaatcaggctaccagtcttgccagtcaggcaacagcagcagaacaggacagcctgaaagctacagctgcctataatgcggcagaaacgcgccgtcaggctgctcaggcggcgttaaattctgctgaacaggctgctgctgctgaacgtaagcggcaggaagctgaggcggctgcagcagctgctgctgagaaaaaacgtcaggcagacgcagtagcaaaagcagcagaggaagcgcgtgcggcagcggaaaaagccaggctgatgcaggagcgtcaggcagcagcagataagctgaaatccacagatattcagtctgttcgcgggatcccgtctacggcatcgcctgcagcgtcacccatttcctgggccgttgcatcacttggtggtatatcgctggatagtgttactgcagggaaagcctggacgcagattgctgaggtgatggctaaactgcgaggtattgccggtgcgagtcttgttggtcccgtggtggcaactgctgtagggctgttttggtcacgtgatgttggtattggcagtgatgtggtgcccggacgtgacatcagcgggctgatgccgggtgatgcactgtcattacctgatctggccactttgattaaagctgctgacagtaaaacgggtgtcagtatgccggttcgaggccggattatcgtgcgtgaaggcgattatctggagtctcagttcgttcgaacacctgttgccggtagtgttccggttgttcgggctactctggataaagctactggttactggggatatacgttgccggcgatacagggcgtgcccggacagacaatactggtaagtccgtcagatgcgccgggcgttaatgctcctctgggacttgctgggccggttcctttgcctgaaactattatacataccggtgggcaaactacggtccctcagggggggactgtgacagtatctcctgttattggtgaagttgattttcgagatcttatccttgttttccctcctgagtcagggttaaagccgttatatgtgatgccagttagcccttatggagatgcaacagaaaaaggcgagcacagcggaagaccttataatccggataaggcaggtggtcctgtacagaatcttaactggcgtagtgcagtcatcaacaaggccgggattgataaggtgaagctacataccggtcgctttggtgaatcagcagcaaacaaagtaatgatcgaccgtctggagaaaatcctgagcggtcagttacaggtaactgatacggacaagcggttttacacccatgaactcagagagctggaacgttatcgtgctttaggggtccctgataatgtgaagccagatgataaaggtgttacgtggaataacactcatacagcaacgctggaagattataaaattaatgaaaaaactgatccgctctatacaaaggatgctgaagaggcagagtataaagcagagctaaaaaataaatga

SEQ ID NO: 103077 - DNA, 264 bp, Enterobacter aerogenes
atgagtaatccgattgaagacatcattaaaaatgaatcggtaagtgatgtgcttcgctactttggtcctggtcgcgacatttcaaaaattgaccgtatgtatgtttcatataagtttgaagtgatctctgaaggcgttcttttatctgaatacaaaaagttattcgacaatggagaactaaagtatgactctaataaaaatgttattaaggggcctaactggaaagagcctgcttttgtaacacaaaaaaaatacggcatttaa

SEQ ID NO: 103078 - DNA, 258 bp, Enterobacter aerogenes
atggctaataaaactttggctgactatacagagcaggaatttattgagtttatcgaaaaaattaaaaaagcagactttgctactgagtctgagcatgatgaggccatttatgagttcagccagttgactgaacatccagatggttgggatcttatttatcatcctcaagcaggagccgataactctcctgctggtgttgtaaaaacagtaaaagagtggcgagcagctaacggtaagccaggttttaaaaaatcgtga

SEQ ID NO: 103079 - DNA, 156 bp, Enterobacter aerogenes
atgaaaaaattacttttcctgggggttgttaccgtttctgtggttctggcggcatgtcaggtcaataatgttcgtgacaccggaggtggggctgtttcaccttcatcgacggtgaccggagtcacgcttgatagcggtacgaacggcaatccgtaa

SEQ ID NO: 103080 - DNA, 192 bp, Enterobacter aerogenes
atgacgaaacaacagaaaacagcgctgaacatggctaaattcatccagaatcagtctctgctcctgctggagaagcttaacgagcttgatctcgatgttgaggccgacctttgtgagaaactccacgatgatgcggagcatcttttccgtacactgtcctcgagactggatgaattacaggatggcaattga

SEQ ID NO: 103081 - DNA, 423 bp, Enterobacter aerogenes
atggccagagtgtctattagtgaagcggcacggcttgttaaggttagccgtcccacaatttacaagatgattaacagtgggaagttaagttacacctctgttgtaaagcacgggaaggctattaaagttattgatacttcagagcttattagagtttttggttctcttgatggtgtcatcgatactgtaaaatatgatgtaaaaagtgacgcagaatctacaagtattaacagcgttggtttacatgatttacaacatagaatcgctctacttgaagctgaaaacgatggtcttaaaggggctgttaaggctcgagatgagcatattgattcccttcgtcaggctatgcagcttctggagcacaagcgcgagccttcttcaccaccccattccccgtggtggaaattctggaaaaaatcctga

SEQ ID NO: 103082 - DNA, 621 bp, Enterobacter aerogenes
atgatagaaaagagaactggtgagctatgcccaaaaggaatcatccaaaacgcccttaacgaactgcttgataccaggcaatcgattaccgacttcgtgcaacagcttgtggcacaaaatatcaggccaatccctaacattgcctctactggacgcatgaacggcttctcattcgaatacaacgggattgctttcaaagcatctcaattgggaaaagggtattcctggtctgccttgcaaagcagaatcgactaccaacaggaacgtgataatgctttcctgtctaaactgaaatcatctgtcagagaaacatctgttagtgcaactcatgatatggtcataactatagatgctcctgaaaccacgacagaatacgttaaccgccccatagaagcacttatcctcgataaacgagctgctggtcaggacgaatactctatcgcttctgtcgaagcgcttctcccagaagctgttgcaactaacaaagaagcgatagcaaccgaaacgttaaaagtagcgcccaagcgaagctatagggcttcaacgttcagatggttagagaccatcccctatctcattgaatcagcacctcaatccagaagagcttcgctttcgatgtaa

SEQ ID NO: 103083 - DNA, 348 bp, Enterobacter aerogenes
gtggtcaacgtggctgtgggtatagataacggcgacaacaggtttcttaccgcggtttttgtagtacaggtccatacccactttggcagtctcagcggacaccagagggtcaacgacggtaatgccttctttaccttcgatgatggtcatgttggaaagatccagattgcggatctggtagacgccgtcggtcacctcaaacaggccgctaatattgatcaattgagactgacgccacaggctcgggttgacagtatctggcgctttttcaccttcttttatgaaggagtactgctgcggatcccacacgacgttaccctgttcgcctttaatcacttcggtcggtag

SEQ ID NO: 103084 - DNA, 1455 bp, Enterobacter aerogenes
atgtcagttaaaatagtggtgaagaagaatacctattttgattccgtctcattaatgtcgatttccacccgcgctaataagctcgatggcgtagagcaggcatttgtggcgatggcgacggaaatgaacaaaggggtgctgaataaccttgggctgctgacgccggagctggaagcagcgaaaaacggcgacctgatgatcgtcatcaagggcaaagacggcgccgattgcgaacagatactcagtgaaatagaagcgctgttcagcaaaaaggccgaaagcggccagcacgaagcgcgtcaggcgctgcaaaacgatcttaacgtgatgttgttttccgataacgtctctattgacgacgaactggcgctgaaacagctggcccacgaaaaggggttgttgatgatgggaccagactgcggcaccgccattattaacggcgcggcgctgtgcttcggtaacgcggttcgccgtggcaacatcggtattatcggcgcctccggcaccggtagccaggagctgagcgtccgtatccatgatttcggcggcggcatctcgcagctgattggtaccggcggtcgcgatctgagtgagaaaatcggcggcctgatgatgctcgacgccattcagatgctggaagccgatccgcaaacagaaattatcgtccttgtttctaaaccaccggctccagcggtggcgaaaaaagtgctcgaacgcgctcgcgcctgccgtaaaccggtggtggcgtgcttcctcggccgcgccgagcctcccgccgatgagccaggcctgcagttcgcccgcggcactaaagacgcggcgctgaaggccgtcctgctgagcggtattaagcaggaaaatctcgatgtacatccgctgaaccaggcgctgattgctgacgttcgcgcgcagctcacgccacagcaaaagtacattcgcggcctgttctgcggcggtaccctgtgcgatgaaaccatgttcgcggtactggaaaaacacgcggatgtttatagcaacattcagccggatccggcttatcgcctgagcgatatcaatcgcagcatcaaacacaccttcctcgatttcggcgatgacgacttcaccaacggtaagccgcacccgatgatcgacccaaccaaccgtatcagtcgcctgctgcaagaagcgcgcgatcccgaagtggcggtcatcgtcatggacttcgtgctgggcttcggagcgcatgaagatccggtgggttcgacgatcgcggcgatcaaagaggccaaagccattgccgccgccgatggccgcccattagcgattctcgcttatgtgttaggcaccgacatcgatacgccgtcgctggagcaacagcgccagatgctgcttgacgctggcgtcattctggccagcagcagtaccaataccggtttgctggcgcgtgaatttatctgcaaaggggagcaagcctga

SEQ ID NO: 103085 - DNA, 543 bp, Enterobacter aerogenes
atgccattacctgaacgcatgaaaccagccaaaatcagccgtcagaaacttaaagaactggcggatatggccaatgtgatactttcgcaaattgataacggcgccgacgaagatgatgaagggctaaaagcgatgattgatgactggaacaaccaggttgttaagccttatgaattctctgatttccgggacttttcctcatggaccagtgcaaaggactttacccgaatggcatttaatcaggagaaatacttagcagatttaaactggcatgagttggttcagataatcagtttcttatgcaatgcagaaggcaaggaatcggaacaaagctacgcgctgggattactggagaaaaactttgatgccaatccatccgatctcatctattggcctaacgaatggtttcagaatgaagacatgcttcatgtagatttgacgtcagaagaaatcgccgcatatctgatggcaaaatctggccggcacctaagcgatgcgccacaaatcaagctgagatacccgcttcacggcgaacatccttga

SEQ ID NO: 103086 - DNA, 156 bp, Enterobacter aerogenes
atggagcagctcatcaccatcgcactggcggcgatatttgcccgccactttcatcagccttgcggctggatcgcccgcgatccgcgtcaccctctctcactgggcatcgtcaccgcagcagtcccggcaccgcaacctcaagacaagaaggaatga

SEQ ID NO: 103087 - DNA, 291 bp, Enterobacter aerogenes
atgacagctagtaaagaattaaaagttcgttacacccgaggcggtaaaccgctcgaaaaatcaattacatgggatggctgtgatcctgttggaagtacattaggttgtatagttgaagaacataatctggtgaatttaatcttaggtgaggaaagggctgaattcggtgggattagaaaccttcgtaaaccaataaatcttctcgaacacggtattgatgatgtgttcttctttgacgatgaaataaacgactggcaagaaatctcccctgattggcttacggatgcttaa

SEQ ID NO: 103088 - DNA, 702 bp, Enterobacter aerogenes
atgagtatatctgatggagtaaaggttcttattataacagtgtgtggctataccttcacatatgcttattatttgggatattatgccgctaaagaaattcctgtcgagtttattgatgtttctttattaagcatgatgaaaattggttttggtacatgtgctatattatcttttgcactatattttcttgatttttttaaagaggaaatagaagatcctgttagtgtcagtgtaaatacaaaaagatttctaattcgacactcgataggcattattacaatgttattgtttactgttaatatgacattgtcaggaaagtggctttctcttatcccaccatttatgatctggtatgtttgtttaaagcaggatattaccatttcgtttaaagattcagagacgaaacgctttaaatttaaagtttccataaatccattgaaaaagttaggtagtactatagttgcagaaaaacttaatgtccgttcatattatgcatgctttagttggtatttggctttgttatttttattgtttaatgttggcggtgttttttctcatatgataaaagatacacttgtttgcaataaggatattcatgttgtcagtgtaggtgattctgatgtactcgtaacaagagatcataaaaattttgaattcatggataagaaagattgtaagttttcaattccagaaattaaataa

SEQ ID NO: 103089 - DNA, 444 bp, Enterobacter aerogenes
atggacacaaataaatttacacgccatgatttttcagcatctgcatttactctgatgcaaattattggagataaccgtgaatttgaggctaaaaatagagaagattattatcaatcagctacttattctctaaagcaacttaatgctttaatggaaattgatgaagcaaagaccatagcgaataagagaatagtattcacactaggaggtagtttatcttttaatcttgaacttaaaaatcattttaacaaaacagttataacgttaagttatattgatcaagatgaatatggcaaagagtttttgagcaaagataatagttactcgtttactatagatgaagatgaacggctgagtgatgttgatggacatttgaaccgaagatactaccacgaacactttgcacatatctttaccttgcttgtagagaaaatcatcaagtaa

SEQ ID NO: 103090 - DNA, 156 bp, Enterobacter aerogenes
atggctgggtttttgcttttctgcgggccggactctccatcgaactgcgttcgattattcgccgccaacacaaccgcgttaaagctgatgaacgacctgctgcagaatacccatgttagcctggtccaatacccgttcatcccaacccatttctga

SEQ ID NO: 103091 - DNA, 249 bp, Enterobacter aerogenes
atgcccccttattggattgtgattcttaacctacattgcggtaagaatcattcacaccgttacgatacccttcagcaaaagcagcctgtgggcttttatgacgcacagtccctgcctgactatcaggaagagccgccaaatcaacccaaggttgacctgtacgagctagaccagcgcgatacccctgatcataggcacaaccacaacatttgtggcgaccatcaccaccttgatcatgaggtaagctga

SEQ ID NO: 103092 - DNA, 261 bp, Enterobacter aerogenes
atgagtatttactttaatgagcacggtagcgcgattggataccaagtagaaggacgttggacaatcaagggtgattatttgcaggtcaaccatggccccaacatcccaggcggcttgtacaaaattaacgataataaagtgaaattcccattcgattacaaagaggttgagggagtgatcgatactgagaaactcaccttcaccgtgaatggtcaagagtacccaatgaggaaaatgaaaacaaatccgtgggatgtatag

SEQ ID NO: 103093 - DNA, 381 bp, Enterobacter aerogenes
atgaacgaccagcaaattgaaaagcaaattcaggccaaaggtttaaacgcgccgcgagtaactccttctcgtgttgaggccatcatccgcagcgaacattattttactgcgtacgacggccgccgcggggcgctggcaaacgaaacttacgaagctcgtgagaaaccgctcgacgcggatgcggatcttgcacctctacagctactcacattctgtgttctggttcttgagaatggctttacggtcactggcgaaagtgcatgcgccagcccggagaacttcgacgcagcgattggacgtaacatcgcacgccagaatgcggtgaataaaatctggctgcttgagggttacttgctgaaacagcggctgcatgaagcttaa

SEQ ID NO: 103094 - DNA, 1356 bp, Enterobacter aerogenes
atggaaccggggatttacttcgatatcagcaacgaagactaccacgccggcggcggcgtgagtaagtcacagctcgatatgctggcaaagtctcccgcgcttttacagtgggtaaaagccgcaccggaagacgaagagaaaaagtcagcgcttgatatgggaaccgctctgcactgtttgctactggagcccgaagaattcagcaagcgattcatcatcgcgccagctttcaatcgccgcacgaaccagggcaaagcggatgaagaggcttttttaaaagaagtagccgacagtggcgcaacggtaatgaccgctgaagaggggcgaaaactgcaacttatgcgcgaaagtgcaatggcccatccagtagcacgctggttgctggagtcacacgggcattgtgaggtttcgatgtactggaacgacaccgaaacgggcgaactctgccggatccgtcctgacaagtggctgccagaccatcgaattatcatcgatgtgaagaaagtcaccgatatggatcgtttcgcaaggcacgttgacgagttccgttaccacgtgcaagacgcgatgtatcgcgaaggggcactcaacgcaacgggtgaacaacatagttttgtcttcctcgcagtgagcgaaagcatcgactgcgggcgctatccggtaagagtattcgaactggatccgcatgacgcagccgccggaagcgcgttattcaggcgagacctgaacacataccatcattgccgccagtcggatgaatggaacggcatagaaacactaaaacgtccggactgggcgcgaaagcaggacaaagaactcatgaatgacgaaggccagaatactcaaagccgtgtactcgatgacttcgaagtaatttctacacctctcgaactcccgatttgcgatctactggaacgcgtcccgttgttaacccccgagcagttagcggaggtatacagccaggtagagcgcatcgaaaccttttgcacggccatccgcgaaaaggtagccagtgatctggccgccggtctcacggtgccgggttataaactagtcacagcaccagaaggcgacccgcaatggtgtgatcaagacgctgtggaagaactacttaagtctttcagactgaagcaagaccagatgtacaaccagacggtgattagcccttcacaggcggaggtgctattgaaagaagacagcccgcgccgttggacgaaagtcgaagcgctgataacccgctctgatggtaagcccaccatcgcgccagaatcagacccgcgccccgcgctcaacgttaaccctgtaaacgatttcgaggacgtttctgatgaaacgttcgctgacgacctcatttga

SEQ ID NO: 103095 - DNA, 495 bp, Enterobacter aerogenes
atggaattaacagtctctatatcaacggtcatctcggcttgtttaggatttttaggtgtgtatgtattaatgccatttgcgttaataggaagagattttttaatattaaaatttatagagcgatatattctgaatgatgagttttggacaaatttacgaatagtgaatactgataaagctattcataactatcaatttgctggtaaaaaatcccaaatgaaaatatcgaacgcagggcagtgttatactattgatggtagagaggttaccgaaagtgagtatcttagatttgaacgtggtttgcagatgcatttaaatagaataaaccagctggaacctaaaatactattaaggacaaattttattgtatgggcagataagtattttaaacttgagtctgggttaatgaagcagatagagggattttcaaaaagagtttatgaaagagaaaccaagaagcttaaaaatcaagacagcaaggcccccaaaaaatag

SEQ ID NO: 103096 - DNA, 204 bp, Enterobacter aerogenes
atgactatcgtgaaaactcataccggggttgtaataaccaaagacggtccaaaaaccatgaagctgcacgaaacgaaagctatgtgggtagttgggaaaaccgaatgctaccacaaagaaactggccgccgtcactttgctgagcatacgcgccgccggttgctgctcgaaaccatccggccgatcaaggagcgtgcagcatga

SEQ ID NO: 103097 - DNA, 456 bp, Enterobacter aerogenes
atgacaactgatatcaccgaactggcgcagcggaacgaactgctgattgcaaacgggaacgaaacggcaaacctgctgcgccacctggcaaataacgaaatcgactctgactattttgccgttgtctcggaatgtgaaagctatgggaaagaaactgacgcagagctatcaatcacggagtttgccctccgtgccgccggttacgttgatgcgctggtagaggcactggagaaggcgcagcggcacatcggcgaacttgagcgcaaagaggaagctcttcgcccggtcggcgtaatgagtgagaaagcgtatcaccgcctggaaaacagagaatcacgctttattgcactctggcctcgccccgagatctatttaccgcgtaagcgcccggaagatggcgtgatcgtttatgcacgtactgctgcttcgactggcatcaagtgggaggctgagtga

SEQ ID NO: 103098 - DNA, 642 bp, Enterobacter aerogenes
atgtcttatttctatcagttgtcgatagcaaactattatggatacccagaagagtacatttcttttgatttagacacattgctgcggacttttgcacttttctttactattgcgcttataataatagcccccttatctttgatttcgacaaaaaacaatatggggtggctagctttgatgtttatgttatttttattctttatatatctggctgttttttccccagttaaccctttgactttttttgtagggggtaaggctataagcttacctgttataattgcttatgcaatagtgcctgttgcgactttctatacgttgcttacatatattaatggggctcgctaccctaagctaagtgttttctcaattatgcttttggctttctctatttacactgggccgaatcttgtcggtacgttttcctcgtatgctaaattaaaatattttcatttagataaagagtctcaatatgtacttttaagttctagtggaagccgattgatttttggagcgtgtgatactaagggggttagatttttacttaaagaaagctctacagtaggagagctaattccatttaatacaaaaaatgaaggagtaaaaattagagattgttttttcaacagggattttaaataa

SEQ ID NO: 103099 - DNA, 444 bp, Enterobacter aerogenes
atgaaacacgaatcaggattaactctgaaccagttggcagagcgtaacgcgaatttggttactgaacttgagaaatgccgcgagctttcaggctgcccggctggcgtagacctgcaggactgggtgaagcagctggcggcggagagtctcacgatgattcgcttgctgaccgatatcagcgagaaccacgttgaatacctctctgaaggcgaaggctacatgttcgcgggtgtgccgctggattacgtatctgaaataaacatgtacgtttcccgcgacgttaacgctgaaaacccgttccccgccaccgatcgcatcgtagctgaagccgaggcgcgcggagttgagaagttcgcgaaaaagcttgagtcacgtggcaggcatcaggactacgttgaaattgccaacgcattcgcccagcagatgcgcgagggggccaaatga

SEQ ID NO: 103100 - DNA, 183 bp, Enterobacter aerogenes
atgaaaatcgatgtgactcctgcgcagcttgaggcgataaagcggcttaccgacgattgcgactcaatgattggctgcggaaattatgaagcagataaggcttggtctcgcaacgtcgaactgattgacaggatgctcgaaagcaatgggctatcccggaacttcaagggggaggctgagtga

SEQ ID NO: 103101 - DNA, 234 bp, Enterobacter aerogenes
atggctgagaaatcatctttggaacgtttgctggaagtcaatgcggacaataagcgcttagtcacggtcaacattggggttctcaaagcagctcgaaacgaaattaacgcccatgtttcagtgaacgggaaaggcatcatgacggatatggtcctcaactccctaaatgcgattatcgaaggagccaaccatgaccaaatcaaccataaccagagagcgcctggaaaaaattaa

SEQ ID NO: 103102 - DNA, 585 bp, Enterobacter aerogenes
atgaccaaatcaaccataaccagagagcgcctggaaaaaattaaatcctggcgtgaaacctacggcgccggaagcaacgtaatgctgccagcagaagaggccgaggagctggcccgcatcgcgctggccgcaatggacagcgagccggtaggttatttcggtagatttgaccctgatgacgaggaccttatagaccagtgtagtaaaaatgtgaaaggcgctttcccactctatcgccacgcgcagccagcgccggtagtgccggaggaatggactattgctgatgctgtgaagttttgcaaagaaactggtaggcaagatgccggagctgcaatggacgcctggaacgcctgtcgctccgccatgctccaggctgaacctgtaacgacggctaacaagttgggcaactctccggtaattccggatggttacgtgatggtgccgaaggtactgacggaagaaatgatagccgccgctatgaactgcgaagatgtgatcttcaatagcgatgattcattctgcgtacagttcgggaatatctacgatgccatgctcgcagccgccccgcaggaggtgaaaccataa

SEQ ID NO: 103103 - DNA, 258 bp, Enterobacter aerogenes
atgagcctactgaagacaattaaagacgtcgtgtctcctcccgttccggaagagtgcagagaagatgattacgattcggtgctgaaaaaccttgataccctgtccaacgaatcatctgagctgaaagccctgatggctgagttcagtgaaggaaagataactcaggagcagtgcattgccactggcgtagctattgtcaccaaagaattacttgaattccgctacgtccaaaacaaaattgattctcaggcctggtaa

SEQ ID NO: 103104 - DNA, 228 bp, Enterobacter aerogenes
atgtcgcaagaacaagtctgggagcaaacagtccacgcggtactcggtgccgcaattgaacttggatatgatgttgacaagatttcggaaaaagccaaacaaatcatgttaggtaatgaagtgtatcgctttgtaggtcattcagaaaatgaagtgactagaacaattgacgcgatcgaaagtactgtcgatgaagttaaaaaaatacatgagagcaaaccaaagtaa

SEQ ID NO: 103105 - DNA, 3525 bp, Enterobacter aerogenes
atggatgctttaagggctacaacatcgacaaatttcagttttctcgctgaacatgacccgctgtttctacaaatcgccactgctgcagaaaacgccttctcaagcgatcccaacaccaccttgattaagttgcgccaactaggtgaagccttagcacaacatattgctgcgctggtcgggctcacgtttgatgaaccgcccactcaggctgatttactctaccgcctcaatcgcgagctaaaatttgaacccacggtacgcgagctatttcatctattgcggatagagggcaacaaggccactcaccaattcaaaaccaagcacaaagaggcgctagatggcttaaaagtggcgcgagcgctagctatctggttccaccaatctttcggcaagcaggttgcgacctttaaacccggcgcttttattgctcctccagacccgagcaatcagctcaggcaactccaaacggaaatcgatcgcctcaaaagtgagctcactaccgccaacatacagctagattccagccaacagctgcaaaatttgctggtgcaggaaaagagtgaatatgaaacgctggcgctagccatggatgatgaaactaaggtgttagcatcgcaggcgaaagagcaggaaattgcactcgaacagcttcgacagcaatacgaagaaaaattaaaaatcctgcaagcgcaactgaccgaaaaagatgaaaagcaggcccgaacacaacggcaagagtttgcccagaagagccgccgtgccagccaacacatcgcgttaaatgaagaactcacccgtatactgattgaccaaaacttaaatgatgcgggctggcttgctgacagtcaggaactgacctgggctaacggaactcgccctgaaaaggggataaacaaagccattgccgaatggcctacggagcatcagggtaaaaaaggtcgcgctgattacgttctattttgcggcttaactccgctggcaacggtcgaagccaaaaaagaaaacaccgatgttgcgggaaaaattccgcaggcagaacgctacagcaaaggcttcaaaatcacttcccccatgattggcgcatgggagcgggaaggccgaaccattgcatgggcggatgaaactgacgggcattacattatcccgtttgtatactcctgcaacggtcgcccctacgtgccacagttggccgagtcatcaggaacttggttccgggacgtgcgcgaaccgtccaacatccgccgtgcgctgcaaaagtttcataccccgcaaggcttgctggataaactcgaacgcagcaaagacagcgccgaacagaagctaaagcaagaaggcttcgcttacctccggttacgcgattatcagcaaaaggccattctcgccgttgaaagcacattggcgcaaaacatccgcaatgccctgctggcgatggcgaccggcaccgggaaaacacgcaccattgttggtctaatgtaccgttttctgaaaactgaacgcttcaagcgcatcctgtttctggttgaccgtacagctttgggcgagcaagccacggacaccttcaaagaagcgccgttggagcaaaaccagacgttgtctcagatttacaatatcgctgagctcggcgatatggctacacaggcagaaacccgagtacaggtcgcgacggtacaggccatggttagccgcattttttcctcggacacaccaccgccggtggatgaatttgactgcatcatcgttgatgaagcccaccgaggctacaccttagatcaggaaatgactgaaggggaactctcgacccgcgacgccagccaatatctctccagctaccgtcgggtgctcgattatttcgacgcagtaaaaatcggccttaccgccacaccagcgaaacataccagcgatatcttcggcaaaccgatttacatctactcctaccgagaagccgtggcggatgattggctcatcgatcatgaacccccaatccgttatgaaacgctgctgacgcaaaatggcatccactttgacaaagggagccaggtgcatgccattaatatccacaccggagaggttgagattgaccagctagaagacgagctggatttcaacgtcgatgcatttaaccgtggcgtcatcagtgaaaactttaatcgggttatttgccaacaactcgttaaagagctcgacccctttggcgaagagaaaacgctggttttctgcgttacagacaagcatgccgacatggtcaaacgcctgctggatgaagcgttttctgctgaatatgaaaactataatcaagcggccgtagaaaaaatcaccggtgaaagtgacaaagtcaaacagctgatcaaacgttataaaaatgagcgctatcctaatattgcagtcaccgttgatttgcttagcaccggcatagatgtgccgaagatttgtaatctggttttattgcgtcgggtgaagtcacgtattttatttgaacagatgataggccgcgcaacgcgccgctgtgatgatattggcaaaacggtcttccgtatttacgatccagtggatatttatgaggccctcagcgacgtcaacactatgaaaccgctgagcaaaaatcccaatatcacgcttgaacaattggccagcgagctaaccgatactgaacagctcgaaaaagcgctcaacagccccggcgaacagacaggtgaaactcaggctgatgtggtgctcagtcagttaagccaaaaggtgatgcgcatcctgcgtaaagcggaaaaacgggcagaaaatcgcccagcggtgaaacaaaaattggctgacctccatcaactgtggggcgttgaaccaaagcagctgcatcaacatctgcatcacttagggccgcgtcaggcggcagctttcatccaacaacagcaagggttaatcagccagctcaacgagataactacattactcggaagtgaataccggccgattatttctgagcatcatgaccaactacaggaacgtaatcagagctacggtagccatcagcggccagaagattacctggaaagctttgcggattttattcagcagcagcttaaccaatccactgcgctggcagtggttgtcaacaaaccccgcgacctcactcgtgaacagcttaaagagatccgcttattattagatggtgcgggctattccgaagctaaactacaaaccgccgtgcgtaatcaaactaatcaggatatcgccgccagcattgtcggccatattcgccgtgcagcactaggggaaccgcttgtgccttttgcgcagcgcgtatcacaggcaatgatcaacatttataacagccacgcatggacaatccagcaacgaaaatggctagatcgtctggcaaaacagctggttcatgaagtgatcattgatcaccaatttattaacagtagttttgctgatgatggcggcgtaaaacagctaaataagatattggtagaccaactggacagcgtgctggatgaacttaacggtgcgatctggccacaacaaagcgcctga

SEQ ID NO: 103106 - DNA, 1620 bp, Enterobacter aerogenes
atgagtaataataacgatatcgtacaaaaactttggaacctgtgtgatgtactgcgtgacgatggcatcaactatagcgattacgtcaccgaactggtgctactgctgtttattaagatggtgcatgaaaataccgaagcagaattattagatcagcataccttaccgcagggctgcagatggagcgacctcaacagtttatcgggcctcaacctgcttaaccattacaaacaaatgctattgaagctctccagcggcaaagatgctgaaggcaatttgattcatgccgacccgctgattagcgccatttatgccgatgcgcaaactcgcctgcgtgaacctcgtcatctcgaacagatgattcgcaccctcgaccaaattgactggttcagtgcccaaaaagacggtcttggcgatctttatgaaggtctgctggagaaaaacgccggagaaacaaaatctggcgcaggacaatactttacgccgcgagccttaattaacagcatggtacgctgtatcaagccacagcccggagaagtgatccaagatcccgctgcgggcaccgcaggctttttgattgccgccgatcaatacatcaagcaacagaccgacaacctttacgacctgacggccaaagcgagaacttttcaaaaaaataaagcctttgttggggtggaactggttccgtctacgcgccgcctggcattgatgaactgcttgctgcacggcatggaaggggatgacgaaggcgtcgtgcatcagggcaacgcgctgggcatggcaggtgcaggattgcccaaagccgatatcattcttgctaacccgccgtttggtacggcgaaaggcggtgaagccagcattacccgtgatgacttaacctacccaaccagtaataagcagctcgcgtttttacagcacatctaccgtaacttaaaaccgggtggtcgcgctgccgtggtgctgcctgacaacgtcctgtttgaagcgggcgttggcaccgaagtacgccgcgacctgatgaacaaatgcaacctgcatactattttgcgtttacctaccgggattttttacgctcaaggggtgaaaaccaacgttttattcttcaccaaaggcagcgctagtaacaaaaatcaagatgaaagctgcaccgaaaacgtctgggtttatgacctgcgcagcaacatgcctagttttggcaaacgcaccccgtttggtgagcagcatttaaaaccctttgaggctgtttacggtgaagacgccaacggccaaagcttgcgcagcgaaggtgagtggagctttaacgctgccgaacaggaagtaccggataacttagagaatcagggtgttgacgaccgtatggcgaccagccgctggcgtatatttagccgtgaatggatccgtgatactaagggggattcgttagatatctcatggctgaaagacgataacagcgtcgatgcggctaacctgcctgaaccttcggtgctggctgccgaggcaatgggcgagctggtacaggcattgggagaactggatgcgctgatgcgcgagctgggtgctagcgatgaagccgaggcgcagaagacgttgctgaatgggatgttgggtggggctaagtga

SEQ ID NO: 103107 - DNA, 1362 bp, Enterobacter aerogenes
atggacgaggttaaattgccggaagggtgggagtatagccaattactgaagcttggtacaattgttacaggcaagacacctaatacaaaagatgttgataattttggtggtaacattccttttatcaaacctggagatttggataaaggtggttttataacagagacgtcggatacattaactgaatccggacttctcactgtaccaaaacttcccgtgaatgctattgttgtaacgtgcattggaaatttaggtaaggtaggaatcacgacaaaaacatctgcaactaaccaacaaataaattcttttatttgcaatgaaaatttaaattttaaattcctgtactaccaaatttgcacgctaaagccttggctagaaaatgagtcttcggctacaacaatcgctatagtgaataagggaaaattctcaaaagctcctattagtatcccttccttggccgaacaaaaaatcatcgccgataaactcgacactctactagcacaggttgatagcaccaaagcacaccttgagaaaataccacaaatcctaaagcattttcgtctggcggtgttaacggcagcggtgagtgggaaattgacggaggaatggcgagatataaattcgtctgagaaatgggaaaccgtaaaattacttgatattattgtggctaaaccacgaaatggctactccccaaagggggttgagtatgagacagctataaaaaaccttactttatcagctgtcacgaaaggatactttattgagaattgtttcaagtatgtagacattgatatctctgatgactcgtatctttgggttaaaaatggcgatattttgatccagcgagcgaattcccttgaatatgtaggtgtaagtgcgatatacgagggcaaggacaatcaatatatatatccagatcttatgatgaaatttcgtgttaacgaaagaattctaacaaagtaccttcattactctttgctttctgaaccaacaagagaatatttccgtaaaaatgccagtggaacgacagggaatatgccaaaaattaatcagggaacggtatcagcggctcctgtaaatcttccaccaatatccgaacaaaccgaaatcgtccgacgtgtagaacaactcttcgcctatgctgacagcatcgagaagcaggtacaagacgctctcgagcgcgtcaataacctcacacaatcgattctggctaaagcatttcgtggggagctcacggcgcaatggcgtgcagaaaatcccgatttaattagtggtgaaaatagcgcacgaacattgctggaaaaaattcaacagcagcgcacaagcactaaaactatcaaacgcagcaaaggtaatagttga

SEQ ID NO: 103108 - DNA, 1704 bp, Enterobacter aerogenes
atgcgaataatttctttagaactgagtggcagctacaaaggcttgaaggatcaattctttgattttagttatgctcaagataatatatttgcattgattggccttaatggttctggtaaatcgcaattgcttgaattaatcggagaaacttttgcttatctagagcgatggcaacgtgcagaatttaaaactaaaacatctctaggttttagcgtggcggtacactatcaatgggatcttaggaacgatagtaatgttctgtcttacccagacgagttcattaatcatggtgagagtattgagttaaaggtaactattgaatttgacggtgatgtggttttaaatgttcgtggaactgatgagtggcatttaatagagcatggtgagcgtcagtttcccattcctctcgtggttggttatgcttcggggttaaacgaaaatttacagcgaagttttatgaaaaatgctgtgcaatacttcgaagtccgccgaattagtagccagcgtcacaaaatgctatcacgagaaatcaatgatgagcaattggctgaaattaatgaaagttatcttaaaaaatatccatacatatttagccctttatcagaaggtgatttttcttcgaattatcatctggaattgagagaagtgaatccagcctctagtaattttaactatcttgattacgataacgttgggatcttaattttatcactatcgattcttccgacagagacagtatttcaactgttggatgaaataacatataaacatccggtcaaagccgtacttcattacgacttgcgttctggtatcatagaagatgatgccattcgtgatgtgaaaatgttgatccgcatagcaggttcggatcaagtaaggccaacaggaggccgaacgacagataatcagtatgagctttatgagttagagtatctgtctggagagattactctcgaattaagtgatgaggccgttttaaaccggcttcgtgaagataactactatgattctttttcattatttaaaaggcttaataatattcaacagcttggtataaaaaactgggctcgcacatctcgtttgaaattgatgatagatgattttataggtacggtgaaaaaaccactccagtcaagattacctttatctgttgttgagttattaatggctaatgaacagggtgataccgtgaggtttgatgatttatctgacggagaagctcaattgattcaggttattgcggccacaagggtattcagtcaggctcaaacactatttctctttgatgagccagaaacacaccttaatccatcttggcgtacctattttcaccagcgtttagccgaagcatttacgcctgaaaatgagagaaaaggtcaatcacagtttattttatctactcactcaccattcatgatttcctcgctcaaacgcgagaatgtatttttctttgagcgcaatgatacgggttgtatcagtatggaaccagtatccagccagacttatggcacctcatttgatattttagttaagaaccactatggtttacgttcccttatttcacagacagtggtagaggatgttaaaaatagattgccagaagataatgatcctgaagaaattatagctgcacgacgctggattgaggaaaatctgggagagtcaatggaaaaggcttatctgttaaggaaattagagagctaa

SEQ ID NO: 103109 - DNA, 1167 bp, Enterobacter aerogenes
atgttattctcactcaacctacagactccacaatgctctgtattcgcgttgcttaacgctgagtttcttcattttctggactccagtgttaatgcagatgttttttcagaggcattatttagaacatttcctgagatgatagaagatgtagaagtagaagttcctagcgtatgttggaataataaacccacaagagaaaaatttcatagcttatgggaagcactacctatagctattgctgaacgtcggaggttgtcggatcaaataagtcaggctcaggatattattgtattctttaacaatacacaaacagtgttgccagaattagagccagctactttgttcgaagcatgtaaggcattaacaactcatctgtttacgcgtaccaaagacctagctcaagcgaagtcacaatcaaataactctattgaaatacactatcagaattttgtcagaggaaatagtaatagtcatctttgtcctatttgtggtactgcacttctctctcaaaatagggaaagtgtagcagatgaagagcagtggcgttcagattatgatcatgtgctttgcaaggataaatatcccatttatagtgtccatccaggcaattttattccgacctgccacatctgtaacagcaaagcaaagggggctaaagatgtactgagagataatggtggccaacgaagagtagcattttatccacttcccccatcgcaagagtcatgtgagcaatttgtagcggcgtcacttcaccttagtgatcgtagaggcttaattgagaagagctgggaaacgccattggactcagcatctattttattccccaacgctccagcagacatagttaataaaatagatgtgtgggatgaagtttataatgttacagaaagagttgaacaacatcttaaggccaatttttgtgaacgtatagctgctgatctacgaccagtaagctttgatgatttctgtgagcaattacaaagatattcaagacgaattccagtagactatagaaaatcggaatggaggttttggtggcagaaagtctatgaattcttatcaaatcaaaatagggactatttacatgatgtatggatattacttgactggaaattaagattgtcaaatgatgctgatatggctgatacttttaatcaaaattaa

SEQ ID NO: 103110 - DNA, 876 bp, Enterobacter aerogenes
atggcagtaaaatggctaaccgcaaagatgcaagatgagagtatagatcacgagttcgaaaagtggatttcagggtttctggctcagcagattgaaagcaaccatctcagtatcttcgagaaagatatcgcgacttatgtcagtaacagcgaatcagcaacatttagtagtgcttgcataccactcttccttcattatagaaagttactgaagatcaatagccatcagaaccgactttctcttgccggacgtttcatgagtgaatttcaagcacaagctacagaaaatccttcagtgactctcttgtgcgtaatgctttacgtttttaatcaaattaatcaggaaattgccattgctcccccctctggatggaccctggatgacctgttaagatttctggagcatatccctgccgggttaaaacggtggacatgggaaggctcagggcgaaccaaaggcgcagagcccgtacagtggcaagtcgataatgaatatcatgttcagaatctgctttatattctacttgcaccaatattcaacgacattgctgatgaggtgaatcttcagcctgtcgggcaaaaaaatccccgcattgatctttatctgccatcactacacacaattattgaagtgaaataccgaaaagatacaaagaaatcgtttcctgcattaataggagaaattgcagaagatgcgtcactttatcgtgtcgacgaaaaatataaggattcacgcatcatcagtttcttatgggattgcacgcgtgcaacgcaagaacatacgaaattcaaggagggggtattgaagataaaaggtattgatggttgtgccataataagcgcaccttcaacaatgagttttaaaaagagagagtaa

SEQ ID NO: 103111 - DNA, 909 bp, Enterobacter aerogenes
atggatataaatcagctgcgttgctttgtggtgttaggtgatgaacttcactttggccgggctgcccgccaactcgaaatgatgcccgcgtcactcagccgtttcatcaaactgctggaagacgatctggggataaggctactgaatcgatcgacccggaatgtatcgctgacacctgaaggagcagagtttttacatgaggccaaagccgtgattgctgattttgatgcgctacggctgcggtttcgtaaaaatgcgctgccgcaaaaaaggacgctgcggatcggtgctattgatagcgcagccagagggttactgccggaattgcttaatcttttcgtcaggcagtttcctgatgcggatattcatattaccgaagataagtcgcacaatcttatcccacggctcatttccggatggctggatgtggtctttgtacgtccacctgaacatgctgatgttacgctgacgacgcgttttattgcgaatgagacctgtgtgctcgccgttcctgctgaccaccgactggtcacttataacgaagttagtatcgctgattttcgtaatgaacccgttattgtgccggaaagacgtacccgtcgtcacagccatgacctgacaatgaatattttcaaagagggtggctgcgtgcctgtcattgcgcagtatgccgaagagaagcagaccatcctgagtttagtcgctgccgggttaggcattgcccttgtgcctgcatcgtataaaaatatgaatgctgacggtgttaagtatcttgctctctcgtcgatgaagcatcttgaagggctaccactgagcgcaatgtggcatcagggaaataataatatttatgtcagatccctgctggatatgctttccgacaacatcgaagaactgacccgtaatttgtga

SEQ ID NO: 103112 - DNA, 273 bp, Enterobacter aerogenes
atgcacactcacgcaaaatgtgtattgggaattgcctcacagttatcgtggatgggtgaattaggcccggagtttactgtgaggattcccatgaaggtaagcattaatgccaaaaaatgcctattttggttcgacgatttgcgctcgcccttatccatagaaccatcagggttagctaaagaatcactacaaactttaactatttattttaatcaggagatgaggaagagagccatattaaattatgttcctcatatctctattatatattga

SEQ ID NO: 103113 - DNA, 336 bp, Enterobacter aerogenes
atgaggcctttcttttatttcaatttgcaaaatgaaatggatttaaaaatgaatatcaaaaaaacaacattagctgatggtcggcaggggattacaatttttgcagagccggatattatttctgaaatggtagctctttgcaaacaacggaatatccccgtggaagaatcaccggaggtttcccaggagactctggataatctgaccaaaaccgctaaacaaatctcagctattgaaaaagttaaggctattgctgatgaacttaaaaacaaaaaagctgttgaaactgaatctccaaaacaaattattaaaaacattcttaaggggaaaaaatga

SEQ ID NO: 103114 - DNA, 1041 bp, Enterobacter aerogenes
atgagcacagcatatgaacaactcctagttgaaaaagttatcgattttggggacagcttttccgatgtaaaacaacctaacaacgtcatcacgagtttaaatttatttggtgatgagaatctcagcatcaataaggttttaaatgaccgtctcgtagaggatgcagatcgcgtcaatagtgaaaatgctccttatgtgcacagtgattttaacaccactgaattacctacgtttgacagtcatttcgtcgaacttcgaacatttaaacgggtagacaaaattagctctcgctcgttcgaacaggctcgtggttttggcaaaactgtagctgaaactatggacgaccagattgcaaaataccttattgaacatgacatcgcgtatcaaaacacgctggacactatcctcgctgaggctgttctttcaggtaaacaatctggagtttatacggctcaaggtgatttatctttttttgctgaatttaatcaaactaaatccacagcaaccttcgattttagtactactgcaaatgttctcgcacaactggatgctgtacagcgccaaattcgacaggcagcacgcagtaaactgaaatccatgcagggaattgtttgtttatgtactggtaatatggcacagaatttggcctaccacaaatcgattcttgatgcagttatctatgcaactcctgttaatgacccagctaattttgttggcactctgcaattttacctccaggcctatcctgtatggtccctaaaaggtattacttttgttgatgtcactggtgatagctatttggaatcactaattggtgagaacaacgctgtttttgttccccgttttgcgcaggatagcggcgtatttaaactgtttaacggtattggaaccatgcatgcaacgcttggtaaaactccggctaaattccatcaatatgcgattgttgatgaaatgcaatttccgacactgatttcagagtctgcacacctggcaattaataacctgccacaggctgtggtatacgctagtgtctccagctaa

SEQ ID NO: 103115 - DNA, 1734 bp, Enterobacter aerogenes
atggcaactaaggtagaagcggcaacactggttaacaggattgtttataaatctgatttaaatagtctgaaaaaagttagaaacgacatgaagaaactccaacaggagttttctaaatcaaacaaccaggtagctaaggccaaacaggtagcagataaacaagtacacaaggctaacgaacagaagaaattagcggcagcgcaagcacgtgctttgaaaattcaacagcagcagcaagccaaaacagccaaaatcagcgagaatgcgcgtttggcagagcgcaaggcattatttgatatcggcagattacaggggctgcatggtgctgaacgattccaggccatcaaacatgctcaatcgcttgtcagccagtatcagcaaggggctatttctttaaaagatatgaatcaacagttatctcaacatctggtaactcagagagctatcgctcgaaataattcaaaacaagctaaacaatcaggtaaaaaacctaaatctgggcgctctggtagttctggttggctatctcaaaacgttaacgcaattgtcccacagcaattattatcaggagcagcaggtgtatatctaggacaacaaatgtacgccatttcctcacaggcaatttctgattcactagccagaaatcaggacaggaaaatggttagctctatgggtttaaatccccttgaggccgatgcggctattatggagacgctaaaacgaactggatttgttatgtccggtgctaaaatttctgatattgcaaaggatgtccaggataagatcggccagttaagccttggagaatggaaaactgataagaaaacagggcaatcaacatattctggcggcggtgaaatgtcggactggctacaaataatggttaatcgtggcggttactcccaacagggagccttaaaaactctccaagatgtgaaaggccccgttgagttggctgtacttttaaaatcccttcagaagagcgccaaacttactgagtctgagtttaccgcgctagcagaaacaataaatgacttttcttacttagcaaaatcggtagatgcatctggtcagaatgtcatcgccacaatgaatatgatggtagaaaatggattagcactgaacgatgctcaacagaaaactattgatggattaaatcaaatggggattgtgtggagcgctattaaagattcaggcgctgatcactttacattaggatttgctgaggcaatgaaagaggctaatttaaattctgataatctggctaaatcgttctctgggttaaatcctcttatggagaatttaggccaatctgctggcgaactctcaagagtattccttgattttgcaaacaaaattggtttaaacgttgggaagggtcaaacgttgccggatgctgtttataataccgtggttgatagtagtgcgaatagtgccgctgactggatacaaaatatgattggatttgatcctcgtagtgtagggcgtttttttagttctgattcttctgttgcagcacaagtgcaaagtggaacgctaatgaatcaaatgatgatacagactccagctatgagttatcaaccaatcatcccggatttaaaggccgattttaacctcacagtgaatccatctcctgaatttggaatgatggtcgaggctgtagccgataaacgcattgaatgggcatttgatgatcagaacttccagattaaccaaagcattcttggtcagtga

SEQ ID NO: 103116 - DNA, 621 bp, Enterobacter aerogenes
atggatttacaggcatgggataacgtcatctctattgcttcgaatgctgtaacaggtttaagcgtgcttggtggcgtcatcttcagtgggtttaaaattcaggagatggtgaaaaacaagaaaatggagcaagcgttcgcatctgcaatagcgcttaaggatgagatcgatgctacgaggggtcgttataatcgtatgcgtttcgaccttacgcgcataatgacttttatcgacacgctcgcacagacaggccaaagagtagatcaagagagttactatcagattcaaggatccttgagagatatggcggaaaatacctatcgtattggtagctgtttcatcaaagttaggcactataacgttgctatcaaacaaccagcctgggaaccattcaacgcccttctacacactgctggtgaaacacaaaaagctatatctaaattattaaatcttatcacgcaggccttacttaaagagcggataacaacggaagactacgcgaaaattcgtaatctttatgatgaacatggtgaatggatgaaaggtgttaattacgcaatcgccggagtagatattattaaatttgacgatttatttgacttcataaaagtcaataaataa

SEQ ID NO: 103117 - DNA, 657 bp, Enterobacter aerogenes
atgactgagcgcggaatgatttttaacggtgagatggtgcgggccattctcgacggccggaagacacagacccggcggcctatcaaatggaaacagactcggttcactgaaattggtgagcgcgaagacggtagcaaatggccgtggagcgaagatgcagagcatgcttgcgacttctggcacccatgcccgttcggcgccgtcggcgaccgcatctgggcgcgtgaaacatttcgggtgcatagccgggctacagacgttgccaccttggtatacaaagccagcgtgcgaaattcgtggacggagcaaacccatcgcgtgcctgtagctgtctgcaataaagcggcaacgcctgagaagtggacaccatcactacacatgccgcgctgggccagccgcattctgctggaaattacagacgtgcgggttgagcggttgaacgctatcagcgaagaggatgcgcgagcagaaggcattattgacggtggctgtctgaattgcggggaacctgagccatgcggatgcgccaatccagagcctgatgctaccgatgcttttgcctacctgtggcaatcgatttacgggcaggaaaactggaatgctaatccctgggtttgggttatcgagttcaagcgcgtaaaaggcggtgcagcatga

SEQ ID NO: 103118 - DNA, 423 bp, Enterobacter aerogenes
atggaaagtatgactaccgaaaccaatcaagtttttgcttacaggtttaaccaagccattactgagcatggttggaacctttccgatttagcccgccgcgttggcgtaacgccgcaggcggtgcagaagtgggcgaaaggaagttctataccgcggggcaagaagctgaagttgcttgctgaagtaacgggaaagcccgagcattggtatttcatgcagcctgatacagatgatcccgaactggtagctcaactaggccttcccaaaaaactcgatgttaccgaagaagcgctcctaagcatctttaaccaacttcccgaagcagaaaaactacgtttaatccttcacgcaaagggcgttttgagagaccttcaagcactaaaagacgatgttggtgatttgataaaagaccttaatcgctaa

SEQ ID NO: 103119 - DNA, 231 bp, Enterobacter aerogenes
atgaacgagcaacttaaaaacaaagttaaatcaatcactacacaaaccgcgcttggtgaggcaatgggactttcatctcaggctgtaagtcgctggatgaattcaggaaaagtccccacatcacgggtgcgcgcgctttgtaagtttcttaattggcaggttacacctcatgaaattgatcctgaggcgtacccaaaccccactgacggcctgccgaaacaggaaggctga

SEQ ID NO: 103120 - DNA, 204 bp, Enterobacter aerogenes
atgacaatcgtaaaaacacatattggcaccgtgatcaccaaagacggtccgcaggtaaaaaaactgcaccagacagagcggatgggggtcgtcggcaaaaacgagttttaccacaaagaaacagggcgccgtcactttgcagagcaaacgcgccgtcggcttatcatagactcaattcaacctatcgtggtgaccgacaaatga

SEQ ID NO: 103121 - DNA, 1305 bp, Enterobacter aerogenes
atgaatagttttattaaatacaacgaacaattaaggaatttatattcatcatatattaatgaagtcgatttggactcatttaatcatatattcaaagaggatgatccacatgagtatttgagattaaatgaaaacatcaactccctccgggatttcggggttttttttacaggagaggaactttctgcagaatgcgcacagattatagcaaaaacgttgcgtgaggattcacgagttattgatccgtgctgcggcgcaggtaatttgttagtggcgttaactaagtatttaccagtttctaaaactctgactgaaactctcattgaatggaatttattgatccatggctttgacttaatggatgattttgttgaggccgcaaaaataagaataatttttcaagcattaaatcgaggcgtgctcattgatgaaaaagatctgcaaaaaaatatggatcgcctcaataatataaaatgtaagaacggtttggatgatgatgttgacctgaatgattatacgcatgttattattaacccaccttataatcaatcacttttgaacgaatataaatattggagtggtggaaaagtcaatcttgcagcggtatttattgataaatacattactgatgccgataaaggtatgcatattgtagcgatattgcctgatgttcttagaagtggttcacgttatgaaaaatggcgcggtgctattgaacaaatattatctggtgaaataatattaaaaggtaggtttgataagaaaactgatgtagatgtatttgtattaaatggtgttgtagatagttttaatacaggattaaagtggactctagaaaatactgaaggtcttaaattatcagactacttctcagtttcaattgggaaggttgtcccatatagagatccgcaaaagggagaattacacgcttatatttatccagggttgttaaagtcttgggataaaattgatagtagagatattaagtcaattagaaggcatgcaagtactcctatattaccaccttttattaccataaaacgaacatcgtcaccaaaggataaaaatcgagcaggtgcgcatttgatttatggtacagcccctgtttttgttgaaaatcacttaattgttgtaaaaccttttgatgataatctagataaatgtaagaaactattagaacatttgaaatcatcggatgttaatattttcctgaatgatgtcattcggtgtagacatcttaccgtaaaagttgtaaaggacattccatttaagttagaggaacaagatgaagaaactaataagtag

SEQ ID NO: 103122 - DNA, 2139 bp, Enterobacter aerogenes
atgaagaaactaataagtagctatgcttttgatttgtctccgagagttccattacaacttgggagggaaagtattgctaattccacaacagctgttactgaattggttaaaaactcttatgatgcagatgcttcaaaagtaagcattaaaaccttcaaattggataaacctatatctgtaatggtgattgaagatgatggaaatggaatggacccagaaacattgatatcatcttggttgaagattggcaccgataataaagtttataataaaaaatcgttaaatggtcgagtactaactggtgcaaaagggcttgggagacttggtattgaccgattatgcagaagattgattttacaaacaaaaacaactaaatctgatcatttgttgcagctggatattgactggaaaaaatatgaagtaagagataaaagtttttttgatattaagcataatgtttttaccgttgattatccttctgaagataaatacggtaaaattttgcctagaggacacggcactagaatgatcttgctcggtttaaaagatgactgggctgggtatttatataaggatttggctaaagaattaaggcttttggtatcaccattttttgcgaatgatgaatttaaaatagaaatggcaactgattttgatgaatcacagaatctaaattcatcggaaattctagattactcaagatggtctgcggaagccagtgtaaatgaagatggaagtattagcgcagagtatcgatataaaaatgagttggtcgattcgtttacccttccatggaatgaatggattaataatagaaataacatcccatcatgtggacctttggatgttaaattatattatataccgcgagaatccgtgtctgatatagacctaaaaatcaaacagataaggtcgtttcttgatgcgaatcaaggtgttcgaatatatagggataattttagagttagaccatatggcgagccttctggtaaaggtgattggttagatttaggtttaaggaaagttagaaacccagagggtatgaggcaaggtaactggaaagtaggtcctaaccaaatagttggtgcggtgtttattaatcgtgataaaaatagcactttgaatgaccaagcgaatagggaagggattgttgaaaatgaatcgttctatgatctccgaacattcattttaaaagtaatagagaaatttgaaagcctcgcagtgcttcagtcgagaaaagagtctgcaccagagaaaaagatagtaattgaagagttgaaggaaaaaaataacaaaacgaatgatgttaatttaaaacatatagccaagaatatgttgaaagtagttgaacaacaaaaattggaaactgagaaggttgatcaattattagtggaagttgagcaattaaaagacactatggccaacctagcatcgttgggtattttaactgtttgtttagggcatgaaacaaagcaacatacaagcatgtcggctactaatatttcaatgttaagagaaatgattgaagaagatatagcaaaacttgacactgaaaaagcattgacaagaatcaatctgctagagaatagtataaaatatatttctgattttgcagggtttgctttaagtaatgttagacctgataaaagaaacatgaacaaacttcaacttaataacgttattaatgatgttattaagatttttaaccagtccttggttaaaagtaatgtagaggttacaaaagaatgggattctaaaataggatttccgatccgaggttataggattcattgggaaagcataattataaatttccttacaaactcgctatgggctcttgaatcgactaaggaaggaaagcgagaaattaaaataaaattatcgttggataccgaattaaatagagttgaaatgcgttttcttgacagtggtcgaggtattgaattcggaacagaaaacagagtgtttgatacaggatttagtacaaaaactgatgagaaaggagatcagtctggtacaggaatggggctctctattgtgaaaaattttgttgtggataatcataaaggtgatttaaccgttattcctaaaggcgagcttggtggtgctgaatttgttatcacggtacctgtttattga

SEQ ID NO: 103123 - DNA, 633 bp, Enterobacter aerogenes
atgagaacagtaatttatatagatgatgattttgaagctagggcaacatatcaagagccgttgcagcgattattcggggatgatttcgatttaatagcgatagaacccgaatttgaaattacagatatgatgaatagtttacaacaatataataacgttgtagcgtatatacttgatgagaaaatgaatcaacttgggaaagcaaagtacctaggtcggaatgttgccgagcaattaagagtcattaactccaagattcctatttacatatttactgcatataatgatgagtttgatagtttatatggtccagcggatgtcgagtacattattgcaaaggaaagcttatcggatcgagaaaaaagaaattcgctttccgctaaaataagaagacaccaagatatattttcagatattaaaacacatagagcagagagactagatgaattactgttaaaatctatgactgatgaacttaatgatgaggagttacaagagtttagaacacttaactatttgaggactaagagtattaatcttcaggatgctgatattattgatgctctggccgagaaaataaaagagaatgagaataaaatttctgaaatagaaaaattatttagggggctgtga

SEQ ID NO: 103124 - DNA, 627 bp, Enterobacter aerogenes
atgttttatccaaaattaactcggagaaaaaattactcaataaagaaaggaggggggtattatagatattcatattacaaggatgaaatactaactgattgtcaaaaacgatgcgtatactgtgatctactgcttgaggagcatgcgtatgaaggaatgcacttggatcattttagacctcaagtttatttcaaagcaataactaacgaccctaataatcttgttatcagttgccctaaatgtaatatattaaaatctaatcactggccttgtgataaattactaacttcaacgccgagccataatggtaaagttgggtttgtagatccgtttatggaaagtttttctgattattttttagtaggtgatgatggtgtgttggaaccattaaaagatcctgctgcatatatgttaaaagtttttgatttaaatcgtcaggctcgtgtcttatctcggaaaaaaagaatacagctgaatatcatgttgagtttatttaaaaaacttgatgataaaaccgatgagttgttccagctaatggtgaaaaaggaaatttctgaagatttggctgaagaaaaatataaggctattattacaataagggaaagcttacgggagttacttaaataa

SEQ ID NO: 103125 - DNA, 333 bp, Enterobacter aerogenes
atgagacttgaaatcactatcgaccgcaagaagcctttccgtgttgaacccgaaaagagcatgggagactggcgtttcatgattagtgagcctggtatcgtaaatattgaggatttgcagcctggctggggtttgcttcacgtggtcaaaggtcgggttatgaaggttcacggctggcctggcaaccgggcgtggtttaaccgggacagcaagccatttcaggctaacaaacaggcggaatgcgattacatgtttagcgcgctccgtcgtatggacttgcgggtttttctctccctatgctcattttgcttttatccccgggaaggacgataa

SEQ ID NO: 103126 - DNA, 375 bp, Enterobacter aerogenes
atgagcggtaccagtgtgctgacccacctcgtgcgtaatgcgcagggggcatcagtgacaactgaaattccggtgccagccggactgactgcaggaaagtatattttcttggcgttcagccgaaacgggaacaacctgatttcaatggtaggcggcgcatctgctcaggtgaacgtagcggactccgttaaaaccccggcaacagcggcaaaagttgggcccggaaacacggcatacaacaccaatggtttttcaaaacagctggaggtagtcgagtgcctgtatcgggatggcccaacaacgctagcagatctgcagacagcatatgctaatgccaaaactcgctgcgcactccgcggaatttctctcctctaa

SEQ ID NO: 103127 - DNA, 1059 bp, Enterobacter aerogenes
gtgactcggactctgacagcgattcggattccgacagcgactcggactctgacagtgactcggattctgacagcgattcggactccgatagcgattctgactctgactccgactctgacagtgactcggattctgacagcgattcggactccgacagtgactctgactctgacagtgactcggactctgacagcgattcggattctgacagcgactcggattctgacagcgactccgattcggacagcgactcggactccgacagtgattcggactccgatagcgattcggatagcgacagcgactcggactccgacagtgattcggactccgatagcgattctgactccgactccgactcggactccgacagtgactccgactctgacagcgactcggactccgacagcgactcggattctgacagtgactcggactctgacagcgattccgactctgacagtgattctgactctgacagtgattccgactctgacagcgactcggattcggacagcgattcggactccgatagcgattccgactctgacagcgactcggattccgacagcgactcggattctgacagcgactcggattccgacagcgactcggactctgacagtgactcggattctgacagcgattcggactccgatagcgattctgactctgactccgactctgacagtgactcggattctgacagcgattcggactccgacagtgactctgactctgacagtgactcggactctgacagcgattcggattctgacagcgactccgattcggacagcgactccgattcggacagcgactcggactctgacagtgactcggattccgacagcgattcggatagcgacagcgactcggactccgacagcgattcggactccgatagcgattctgactccgactccgactcggactccgacagtgactccgactctgacagcgattcggactcggatagcgattcggactcggatagcgattcagattccgaaccgcaggcaaatgatgatacgcatacggcagctatcgataccgtag

SEQ ID NO: 103128 - DNA, 390 bp, Enterobacter aerogenes
atgaaaaacactgaagaactcaacaaccaactgattgctcgtttggaagaaattactcaaagagggatcagcaaggcggatatggctcgcattgctggagttacacctcaagcggtgaatgggtggtttaagaaaggagtaatcagtaaaaagtccgcaattgccctcgcggaagctgccaatgtgtctgtaacttggttgcttggagagaaggtatctgaagattcaggcctcaagccaaatgagagcaaaatgttacgcctgtttaggcagttacctgaagcagaacaagagagaatgatcgatacttttgaagtccgcctaaaagaaatcgatgattatgttgagaaatatcttcgtggtcgatttaaggctagcgacactaactaa

SEQ ID NO: 103129 - DNA, 216 bp, Enterobacter aerogenes
atgacagcccttgataacgcaattcgagtagctggctcagccaataaattagcatcaacgcttggagtaagcggcatggcagtaagtcagtggaaaacaaaaggtattgtgccttcatcgcgagttttacaggtttttaatgcaacgggcgttacgcctcatgaattacgtcctgatctatatccgaatccaacggatggaatacctaaggagtga

SEQ ID NO: 103130 - DNA, 603 bp, Enterobacter aerogenes
atgaccaatagccagttaacagacttacgcacgttgattctttcggaagtcggggatttctttgctgtggtcggtagtcccggcgagccggaaactccggaaaaaatgcaacgagaactgtccatgcggctggggcgcattctcaataaccacattgttaactatccgcgctgcgaggtgttagttgaaattctgcgtgagtgtcgaacggcccgtgacgaagcgcaggcagagctacaggaacgccgcaaggccgacagtgagccggtgatgtacgtaatggggatggggcgggcgcttgacgccgagacagcgtcaacctgcaaaggggccgtggactcttgggtagatgagtggaaccaagggcgcctgccgggacaggctgagtatcatgcggttccgatctatcgccacgcgcagccagcgccggaagtgccggaccgttccatattcgaaaaatggtgggaatcacagaacggagttccccttgatggctgggattcgttacggacaaatgacggttattgtgatgatggcattgacagtcagtttgaagcctggagcgccgccatgctcgtagccgccccgcaggaggctaaataa

SEQ ID NO: 103131 - DNA, 798 bp, Enterobacter aerogenes
atgttgaaaaacggatgtaaaatgataaatcagaaagttatagatgatctcatgtggttatattctatttttgatattaagcttttgactgtaattgctactgggtttactatttattttggatatcaaaaagtaactaagaaaatttgcgtttcatatggcgttagttctagttgtttatatgattcacatattgcgaacttggttgtctctaacaagagggataattcaattgcaatatcatctataatccttggcgtcagagagaaaggttcttttgaattggtaaaatttactgagccattggttttgaaaggttacgatactaagctaattgatgtgcctaaatatagttccatttatgataggaatgggccgatcaggttcgatattttagaatcattctccttttctattgtaactatttctggtgaggtcgtcgtatgtgaagtggaaagtccagtaacaattaaaacattagaggggcaattatctaagcatattgttacttttaatgatattgttcttacaaacagaatgtcattcattttttcttattatgttggtgggaagtctgaggatgtgattattgataagtttggatttattccagaaaattcaccttttaattttaatatgctttcggatatgtcgaaagatttttttgagtcttttttggtttcacaaggctatcatgattattttgacaattatgctctgtacaaagtccatgataatctccaaactgagctagttttaagcaaggcatcgatgaatgctaaaataggaaagaaataa

SEQ ID NO: 103132 - DNA, 432 bp, Enterobacter aerogenes
atgttcttttcagtgggcgttgaaacgccaaaagatgaaaacaccgcctacggtatgattgttcctgcgttttcagcttatgagatgggttgcttctccgccgctgatacacaggaccagatcgcgccaatggttaaagaagccattctcttaagcgttgagtgtctgatcgaagatgccgggcgcagcgtcgatgaaatcaaagacgccggttatatggtgtatgcagctaacccagaatataaggactttgacagctggttcatggttgaagttgatttgtctgagttcgaaggcaaaccacagcgtatcaatatttcactgcctgatacgctgattaagcgcatcgacaatgccgtaaagggcaacgccagctatcgtgacagaagccattttctggctgaagccgcgcgccacgaattaaaaggttaa

SEQ ID NO: 103133 - DNA, 183 bp, Enterobacter aerogenes
atgaaatcgactgacctgataaaggaattgatagccgccggatgtgaactcaaaaggcaagggaaaggcagtcaccagatatggtggtcgccaataacgggaaaaacattcccggttccacaccctaagggcaacctaccgatcggcaccatcaaatccatcaagaaaacggcggggatctaa

SEQ ID NO: 103134 - DNA, 375 bp, Enterobacter aerogenes
atgagcggcaccagtgtgatgacccaccttgtgcgcaatgcgcagggggcatcagtgacaactgaaattccggtgccagccggactcactgctggaaagtatatttttttggcgttcagcagaaacgggaacaacctcatttcaatggtaggaggtgcatccacgcaggttaatctgacggattccgttaaaaccccggcaacagcggcgaaggttgggcccggtaacacggcatacaataccaatggtttttcaaaacagttagaggtggttgagtgcctgtatcgggatggcccgacaacgcttgcagatcttcagacagcctatgctaatgccaaaacccgctgcgcactccgcggcatttctcttctctaa

SEQ ID NO: 103135 - DNA, 132 bp, Enterobacter aerogenes
atgtggatgttgaattttgttggtcacaaggcctcgatgctcagtaaagatatggtggttaaatacctttacagcatcttcgtcactaatcgcatgtctcgctgccttattgctctgccttggctcgggtag

SEQ ID NO: 103136 - DNA, 1863 bp, Enterobacter aerogenes
atgataaagaatatagatcatctaaagaagaaaatttatttatccagcgaaggtaaaaaaaggttattagcgagaaactttaaagaccttgaattagtattaaaagagctaacaaggacaaacttttgctgcgtcagtgatatattaaaaactacagatgtaaatataatgcagattgaaaatatttttctaaatctaccttatattaattattttagactggatggtgttatatatcttgttctccgaaatagcttaaatcatccatatggtacagttgaagagttaccgctgaaagagcaacggtctgctaaaaaagtcatatctaattttaggcaactacaatataatgagttttcatcatccttgcttaatagcatatcatcgctcgatcgtgaaattgaaaaaattcatgttcttgctccaggattacttgcggatactaatctcagagagttgctttctgattttaaaaatatgtctgcattaatcaattcaacaacgttgtctattgataaaaacgacgaagagcaaagtttacccgaaattgttgagaatgatgattttgatatgtctgatcttgttgatatgtcctatatcactggtatagaaggtgatgtcacatcttcagatgatgataatagtggagatgaagacagtgaggatgaagatgaaggagctgttttaagagttccgaatattcgtagaactacccctagttttgctcttttgtatgagcgtttgctttatgatgaaatagaaatccagccagactatcagcgaaaagatagaatatggggtgatgataaaaaatctaaattaatagagtccatattaatgggattgcccttgccaatattttattttggggaaaggaaagatgatacatgggttattatcgatggtttgcaaaggataactacagtccaagattttatgcagaataaatttccgctaaagcttgaaaaaggttcatctgtctatgatgcaaatggtttattattcaaagattttaatcgtacatatacacggttattgagagagtttgaaataactgcatacgttattgatataatagattctagttcaaataaattcattactgagctttttcatagaattaatacatatggtgtaaaattaagtgatcaggaaattcgttctgcaataaactttggttccagtgtttattatttgaaattccttgcatctacaaaaatatttacatcagctactacaaacactgtgaacactaaaaggcaaaaagatcttgaactttgtttgggcgcattggcatttatgatatttggatataaatcctataagaaaaatagatatgatgattttttaactgaagctatgagatggattaatgaccagccttttagaaaatcaactgttaatgatatagtgacgtatatttctgaatcatctattataatagaactcactaaaagatttgaatcaagtttaaagttttgccaagaaatatttggtaaagatgcgtttaaaaaggtgcggaattcaagcaaaaaggatcctataagcaaaccattatttgaaatgtttgtttcacttttttcggatttaactgaagaacaacaagatttaattcggagaaataaatctgattttttgatggctttttatgaggccattaataaagacgttgatttctatgcaacttggaatagtcagccatatattgaagcacaacgtggtttcaattattctatatctagctcaacaggaaagagagtaactattctttatagatttgaagctatcataaaaatgataaatataactaccggttgtgaaatatccttgtcgccaatagtagtgagtaaaaatcatgattaa

SEQ ID NO: 103137 - DNA, 351 bp, Enterobacter aerogenes
gtgaaaattattttagcattgccgattattatcggggcattcattcttactggttgtaagtcaccgtcggaagtccgtcagagtggtccggaagaaatatttcattcgaataagaatgtgaatgatgtttctgagtgtattttatcaggctggcaggaaaaaagttttctaacaggacctgtcccggtatatattcagccttataaaaacggtaagactgtctatatagacgtatatacttgggttgcagatgtgattcctgaccaagatgggaaaagtaaagttatttacttctctcaaaatgccagaagaagcgctgaaatgaaatcggtgatcaaatcatgcatataa

SEQ ID NO: 103138 - DNA, 603 bp, Enterobacter aerogenes
atgaattttcatgtccacctcgccagacaacttatgttccttaaacgctcttgcgaagcctatgattctggtgcaacagatgaagctattcgtatggcgacgatcattagagttctggtgcataacacaaaagcgtcaacatctcttttaaaacacctgaacgcaacaactatcaatttgctttccactaccgaggatgtatcacccaatgctgttatgtattttggtcttggcacaatgcaactggggaatagcggttgtaagtattttgcctcactcgatttttgccccattaagaaattggttccggtgagtcgatggtggaatcaaatagtattcgttcttgaaccacaaactcagctaacccggaaaaagattgttctttcagcagcaaatcaggatggtggtgcacacgttgatgccaagctctcaaaagagtatgaagctttatctactgaaggggcaattggtcatttcgtttatactcagcaagaaaaatctgttcagcagccgattactgaagcacatttcgtagcaattagacagatggcctatgaaatacttaatagtccagaactaaatgccctattacctacctcttaa

SEQ ID NO: 103139 - DNA, 177 bp, Enterobacter aerogenes
atgtctaacttagtaaatcctgagtactccccggaagaatcggcttatgcactaatcattgaattagttagagctcaaagagttccggtttattcctcaggcgatatctcaagcttactttcgatgtatgacgatgcagtcaaacacttcaaaggtgatggcaaagataaaaattaa

SEQ ID NO: 103140 - DNA, 570 bp, Enterobacter aerogenes
atgacaaacctcccctatgaatatttccttggtgccgatgatgacctcgtcgactttctcgaaaagcaaggcgaggaatgcataaaagaaattgagcaatcaaatgcaataaacaaagagaacggttataaactgctcggcatcctcatagtcggcgtcgggtcttcgtttttattgttgacgcaaaataaccagcctcgttttatgacgttaggcatcgggattttcatgttgtactgggcggcatgtgcaatttacctggtttcaggcgtgctgtctgtgcaggtgcgcgcgctccttaactcagctccagcagacctttacactgaactttacaagtcattggagccagcgcattacgaggaactggcgcagaaaggatttaggggtgagaggacaccaatttcagttatccggcgaataagactggctaatctccatgatacggctgaagagttgtgtgagataaatgagcgtatcagaacaaggctggatagagcgaggatcgcaacaatcctcactccggtttgtgcattagctatttctactgtgggctatctttttttctga

SEQ ID NO: 103141 - DNA, 237 bp, Enterobacter aerogenes
atgtcagaaattacacctgcagaacagattcgactaaatctgctttccactctgaactacgacactgcggccgctgctaaggcaattgagttcgttcaggatagccagcttaaatatcaactattcatccagcagtacaaccgtgtgcatactgaatctgaagtggtggcacggaccatcaaagcgattcaggaagcaaccgaagcgatggcgctgtttgataccgccgctgagtaa

SEQ ID NO: 103142 - DNA, 600 bp, Enterobacter aerogenes
atgcaagaaaatgaaatgcaagagcagcatgaaaaactggaaacaaaatctcagactatcgatttttcaacggaatttgattctctgataaatgcgaaaggaaagattactacttccatgctaacggcggttaatcgatactttttgtacttttctttctttgagtctttgcttcttggatgctctggagggcaaaagaggagttctgcctatgcaaaggctctcaaagatacagggtattttgatgaaaatgtaattataacaacatttcacatgttttcagatagatacagcaatgataagcaaagatatgagagcctctgtggagaagatggatatacaagccatcaaacgaaagaaaaatattatggttttatgcgtgagaaagcagaggatcttgttactcagtttgaaacatgtctatttgtctgtttcagactgaggaataatctcttccatgggccaaagtggcgatatttacttgatgggcaagaagaactacttctgactgccggaacttttatacattcgattcttgataaagcccccagaagtgaagaaggttgggattttcaggatattttgtcgccaacagaatag

SEQ ID NO: 103143 - DNA, 336 bp, Enterobacter aerogenes
atgtttacatctgataagtatgacttcattgcttttggtgggtgccataatggctccattgaaaaaggggattatgaaaaatttaaagagatagatgctgatggtcatgcggggcgcacgaagctattcgcaaaacctttggttacgcacagagatacaacctcaaataaacaggtagagcccattactcttgaggaatttttggttaaagagtatttgtctagagatggtaagacatatctcatagcaacttatggggatgtagaaccatcagatgatgagagggttgagcagatcattgccctgtgggctccacggccatacgtttgtctatag

SEQ ID NO: 103144 - DNA, 894 bp, Enterobacter aerogenes
atgagtgatatatttgttgatgaaatatttgcatcgatgatgttaccaaatgaatccgcattatataattctccaggcagtgggacttggcctttgcacggaagtgtcgttcagggagtcccgctgggtgaggcggctcctgattactggcgggatgcaataattgccagcggcgaccctgatattcaaggctatttggaaggaccctggaccgctatcaccccatggtttgttgtatatcccgcagataacgaagttaaccctgtcagcggtgtccgtgtagctgtcagtgacattgcgctgtgggctctttttgcagatgctgatgacccaacggatatcagcaaagctcaatggaaagaaattacaattgcttcgctgccaacctgggccgcaagctacgattttgatttagtcaattatattgataatgcagcagatttaagcacggataactcgtaccggatttatcaactcgatgatgaaatgcatcctgtgcatggtggatcggatatcgtgtgtatcaatgatgattgctcaggcgcaaacatactggcagttttctctcagattaaggcttggctaccggatgcggggccggaagatcagatactgttatcaatgggggctgattactatccgaatgaaacagtgagagcttcagatctgactggtgtgaactatcttcctggtgcgtacgggagtcgttataaattcattacctctacaccacaatatttttatgccgcaaatgttgttaacccagacgttctcgatagtaacggtaatcatttttatgaagccagtaacccttacacgagaagtggtggcaaaacgtatttaactcgtgacgagttgatgagcaacccaccaccacaacccactggatcttga

SEQ ID NO: 103145 - DNA, 375 bp, Enterobacter aerogenes
atgatcatcggaaggaacctcacttctcagaaggaatttactcatccgagaacagaggcttgcaccgacagagtgattaacctgatttcaccgactatcgatatcctgaaaaatcaggcggagatgaccaggttaggaaagcagtatcagattgaggtgaaactgatggaggatgggagaagcgaaattcatccatgtactttcgtattcaacccacagatagtgacgcgcaatggcctggctgggccatcattatgctgtcagttctatcggtcaaatgtgggatacagcgataaggcgttctgggccctatcaccgcaaagcatatcagtccaggcatacatatgcgtgctggtctttagccgcgggggctaa

SEQ ID NO: 103146 - DNA, 2409 bp, Enterobacter aerogenes
atggaacttgatcaaatttattatgatgctttaaagggaaactgttttctcttcttaggggcggggtttagttatgaagcaaagaatgctgctggcgaaagatttccaagtgcagataaattagctacacaactccaagataaattagattatgatgaggaacgtccccaacttaaacaggcttctgaagattatatcgatgagtttggtaaagaagctctttttaaaataatatctgatacatttagagttaaatcgacaaatgttgattattcagtactaactaaaatgagatggcggagattttataccacaaactatgatgatctaattgagcaaacttttagggaaaaaaaagtaaatattcattcattgttaataaacgatgagccatctctaatgattccaggagaaatatcctgcattcatttaaatggtttcgtagaaaagatggagttaagtaagtttgatagtgaatttaagttaactgaaactagttatttgacacaaatgtttactaacagtaaatggaagactgttttcaacgcagatttaagagagtgtgatcgtgtattttttataggttattctttgtacgatcttgacatcgagaagattctagttgaaaacccagatattaaccgtaaatgtgttttcataacagaagaaaagccgtctttgagccttcataaaaaattaagtaaatatggaagtgtattgaagataggagtggctggttttttaaatgggttaaaaaattcaatagatttattaggagatgtaacgtcagaatttagatatgaaaatgtccatcgttatgattccgttataccagactccagtgttacaacaaaagatattatttctcttttcatgtatggtagtgagaaacaatcagctataaaagattctatattatctggcaactcgaattattatatcttcagaagaaaaataaaagatttagatcatgatctaaaacgacactcatgtgtagttgtccactcaaaattagcaaacggcaagtctatgttttgcttaggagctatagagcacctgacgtctctcggatacacagtattctcattgaataatagtaaggatataacatctgccgaaatagagaatttaaagaaagaaaaaaaacctgttttgattattgaaaattatcatcgatacattccctctcttcagttactcggtgcaatgaataccgataatatcaaaatcattcttacttgcaggactgagctgcaagagatatatgttgaaaatttagatgatctcggatggtctagtttcgaattggatgtcaattatttgactaaagaagagcttactgcagtaattaatatcatggggtcaaatggcctttttggtgaacgttcaaatttgaatgaaaaacagaagcttgattatctaactaaaaattgccgcagagaaatgtctcttattttagctgatattttaaaagcaccacaaattactgaaaggattaatgaattattaagtaaagtgcgaaaggatagtgagcttgaagaatgtttgcttgcttgttctatagcctcatatttaggttacgagttcgatagtatagatatccaaactctaacttctgccaggggaatagataaagttaagtatttaaaggatgaaaccacatctcaaatactagaaaaaaactcacaaggattagttgttttaaaaaacccagttttagctaagcatattctagcagctaaggtggagaccaattcaaatgaattcttgaagtttttagttgaattctacggaaaattaaatcaatattcttcttatgaaagaaaatattatgacttaatgaaagatattaatgttttttcaaaccagctaaagttatttggagaaaaaaattgtttcattattaatgatttttatgatagggtgcgattatattctgataatagcagaaatcatcatttctggttgcaatttgcaatagcaaaactttcaatcaaagaatacgatgatgctaagacatacattaaaacaactatttccttagcaaaggatcgtcgttacaattttgattgggtaaattgtcagtacgcgcgcttagttattgaaaccgctcaccttgttgataatacaaaagaaattattgaaagattaaagtttgcgtctagtttgattataaatcaaaacaatagacattatccattccgggttgcttgcagttttgtatattatgcaagagataatcaggccacaattgatcttgaaacgaagaaagctattgcagagatattaaggcagtttgatgcaaaatattttaaaacgatttctcaacttaggaataaagaacacccagttatgaccaattttaaatctacaataggacagttttttaaaaataatcctaatctttaa

SEQ ID NO: 103147 - DNA, 1173 bp, Enterobacter aerogenes
atgtctttaaacgatatgcagattcgccgcgctaagcctgaagctaaagcctatacacttggagatgggcaagggctgtcattgcttatagaacctaatggaagcaagagctggcggttccgttatcgttttgccggtaaacccaaaatgatctcgcttggtgtgtatccgacgatcacacttgcagatgcccgttcccgtcgtgatgatgcccgaaaactggtcgccgaaggaaagaatccgagtgaggttcgaaaagagcagaagattgctttgcaaaccgagtctgaaagcgcgttcgaaaagatagccacagagtggcaccagatgaagtctgccaaatggtcggcaggttatgcgtcagacatcatggaagcgtttcagaacgacatattcccttatgtaggggcgaggccagttggtgaaattaaaccgctggaactgcttaatgtgctgcgtaaaattgaaaaacgcggtgcattggagaaaatgcggaaagtgcgtcagcgttgctctgaagtgtttcgctacgcaattgcaacgggtagagcggagtacaatcctgcggcagatctttccagcgctctcgaagtacaccaatccaatcatttcccgttcctaaaagctgatgagatacccgaatttctgaatgccttagagagttacaccgggagtaagcttgtccagatagccacgaaattactgatgattacgggcgtgagaaccatcgaattacgtgcggcattatggcaagaatttgatctgaataacgctatttgggaaattcctgctgaaaggatgaaaatgcgcaggccgcatcttgtgccattgtcgactcaagcgttagatttactcaatcaactcaagaccatgacaggaaactatcgctatgtttttccgggacggaacgatcagaacaaacctatgagcgaagctagtataaatcgtgttatcaaatgtataggttatgctgggcgattaaccgggcatgggtttaggcatactttatcaacaattttacacgagaagggctttgagtcggcttggatagaaacccagcttgctcacattgataaaaacatgattagaggtacgtataatcatactcaatatctttctcaaagacgtaatatgatggaatggtactctaatactattgtaaacaggacttaa

SEQ ID NO: 103148 - DNA, 522 bp, Enterobacter aerogenes
atggatttcagaagggaattgcagtcggaagaagagcagatagtattaatttttgacgttgacccgctattagaagtccccgagagtgaactcgggggcttttttagtatttatgaagagtttattgattataaaactcaaagcgccgatttaggtaatataccttgcccaagtgaagacaatcaaaaagactttgcatctctagttgatctttttggaaaggataaacctaatgaattccctaagcctttagcaaaaattcatggattacatcatgtccatatatttgacggaagtaatgatagggaattgacaaggtggattgggaaatatcagattcaacgtgtttgtgatacacttttgttttacagctatttccttcataaggaaaaacactatttttacgtgttgcagtttgtcggcgatcctgatgggcactcttatcaaaaagacgtaaaggagatgagtaaccttatcgacaggataaagcaatataaaaaatctattgaagattccgagtga

SEQ ID NO: 103149 - DNA, 141 bp, Enterobacter aerogenes
atggcacagcccattaagcagaacgctaaacgtgccaacaccagtcgtacagatatgcttcgtatggctgcaacggcacgtatgataagcgttaaagtttcagaaattccttcggctaaagagaaatttgcaaaggcatag

SEQ ID NO: 103150 - DNA, 213 bp, Enterobacter aerogenes
atgaaactagctttgatcggtactggcaacatgccgctgatgcagtggattctagatggaaagggcgatgatgcgattatcaacatgtcagcgttagcgcgtcggcttgagtgtagtcgttccagcctacttgaccgcatccacagtcatggatttgatagcgcgattcgttactacttaagcgagcataaaaagaagatatgtaacgtgtaa

SEQ ID NO: 103151 - DNA, 1017 bp, Enterobacter aerogenes
atgaaattaagtgattttacaaacctttctggtcagttcgtcaagccgagtggtgaggggttccttctgtccagcctggggatctttaccagccgtccaagtgatacgcaaatcatcgcactcgatactttggaagatgtgcagcgtgaagtgactaaatcagttgcccgttatggttctgaaatgtcggggcttttatttccccgtgcagctaacgtgactatcaccgcgccgttacatgtctacagctcaaccattaccagccaggattggcaggggaaacgtcagccgggaacaaatcgccagatgaccgctgaagatgtagttgctaatcataccctgaagcactacctgcaaacccgccgtgacgttgaatatgcaatggcgcagagtctgcttcacaatactgtagaggcgacacacctacgcgaaggcccaaccattcattgggagcagttctggggcattaaccagccgtctgctgtggtgaaaactggcacaagtgccaacgtcattactgagatgcaaaacgctgtcacgttgctgaagaaaaatctgggtggctggtcttccagcatcaagcagatttatctgctggcgagtccaagtctgttcactgccattcaaggcaacccaaccgcatatcaggcggctctgtttggtgcgacttcgaaagatattatcttccctgagtcaatctcagcatatgaccgcttcaacattggtcgtgtgactgtgatccaggtggatgaccctctatacaatattacagatggaacaggctttatgctggcgacgttctcaaatatcgtcgagggcgacctttcaccttatatgacctactgcacgccagcctcacgccacgcagaagttgctaatggtccggtttatccgtcttaccattacgttctgcgtgataagttcatgaattatgaggtggtcagcgagctatcacaaattcagatcccaatgcgtccggacttcgttttgaaaattatgatggatgacgcggcgtaa

SEQ ID NO: 103152 - DNA, 339 bp, Enterobacter aerogenes
atggaatatgaaaataaaaccacacagaatgtattggtttataccgattcaccggtctttcacaaacgagaagttatcctcgatctagctgcggatgtgacttgtggtgatgtgattaacccgaccactggcgcggcatatgttgcagccgatgctgataactgtgctgtagctctgcaaaaccaaattgcaggtgatgcccgtagcctcgttatcagtgatacccaatgtgttttcaacccggcgggtctggttgtagcgactgctgcgaaagatgctgcttacgctgcacttatcaaacagggcaatcgtattgccgacgcaaacactgcaatctaa

SEQ ID NO: 103153 - DNA, 366 bp, Enterobacter aerogenes
atgaaaacaacattgcaaaaagtcagagacggcattgccgccgcgcttctggggaaaactccagagcaactggaggaagaacagcggcaggacgctgtaaaaagcgccgttgatgactatctgatccgccatccagactggaaaccaacaacagcgcccgccgttgcgccagtgaccagcaaaaaacaaaaagccaaacgtatcatgaagacgctgggcgctggggcgggtgtctttactcctcatgttgtggatgaagcggcattagcccgtgctcgcgccaaatgccgggagattgttgccgccgatccggctgcgtactcatacattatcgaatcggcaccgattaaaggggtgaatgattga

SEQ ID NO: 103154 - DNA, 519 bp, Enterobacter aerogenes
ttgtgtgaactcgccaacagccgccaggctgaccaagaagaacttcccgatttaaccagactgtataaaaatcgcgcacgagatagcgatataatcaaaaaatgcaaacgcctcctgatagccggaatgcctccgggcaaggtggctctggtctgtaggctcccgctggaaaaggtcttggaactgtacgataacagctacaatccccgctgccgtcgctttgcgaaccgaaactcctttcaagatgcaaaactagccctaacgatgttccaacagggcgagcccttggtggatatctgtgctgcactgggtggcctacacctgtacactgtggtgatgtccctccggcagaatggcgttgctgaatccgctattgagcagcggttacccccgccgggcgaccccttactaatcgaataccaacgcgtctgcaaaagaaagtctaccagcagatataaagcgatccagattaatccggtccaacgagtcaacgtggcgcaggcaactactgcccgatag

SEQ ID NO: 103155 - DNA, 1011 bp, Enterobacter aerogenes
atgaccgagacagcagaaactaagccaaattttgaccaagccgccgaaccgttaaaaggtatcaagaatctcattacaccttccggcactgtgatgcgtgtaactgataccgatctcaagtggttcaatcacttttacaccttcgaggcgcagggtaagaagtgttaccagagcattaaaacaattgctaagtcgatgcgccgcgccgactcagtggcacaggagaggatcgacaaactgcaagcgctgggccttctggaagtaggtaaagagacctttaaggatgggtggcgtaatacatacacctgtacgcctattgatgtcatcgtgtcccgcatgactgacgcgccagtgacaccacaagataagccgttgaaaaaatcacagctcaattccttgctgaagaagtctggaaaagttgattcccatgcagttaaccgtgggatcaaggcgatggcaaaaaccatcgcaaatcgtgatctctctgatgaagaagtgatgcaatttgcctttcagatcgcgactgagaaattagccgcgctcgggtggcctatcgaatcaatcattgaggagagtaatgatgaagatgacctgcaacccgctactgatgggactgagactgcctcgactgctgctggagaaccagacggcgtatctaacattcatagcgatcagcatgatgatattccctctgatgatgatgcggtgaatcaggatgaaattgcgatcttcgatgaaaataatgttgtgactgaggcgtttatcaatggtgctgataatccgaggatcgggcggaacgatgatggtacggtgcagaattatcggtacacctacgccagggcaaaaactgcacaggcattccaagatggcaaagcctcaccgcaggctatttccgacagttggtcaatttggttcaatgctgcacgccctgaatacatccccgtgcatctgctaccagtacatgaaaggccagtgctagcaggttattttgatgatgacgaagaattttaa

SEQ ID NO: 103156 - DNA, 177 bp, Enterobacter aerogenes
atgaaactgacatttagcaattcaacgatggacgcaattatgcaggaatgccgccgaactgggatacctgttgcaacgtttatcaacaaactcgtggatgccgaggccgaacgcatccgaaccaatatgaagaatcccactgaaggagataaaaatgaccgagacagcagaaactaa

SEQ ID NO: 103157 - DNA, 411 bp, Enterobacter aerogenes
ttgagaacagccgccatcgactttagtgttgcaactgccgaagaaatctttaacgccttagtccatgacatcaccactacctctgcgctttatagcttccaaaaccgtgttggtacgaataagcgaaacaccaagaaagcccttgaaatgctccgtcagtacaaattggagcagaagcgtaacgctcgttaccgccagacaataaaaaccattctcaagcctgtaaatccccgtatagccgtaggtgaagaggtaactgatatcttctcagatgtcatcaatgggtatatctgcctgtaccgtgatcgcgtgggaattgcgctgcatgagaaacaggtattagcgcttattctcaccgaggctcgcaaagatcttaagaagcatggtattgatcctgagaaacaccgctaa

SEQ ID NO: 103158 - DNA, 360 bp, Enterobacter aerogenes
atggaaatcgtccaaggtaaagacagctttaacgagatggcgaccggaattctggtgaaacttttcgcggcttaccctttccattcagaatttgattattcggactggggctggaacgacaagcgtagcgagctactgcggaacactttactatctctaaaggatatgggttacattgatataatctcatcaaccgacatggactacgccgccaatttaaccccacttggtgtaagtgtacttactcaaaaagccccgacttcaggtgatacctttattaacgtcctcaaaagtgcagcaggtgaaagccgtacagcggtgatcggtgctgtcataggttggattttcggcgggaaataa

SEQ ID NO: 103159 - DNA, 555 bp, Enterobacter aerogenes
atggcaagaacaaatgcaccgacacctgatgaggcacggcagatcgaggcagccctacgccgtcgcaacgaaacctttgctgacgcctgggcgctgaatctcaatctggctcttcgcattagcgatctgctggcgcttaccttcgaagatgtcgccgggaacgtggttactataaaggagaagaaaacaggcaagctgaaggtgttcccgatcaacaaccgggcgcgggaaattatcagccgtcgccgtgctgcatacccggaagatgttttcctgttccagtcgaagtctaaccgggtgaagaatcaaccagccagggccatcaccagagaggcggcaagccgtgcattcagcgaagccggggaaatggtcacggagaagaatatcagcagccatagcgcccgtaagtgtcggggccgtgcattgtgggaggccggaacaccaatcgagacgatcagcaaaatgctgaaccacagtagcccagcagtcacaatgacgtaccttgatattactcaggacgaagtaaaccagacctacctcgagttgaacatttaa

SEQ ID NO: 103160 - DNA, 210 bp, Enterobacter aerogenes
atgaagaagattttaatatgtgcgctagcacttctgccgctggcggctcatgctggtcaaatcaccatgagcgatcccgacgaacaagagttacagggcgggaaaaggctttgcacttacgaaaacagcatttatctgttcacgctggtgacgcgctcgcagtcttgtccctttacgaagacgttcgacacctcagacaatgaaaaatag

SEQ ID NO: 103161 - DNA, 171 bp, Enterobacter aerogenes
atgaccaaccaagccaggcacaatcaagttgtcaaaaatgatgtcgaggctaacaatcgttatgagtctgcaaactcatggtggtcatgcttcataggccggattcgcaccaatgaatccggcttttttatgtctaaaattcagacacgggcactacatgtagtaacttga

SEQ ID NO: 103162 - DNA, 237 bp, Enterobacter aerogenes
atgccccttccttcaacattaaccagcgcgactgtaagattcacgcacaccatcacgataaccctctgcaaatgcagcttgcgggcttttatggcgaacagttcctgcttggctatcaggaagggcagagagatcaacccaaggttgccccgagcggatcagacccgcattgtagccttgttcataagcgcagccacagcatttatggcgaccctcaccaccctgatcgtccggtaa

SEQ ID NO: 103163 - DNA, 603 bp, Enterobacter aerogenes
atggctacactagattacccacgccacacggctaaggatgatgtatacggactatttaccggagtgtgtttgtcagcaacagggatcgccattctgtccagtggcggtctaataacaggcggggcggcagggatggccttgcttgtctcataccttgtgccattcagtcccgcccaacttgtaccgatcatcaacctacctttcatcctgtttggctgggttgtcatgggtagagcatttgcggggaaaactcttgcggtatcaatctgtttaggctttgccgtacatttggtgtcggctatgcttctcccgcatgttaatgctcccgtagcgtgtctggctggcggcacactgttagggatggggatactatgctttgcccgtcataacgccagtataggcgggactggcgttgtaactctctggatgcaacggaaatacggcattaatgcggggttagctcaaatggttttcgatgcttgcctgttcgttgtagcggcattctctcaaccctgggagcggttaggctggtcattagtgggaactgtagcgatgaactatgtactaatggcatggcataagccaggacgttatagaggctaa

SEQ ID NO: 103164 - DNA, 321 bp, Enterobacter aerogenes
atgcgtaataatttattggtattattggtttctacattggttttgtctggctgtgccacccaaaaacaaatggtgccgatggggggaagtaaagctgatggtactgtgaggatgggctttgattatggcctgtttgaaaagcctgtgcttgataagaaccaggcaatcgcagcagcagaacaacgctgtaaggcatggggttactctgggactgaacctttcgggggtacaactcagacctgtaaccaaccctcttcaagtgggtgcatgggttggcatgttgaaactgaattccagtgtactggtgaaatcaagaagtaa

SEQ ID NO: 103165 - DNA, 384 bp, Enterobacter aerogenes
atggttaataaaatcacattgctgggcctgtcctctttttttgctacacacatcgcttttgctgataattctagccactgggtttcagttgcatctactgataccactgaatattcagccaaaaaaggtacttttaaaaacatcaaaggtgagtcctctcttctgatgatgtttgatgacaaaagtgataagaccattaaatactataaagtcagtatcaaaaatgcagattgtgacaacggatttggaaagctaagtttcttcgggatggatggaaggttagattttcagggggactatgtggccgatggtaacagcgttggtgctggcatgggagattttatctgtggtgtgagaagtgctgccaactcaaataaaagttaa

SEQ ID NO: 103166 - DNA, 525 bp, Enterobacter aerogenes
atgaatttactttctgatcttcattttaaaaataatgcggttatgggaatctataatcatcaacgcgtaccttcttcatatcatgatatttttgaagaatataaggctgtgcgtgaaaatgccttgttggtggattattctcatatgtctatcaccagtgtgatgggagatgatgcatgggcgttggtaaactacatggtttcggctgatgtatcaatcatccgtgatgagcagggtatttactccctactgctaaacgctgacggggatatccgtggtgatgcatatgttttgtgcgccgctgatggttattatattttatccgagaaccttacttctaaagaaattatagatgtactcaacgaagtactgactaaagctgaggagttagatattcaggagatccctgaaatcaaagcgatggaggaaaataattgggggactattatgctggaaggcccctatgcctgggagataatggcggaggtctatggctttgatatcattggtctaccctattattaa

SEQ ID NO: 103167 - DNA, 225 bp, Enterobacter aerogenes
atgaggagcaagagtctaaacagtgtgagttgttacgaagtgtatttggtgaagactttcctgagtacactgcaacctcatcagcttcgtcaggggctgttaaaactgttttcgcttcttccggggttgtggggacatcgcaaggcgcatgaattattcagccattttaacctatttgaacgattgcgggtacagggtatccgcaattccgtcgaagacggatga

SEQ ID NO: 103168 - DNA, 267 bp, Enterobacter aerogenes
atgaaggtcttcagccttgtaatcagcagtaacgcacggtttttttatcttagcatttttaaagccccgtttttcaagcacttccagcacggcaagtttgggcgtgatcgggttttccggagcctgatcagcttcgataacaattgcgcgatcgatatcgaaatcctgacctttttcgcggataccagtgaaggttgccaaagatccctgaatgaaatcctcaatgaccggatatccatcctctttgaatcgttcaacaatatctga

SEQ ID NO: 103169 - DNA, 1131 bp, Enterobacter aerogenes
atgagaaaatcgataacaatagataagttgtggtgggaatatttagcacctaaacagttgatttctcgtcgccgggaagtggagtctcttattaatgattttattcgtgccgatatgggtggcgaatgggcttctgtggccgaaaatcctaatggtgtctttcgcgtcaaaccgagccagcgaatcccaatattgcatataacttttctaggtaagcgtcccggtttcattgctccttttaacattatgcgtgaaggccatcgcgcagttacgagcgtttctaagctcgagtcagataaagagcttgatgcagatgaacttgtaattgcaccagttatatctgttgatgttgtcaccgaccctctatttattcaagcagcaagtcaaggcaaaatagtaatagaggagaatcagataaaacaaccgagtctactcttttccattcctgcacattacttgttatcccctcagtcccaaccaaatagcgcatacgttctttatcagcatatatttggaaatggtgcatcgtacccttatgatgggtacttctatgttggagtcacaaagcgtagttggcagaagcgatggtctgagcataagcgggctataatcaacaatagtcctcttctttttcataggaaatttcgagaagaacagctgaaaggtagaattacctatgtgcatcataaggttatggcaataacgaacgatcttgagcaattgtataatgctgaggaatttttggttgagggacactggaatgacgagcgtcgccttaacatgatccctggagggaaatcgggtctacgttatcttcgagagaacgggatgcttaaagaatctgttgttccaatttcggatgagcgagatggtattgtaagtttatggattaaagagcacccacgtaaagggttaccagccccttggatggctgaaaaatggagagataatgattgggcaatcgcacaaatatgttgtcgtgatgatcgtttatcagttgatcaagttagggctattcgtgagttagctaagcaattctctgcagaggaaatctctattcgtatcggagcaaaggatgttaatcaggttaatcgggtgatttatgggaaaacatattctcgcattgattag

SEQ ID NO: 103170 - DNA, 756 bp, Enterobacter aerogenes
atggccgttgagctgagcgacgaggagatgctgcgctataaccggcagatcgtactgcgagggtttgatttcgacggtcaggagcggttaaaagccgctcgcgtactggtcgtcggcctcggcgggctcggctgcgccgccgctcaatacctggcggcggccggggtgggtcagctcaccctgctggatttcgataccgtttcattatccaatctacaacgccagacgctgcacagcgacgcgaccatcggccagccgaaggtcgattctgcccgcgatgcgctggcgcgcattaacccgcacgtccggctggtcaccatcgatgcaatgctggatgacgcggcgctggcaacgcagattgctgaccaccatctggtgctggactgtaccgacaacgttgctattcgtaaccagctcaatgctggctgcttccagcataaaaccccgctgatctccggcgcggcaattcgtatggaagggcaaatcagcgtctttacctatcaggacggcgagccctgctatcgctgcctgagccgcctgttcggcgaaaacgccctcacctgcgtcgaagccggggtgatggcgccgctggtcggtactatcggttcactgcaggccatggaggcgattaaactgctgaccggttacggcgcccctgcaaggggcaaaatcgtgatgtatgacgcgatgacctgccagtttcgcgaaatgaagctgatgcgccacccacagtgcgaggtgtgcggttcacgctaa

SEQ ID NO: 103171 - DNA, 255 bp, Enterobacter aerogenes
atgaatacgctttactttctcatggctgagtttgacacggtggcaccgcagcttgcggaagtttgcgagaagtacctaggaatcaagcccgcgacggcagagaaaaaggcgctgctgggagaattggccttaccaacgttcaggattggggaaagccaaaaagcgccgcggctagtgcatctaagtgatttggcggagcatatagacaaggcaagaaaagaggctagagagctttacgatcacatcaatagttaa

SEQ ID NO: 103172 - DNA, 303 bp, Enterobacter aerogenes
atgaaagcaagacaagcactctataagtattttgaaatcaatgagaaaggaactagccgcgatattcacgcgatgtttcctgagttcgaatacgcgcagatctcctacacggtatcgaacctttttcaacgcggggaattgattccggtagggcatcgcatcggcaacaagccgcaggttttcaggcttaagcgaaaaatggcgccagaggatttggacatcgtagagcagtgcaaatttaactggcagggatacaaaatccataaaattttcggcagcggcgggagggtgtcagcattatga

SEQ ID NO: 103173 - DNA, 345 bp, Enterobacter aerogenes
atgaactttaaaaccgtggcgggattaggccgcgctgagtacgtgtcacgcgccgtcaatgtggcgatggataagggtttagagcctcattatgtccaagcgtgggttgattggtttaacaagcaggaaccggacgctgaagggcttgcggttgcgcctgaattccatgtttcggatctggatgaagtagcgcacgccgtactgcgacgcatcgagcatgatttcgtggaggtaaataagcgcgtcgcagggacaccaacgctgagttatccagtaagcgatattttcaccaaagtagcacaggaactggcgacgccgggttacgtggagagcctattgccatga

SEQ ID NO: 103174 - DNA, 279 bp, Enterobacter aerogenes
gtggtgaatattgatttatttggctttaaggcaaagcgcaaagttgcagctttagaagcggaagtaaaaaggctgcgtgccgcaaatgtggcagcgtacaaggttacgtattcacttcgccagcgtgtgattgaaaacggcatgaccaacgcagagcgccgttttatcactgtatgccgggatatttacaagcacggcaagatgatttcaccgcgccgcttccatgcctctattgagtctatcgagcgtgaccgctcattccaaggaggtgagctatga

SEQ ID NO: 103175 - DNA, 174 bp, Enterobacter aerogenes
atgaaagttccttcgtcgttttcgttgtatttgaaaaagctaactattgagcagttaacagaattgcttgaatggaatgggcgcgacaaaaacgcaaataaatatgtaaataaagaaatagagcgggagattgcagaccgtgagtcgagtaagacaaacaccgaaatggtgtaa

SEQ ID NO: 103176 - DNA, 297 bp, Enterobacter aerogenes
atgaggaaagcagagcgcgagcatgttaacaaagtcgctgaacttggttgtgtggcctgttatgtgcaggccggggtgtggggtactccgggagagatacaccacattagagccgggcagggagcggcgcaacgtgcgggatggtttgaggttttgtgtctttgtgtcgggcatcatcggcacgatgataaacgggctggaaaaattgccgtgcatggtaatacgggatacaaaatctttacatctacctatggaagcgaacaggatttacttaatctcacattagaaaatatttaa

SEQ ID NO: 103177 - DNA, 387 bp, Enterobacter aerogenes
atgaaaactttaaaatcagcagcaatcgaattaatcagccgtgtgcgaaataactttgatattaaacatgcatggtatatggctaccgatggcctttctactgaggatgcaaatgaaattactcgttgtgttcacctgcgccgccctaaagaaaccattcaagatttatctaagctggtggatagcctaaataaaagtgatgcggttaattatttcaatattaatgctagtcgtgtttctgatgctcaattagagcgctttaaattggctatgtatcgccagtggtgcaataccgcgaatgatatgtatgagtcaattaaattactttgtgagattgaggaaacagaccgcgcgttttctgatgatttgatgtggctggcatcatga

SEQ ID NO: 103178 - DNA, 177 bp, Enterobacter aerogenes
atgaaactagctgaatatattgataaatattttgaaggaagcaagatagagtttgcgcgaagcgagggcgtgaagcacccgcaggtttatcagtggatcgagaaggaattcattgttattgatgggattctctatagcccacgtcgcgagcttaaagaaaaaaaaccgaataaataa

SEQ ID NO: 103179 - DNA, 123 bp, Enterobacter aerogenes
atgctggcgctgattggcaaaaaggtgcaaaaagtgctgaaaaagacatgtaagcaaaacgctaacaaaaaatgcttgcgtgatgtatgcaaaacacttacattaaacacatcgaagcaatga

SEQ ID NO: 103180 - DNA, 228 bp, Enterobacter aerogenes
atgaataatacagagagagaagcccttgaggagctatgggaatgggcagagagcgttaatgcacctgcaagggtgtttgtgtacatcaatcaggcggatgcagggataaaggagttagaggaacgtcgagccaatgaaagatccctgtacgttgacacgtggcagaaaggcttcaatgctggcgctgattggcaaaaaggtgcaaaaagtgctgaaaaagacatgtaa

SEQ ID NO: 103181 - DNA, 342 bp, Enterobacter aerogenes
gtggcgttagacctgcctacatcacatatgctggcggcgcacggtgacgagttcactggtaggatgttggacgctataaatggaatgatgcttgatatgctcgcggctatcgctcgtaaagactatgaggatagacgccgcagacagaaacagggcatagacaaggccaaggctgaggggaagtataaagggcggggcgctgacttagagaaacaggctgcgataatctctatgctcaaagggggcagcagctacagtaagatagagcgggctatgggggttagtaggccaaccattgcgaaagcggcaaagatcatgaaaggggtggtgggtaatgaataa

SEQ ID NO: 103182 - DNA, 189 bp, Enterobacter aerogenes
atgaataaagagaagatactgcgcgcttcagcggttgtggtgatagtgattggagaagccattatatcagccgccgttggtacattaggtacctacgatcacccaacgacttttgcaggggttgtgctattcattggcttggaagcgatgcggcactggagaatgcacatgaggtgtaaatcgcaatga

SEQ ID NO: 103183 - DNA, 357 bp, Enterobacter aerogenes
atggtgagtcagaataaatcactgcaaagcgatgttggccagagcgccggcacagaacaaagttctgtaagagagcaaatcagccaggcgaaagcagagcagaaagcagatgcaaaacgccgtgcgaggttggggataggtcggaagtcaggagcagcggcaatcactacaacgcaaagcgaggtagcggaaaagccgccagtgctataccagccaccaaagataaacaccccggcagaccttggcgaggttgcccgcctaatgcaaagggagtttgagaaaatcgccgccagtcagtcctatctgctgacgttgtggaaaaataaacaagataatccagacgatagcaccaattag

SEQ ID NO: 103184 - DNA, 1716 bp, Enterobacter aerogenes
atgacaaaaccagctattagccagcttggcgcggtaggcctcatgcttgatggtgacccgtccatgctgccagataatgcttttactgacgcgcttaacgtcagattcaacgggcgagaaatcgccccttattttggcaatcagatagcgccattctataccactgattttgaaggtactcacagcttgcctgtgtggtacgccatgcaatcaattatgtttgatggcttttcgtctggatctcgtttgctgtttgctgtcggcccgatacccggcgccgcaggcatgcagatttggcagcagacgttagaaaaggctgggttagtagtgcttgagtcggtggggcttgagtcgtgggcggatgaccgctggagtgtctacaaggggcagataaataactgccctttctttggcatgcaatccgccgccccggttggcaaacaatacaactggacaggttttgacgaattgccgggatggggtgagcaaaccggaggcgatcaggttgtggttaatcgtcgctggacgtgtaaaaaaatggtctcattcgacaaccggttaatcatgttgaacaccaaagaggagtcgcaaggcggcgaggatgtaccatatccaacgcgggcgcggtggtctgggtttgcacaggaaaacgcatttccaatcaattgggatgatactgccgcgaaccgcacgccggaagatttcgccgcagcggtaattgacggttacgcagggtggcaggacttcagcagcgccagccaattagttgacgcttgcgagaatggcgggacgttgtacgtttacaccgagcgtgagacctacacaatgacgccaacgggtaacgacctagcgccgttcaaaaccattcttttgtattccgatctcggctgtatcgatattaactgcgtagtgaacgcccacggctacaactacgttttcaacggctcggacattgtgcgccatgattctgttagctgggtgtcggttgccgacgaacgcgtgagggattggcttgctgattacgtcaaagaccattacgccggacaatgccgccttatcaacttcccggagctgtcagagatttgggtgatgatttacggtacagaccagatcacgggggagtacgcaaagacagttgccctgacctacaactaccttaaaaagacatggagcaaaaagacgctgccgtttatcaacgatgccgagttttgccagatgccgccggagtctcaatacatttcgtgggatgaaaatgaaacggaatgggatagagaggagaacacttgggacggtgccgacatgcgaaccgctcagggtacgcttatcggttgttgtcatgctggtggcgtctatctgctgaattctggatataccgaggcgcggcacacgttccgccgtggtcagtggcgaatgctaccgcgtaagttggattgctacgcagaacgccgggggatggagttcggatatggtcagcgctacatgatcaccgagtcgcttctgaatggcaaaggtacccaagacctgactattaagctggggagagcggattggcctaactccggttatacgtgggaaacgcagacctgcaacctgacgacacagcgccgcaatacttggcgtgcagaggggggcgtgcatgggtatagactggaattcaagggtaacggttctattccggttgcggtcactttcaaggtggaggctacaggatggtga

SEQ ID NO: 103185 - DNA, 774 bp, Enterobacter aerogenes
atgccagtagaacaagcaacctatataagcgatctccagccagattggcctgatggaaaggataaggagagcgagggtgatgatcaccttcgaatgctgaagcaaaccatccagaacacttggcctaatgttgacgcgccaattaatggcacgccaatccagcaaaacaacctgaccagcggcatgcagtacgccccagcagatgccgacgccggaacgcccgcaacatggaatctgaccgacccggcagactctaccaccctgcgccccgttaatgtgggggatggaaccggagaacatgccgccgcaacgctgggtatgatttatcgcgttggcgctaagttcgaatctgccaccgacagccgcaaccctgcggagattctcggatttggtacgtgggaacctattaccggctttattgccggggcgggtgatgcaaccgacactaacgggctaaccattaccatgacggctgggcggaatccgggcgcgtggcgagtgcagagcgggcacatcgtacagtttaccgcgagcgggcaaacagaggccgctggcaaccatcagcatgattatcagtatgcggtatatgatgattctggtgatgatgaccaagatggtgcagctaataatcaaacaatggttcagggattaactggatgggctggtgatcattcacacccattcagtgttgttatcggtgccggggatttatcgtcaggaacggccttctttaacccgtactacggtatgtatatttgggtgaggacggcatga

SEQ ID NO: 103186 - DNA, 261 bp, Enterobacter aerogenes
atgccgcaatccggttcttctaattttaaaatactccagtttttgggattcagcggcgtagcatcgctggtgggcttggcaatcatgattgggcgttatcaaagcagtatggatactgcgctgcgccagcaggtgaagatacaagagcaggttacagagctaacgaaaagcgttgtaaacctgacggaaaacgaccacatgagccagtaccgcatcgccgtagttgagcgccgcgttgataaaatggagagcaagggataa

SEQ ID NO: 103187 - DNA, 597 bp, Enterobacter aerogenes
atgtccacaacctacaaagacctcgtagacagcatcaaatcgtattcagggcgcacggacgccgcgacgattaacgccattccaacattcatcaatgcagcacaaacaaagctggatagcacgctgcgagtacctcagatgttggaaacgaaaacaatcaccgctgacggggtgagtgttccgatgccgttcatggaaatcgagagcgtagtgattggtgagtttgagggggttttgcatccctacgctgatgtactggcaaagcgcaaagtaacaacgcgcctgccatacagcatgatttatgcagtgagcggtagcaatctggaactggttgagccagcagatattatcgtgaccgggtatcagcaaccgccgcgcttatctccgaacgttcccacgaatgcctatacctcaaacgctgagaacgcgattttgtttgcttccttgtcttaccttggcgtgtttgcccgcgatgttaaagcggctcaggcgtggggcgaaatggctgatatggaagtacaaaatatcaacaacgctttctctcgtttcaagtcagcatcgggggtaagcagcaatgccgcaatccggttcttctaa

SEQ ID NO: 103188 - DNA, 252 bp, Enterobacter aerogenes
atgaaagcagcgctaaccgtgattgaaatcgcgcagatttgctacgcaggtgtgtcagcacttcgcgaagctttgagtaatgaatcccaaccggaatgggtggatctcgaaccagagaaacagggtgtgatcgtcgattacatcacccaactgctgaccgggcgagcaataccggacagccacgagggagaagtaatccgccgcattattgccgttgttcgcgatgaaaagaaaaccctgaaatatgcctaa

SEQ ID NO: 103189 - DNA, 849 bp, Enterobacter aerogenes
gtgaaaaatgcggatgaaaccaaagtcatcgaaattaactggtcaagcagtgacgaattaaatcaggcgcatctcacgccagatggcgattcgtgcaagtgggggctgaataatctcggtaccgggaaactggagaacgtagtcaagtgcgctgataccttcggaaatccgcagagcatcaccactacggaaacgctgattcactccagcaaaaagttcccggcagatactaggaagctaaccattgtttcaagcggcctgacatccgcggggaacgttgaacatcaagaggtcacgctatcaacggtctctgatggacatgtgactgcaacgttaggagcatccaattatgccgggatgtgctcaatggtcattaagtcaaaggatatcgacccggaaggggtagcaaactggtcgttgtaccttgagtcaccggacaacgatattgcattgcgcccggtaggcaagacatctggcccagcaacactcaaaaagggtgatgatgttcacttttatgcttacgtcaccgcaccggatggaagcacaacgcaaggtaagtttgaaaaggaagggtttagcactacgggctgcaataacggcctgttaaacacgcaaactacttatcaaggttttaccgctgtgttgattaccgggaaggttagcggtactggaggcggttttttcggtatcaactaccggggaacggatgcagacggcaatcaagcttgtgttcagtgggcttggaagattgaaggtgatggggcatctgttaaatcacctattgtcgagaagctggaagaagccgtagagccaaagcctaaacgcaagacccgcaaacaaacccaataa

SEQ ID NO: 103190 - DNA, 954 bp, Enterobacter aerogenes
atggctactgaattgatgtcttatgaactcaatggcgttaaagaatctatcgcgaactggatttctaacatttccccgcgtgattttccgttccagtcgatgatcggcaagggctctacgactcagccgaaatttgaatggcagacggacagcgacgaagcggtagaccctgataacgccctaatggagggtttcgagttttcgtctttggatagcacttttgcaccaactatccctatgactggatacacccagaaaatgggtaaggccgtcaaagtaactggcgatgcggatgctcaaagcgcatgggggcgcggtaaagagtccacgtatcagggcgagaaaaaggcgcgtgcgcttaagcgcgatctggaatatgcattcctgaataacggcgcttcagtagcagagaataagtccgataaaaccccccgccgcttaggtggttatttgtcgatgatttcatccactgatggcggtgtaacggttgagggtgatccgcttactggcgtttcaaccctgatcacttccgcaagcacaaagccaacggaagatgatatttacgcggcaatgtcggcgctttgggcgactggcggcaagcctgaagttctgatgtgttccgacacgatgaaagatgtgattagcggcctacaggaggccactccgcaacgctcgcgcatctttgagaaaactacagagttttctatcgaggtgaataccatcaccgatgcgctggggcagaccgtgaaggttgtttataaccgtcatatgccagccaacacgatttacattttcacccctgatgactggcaggcgatcatgttccgcgctccagtgaccgagccgcaaggcaaatcgggtgactacaaattatctgtactgcatatggatatcggcctgcgtcaccgtaacccatgggcgtctgcggcgattctcccaaagccagcagcttaa

SEQ ID NO: 103191 - DNA, 360 bp, Enterobacter aerogenes
atgggtgacgtatcaaagcattttaatcgtagtgagttcgcatgtaagtgcggttgtgggtttaaggctgtggatcgtgagttgctggaggtattagaaaacgtccgcattcgcttcgatgcaccgctaacattggactgtgcttgccgttgcgaaacgcacaatgcagcagttggtggggcaaaaaacagtcagcatctttatggaatggcggcagacatcaaagtgtctggcgtgtctccagatgacgttgcgaaatatcttgaaaagaatttcccgaatggtggaatcgggcgctacaacaccttcacacacgttgatgtgcgcggttctgcggcacgttgggactatcggacttag

SEQ ID NO: 103192 - DNA, 1941 bp, Enterobacter aerogenes
atgagctacacaattgagcaattacaggatgcattggtgagggctgacgccgcaggcgatacagcatcagcccagattctggcagatgaactagcaagcaggcaggcagatcgctatgtgaaatcgcaacctgaaagcttgtggagtgattttaagcacggggtaggggagttgctggacggatggattcatgaagggatgttagcaagccctgctgcggctgagttcgtcgcacgttcggatgctgccggaattaagccagagggggcaacttcagaatctattcatggtggtaacgggttcgccaatatgactccggagccgaaaacaataaccggttcacttgtcgccgtgactccaaaactgcttgccgcgttgccgggttgggaggctggagccggagagctggcggggagcgtgataaccaaggagacgccaaggcttgcacggtgggctgcaaagggactgggtggaacgcttggatctgatattacgtctggggaggatataacggcggggaatctagctgccggaacagccgctaatgtcgctatggaatcaattttacatataccagatgcgctaagggtgactaaaaccctgttagcgagaaatggtacggcgattcaggaagcggcggatcatattggagtgaccccatcaatgggggtgacgacttcccggcagtggttacgcacactggaaaacctaatccacaaagtgccgggcgggcatttggttaacatccagaacgccaaatcactaaaaactatggatagttttattacagggattaagaccaagctgggatacaacggcgatgcgagcgccttggggcgtgagattcgcgcggcaatagaaaacgcggaaaaggatttcgataaagagtcaggggatatctacgacgcgatagtgaaaaaagctgggaagtatcagcagactaatacccgcagatttacacgaaaagttgaagaacttgcaggggtaaatcctaggccgggaattgacaaaatgaccactgcgccaatagcaagaaaatacaatgcattattggaggaggcggggaagattccgcaaaatagtggttttagtaatgttgtgatggggctggcggatgcgcgtaatgcattgaaattattggatgattatatcgggacgggggaatctgcaaccgcagacaccgcagcggcaaaacaaatggcgtctgagttgcgagatgatataaacggcacatttgatgcgctggggctgggtgccgaatggagagcggcgcaagaccgatacgcagcagggaaagcgcttctggagcaggcgagagcggtgttaggacgtgctgagactggagatgctatttacacccgtttatttggcaatgagacggggattttcagtgccaaaggtgcggataccctgcgcccgattaagcagctaatgagcgatgatgaatggaatcacgttgcggcggaagtcattcacagaatggggcttgagggggctggaacagcagcggcggagggtagagagtttaacccttcagtgttcctgaccaattggaacaaacttaatactcctgcgaaagaattgctgtttagtgcaggtcatcattatgaccttgaacaggtggcaaaactctctgaagggttcaaaaacttagggagagatgcaaataactctgggactgctcaccatttggtgttggcagcaatgggaggcgctgcgctaaatcctgcgttatggcctaagttggcgttaggggttgctggttctacggcgctggggaagctgctaattaacccaaaagcaactcggttgctggtggattccgcatacgccactgagccgaaccaagtaaagcaatggatggtaaggttggtagcgctcgctactgctcacccagagctggcgcaagccatcgcgtcacttggcgatgatgaacaataa

SEQ ID NO: 103193 - DNA, 1284 bp, Enterobacter aerogenes
atgcaagtaggacaaaccaaccttcaggaacagcgccaaaacgagcagacggcgaacaatatgcttgctgcggctccggcatcaattaacccaaataacgccaacgtagacccgtggcagggcgtaagggactcagccaacgaatatatcaaaaccagccggacggtaactccaccaagcgagggagagattcacaaacgcatgtgggaatcgtcaatgatgaccgggcttatcattacgctggcaacgggaaacgttgctggtggtttggctgcggggatgtggggcgctgtggcggtgcatgattacggctacacactgcgccagcgtgcggagcatgtgccacaacttcaggcagagggctattccatgcctgcgatactcaaatggtatgaggacggcgataacagcgaactagacaaagagcgcacggaaaaagagagggtgcgcgagtttgatttgggacggcaggatcgcaacgaacagttcagggaatcacaggatgaaaaggtaagggagttcaacgcagggcagcagctatcacgcgagcagatggggcagcagatggctattgcgcgaatgcatgaggccggagctaatgctcgcgcagtgatggctgcggaaaatgccagaactacagctgatagggcagaaaggcgagccgagcaggcagaccagcgggcatctaaccaagaggtatcaaaacagattgcaccacaacaggctaaattagcatatctccatgccgctgacgctgatttgacgaatcttgaaaacgctctagccaaaggcgatgaagcggcggcgggcatggcctacaactcttatattgagcataaggcaaagggcatgcagggcggtaacgcgtccatgactaaaggtgaaatggagcatatggttgggctccctaaatgggaggattcagagctgcaaaaatggcacctgctgggcagtgggacaccaacaaaaacatggatgaaagcccagagagcaggaacggctaatgatttgcatactgaagaaaaagtgctacatgacggagcagttagtcactattactcgttattggctggtggatatgagccggaacaagccagcagaatgaccaataacagctacagcggaaccgggttatctggtttggattacaccaagttaccagcaccgaatgacggtaaaacggttgagaaaatagttgataaaacgccggagcaaccgaaggaaaaaccatcaagcacgcaggttgatgatgtgatggctaaatacggacatcaaacgaaatga

SEQ ID NO: 103194 - DNA, 495 bp, Enterobacter aerogenes
atgagattagagcagcgctatcaggaaatgcgcggtggttacgaaaagctggtggcaaggctgacgccagcgcagaccgacagtcagaacggcaagaccccagccgagttggagtgggcgcaacaggaaggattcgccccaaaatacaacccgaacaataacgagatcacatgggttaaaacccctgagccagcatacagccaaccaaacgttatgcgccttgagggttcaatgtcgccagagcgcatggcggagatgtatccggcatttgccaccaaggccaaggagatagacccggttttgagccagatttaccaggcggcgctaaccggggaaattacccaccaacgagcgcaagagttggtgatccagttggcggaaaacacctacaaagacgcttggaaaggcaagattacaggtgccagcaaaacatcatccagctttgaacagacgctggataacatgagcaacacaaacaagatcgcgggtgagtga

SEQ ID NO: 103195 - DNA, 372 bp, Enterobacter aerogenes
atgagttggtcagatttatttggtttcgcatcacctacgggggcagaagccgtccccaataccgacccggcgttacaggtgggaattagcccagaggatgttgcaaacattgacggcgcggcggtagcgacgccagcggcaacgggcggagattctggagcgtggtacaccaaagctcttaaaggaattatgccgacgctggcgggtgccgcacttaaaccacatcagcaagtgcgagcgccggttgccccatcaggccacggggtaagcgcaaatactgctggattaatgaagccaatcgacgagctacgcagcagcgccaataacaacccattggctgacattaacaagtgggcggggttattcaaatga

SEQ ID NO: 103196 - DNA, 882 bp, Enterobacter aerogenes
atgggaatgactaattttggcatcggtggcggcggtggcagctcaacaacgaatacgaccagcaataccagtagctggttatctggattgcttgagccaatcgtaaccgactttatcaatgacaatccgaccttcgattacacagattcgacagttgccggattaaccccggcagaacaggcagcgctcgcggcttatggttccggcgcatctgctgcaacgggtaaagccatcgcaggtgctggcgctggccttgtaagcgattcggttaacgccattcagggcttattgggtggcggagctattgaccagatgaccaaaggcgtgagcgggttatacaacgccgctggtggtttcatggatgaccaaatgaacgctattcaagatagcgtttacagcgaaatgggggcgcagtttggacaatcagcacaaagcaacatggcaagcacagccgtatcaggtagcagcgcagcgcagaatgcaacgaatagtgtcatcgcgtcgggcgcaaattctatggttcagcaggaagcagcactacaacaaaaggtgttgggcgcgtcagtaggtttgacgggaaaggcaatgggcgcagaggttggccttattaacgaattgttgggcgctggtggctcaatcgcgaaggctggcgcaggcatggcggcgcatggcaccgctaaccagtttaaggccgggctttttgaacagtatttcaaccagcagaacgccaataacgaccgcaaaaacagcatgattaataacaacatggattggatcaatatgtcgctattgctaaacaccgtcctcccaaccgctggccttgataccacgacaaccggaagcagcagcacatcaagccataagcatggcatcagcatttaa

SEQ ID NO: 103197 - DNA, 879 bp, Enterobacter aerogenes
atggaagatgaaaacgatgtatccagcaacggcgcaaccttcgacgttggcgcagcatttttcggctcagaagcaaaagagccagacccgcaaagcccagaaagcggcgacggagcactcccggaaatcactgatccagaagaaccagagagcgacatttcatccgacgacagcggagaagctgagggcgattctggagcaggcgaagctgtagaagtctgggaattcaacggttccgagttcaccgccgagcaggttagcgacgcactaaagcaccgcgagaccttcgagcgcttcaacacctcgatcactcccctaatcgacaatattaaaaacttcgggcagaccgccgagcgtatgcaggcaatggcggttactgagaccgagaagcagatcgcagagcttaagcagcgcctgaattccgggcgtctggattcccgcgagtaccagcaaacgcatcagatgctgcaaaacgcggaaacgcgcatgagcatgctggaggaggccgcagggcaggaaatgcgccagcgtcagcaggctttaaacaacgcacgtactcacaacgcgcggcaggttgctaccaacctcgttaaagcaggctggactaagcaacagatggatgaagcgcaggcagtagtgcaaggcatcatgaagccggaacagttcgccgatattgtcagcccggagtttatgtcaattctccgcgatgccgccgaactccgccgaaacaaggccgacgccgccgccaagctgcaaggcaaggtgactaaggccgtcagggttaacggcaaaaaggagcaggccgcgccagctaaagcccagaaaatcaaagtgggctcccctgagtggattaaccaacaattctggggtggcaagtaa

SEQ ID NO: 103198 - DNA, 2040 bp, Enterobacter aerogenes
ttgaataccaatgatttatttacggaaatgaaccgccagcttgacgcggcgatagagcgacaggatgaactatcagagcgctattccaacgcgtgggggttctaccgtggcgagcttccaaaggtaatggctccgggagatatcgccgcgcgtcgcgtgatgtggcaggcgtttgaaagcatcaacccaacactgattgcgatctttaccgacagccagcgcagcccggtagcctttgactctgacgcgttcagcaattccaaggtagccgcagccgtaacggcagcggttcatgccgcagcgctcaagattgatggttattaccgcaagatgatgctggcgattaaagagattttagtgaccgggaatcaggccgcgctggtgggatatgactcaaagcactacgacacggacaagcagtctttcgacaatgccccggcgcaagtggtgttatcacaccaaaaggcgttgcatcaggcgggctacaacgttgaatcagagctaactttcgacgaaagcgacccggagaacgtcactgttactggctggatgcaaggtgttagggatattaaatacccggtcatcgacctgatcgcgtataaggatttctaccttcacccaaaagccgttgatacagcgacggcgcgttactgtggctacagcgaggaaatatcggtagcggaagctatcaagcgtggttacggcaagcagaaagccgagcaggcgtatgatgtagacacgaacaacgggcgcagcatggataccagcatgcttgttgttggcgatctaaacgcgcaggggcggcaggaactgaccaaatcaacgcttggcagcaataacgacctgattaccatttaccaccactactggcgaggatgctacaacagcagcgtagagaagctgtaccacgtcatcacgacaaagaccgcctatctggagcatgaggaggtggattattgcccgctagtttggggtggaatggcgcttgttcccggttcggcgcatagcgagagcctttatgacttctgtaaatcgacgcaggagagcagcacccgcgcacgccgtgctattcagcgaagtgcagacttctcagcctatccagacatggaggttgtagattctctgctaactgatcgcgcaaaggcagcgctcaatgaccgcagccagccggggaaaatctatctgacaaagcaaaagggggctatcaaccgcataccagcaccagacgtgccaaacgctatgcaactgctaaatcaggagattaacagcgacgttgagtccgtgattcaggggagtgccgggcaggcgcaggcgctggagaaaaacgcgcaggctagcgggacggcaatcgcattaacccagaacaaacaggagcttaacgaaagccagatagccaaaacgattgcggagactttcatcaaaccgatgtaccggatcatgctgctggtacttcaggagatggggaatcagcttgatattgatggcgtgcaggtgcctttcaaaatgctacgtgcagaccttggcctgaccatcgacgttgagaccgaatatgaccgggcgcaggctgcggcaaacgtcatgcaggcgtatatcaacggggcgcagacccagacgctaccggagaacttccagccggagaacgcatacaacatctttgcggattatctgagagcggcaaccgggcaaggtgatgttagccgttacatcacagcgccggaggatatgccgcagccgtcgccaatcgtgcagaaagtgaaagccgtaatcatggcttgccagctacgcgcaaccatagctcagacgcagcttgcagaggcgcacgtacaggatatgacggcggatacacagaacaagctaaacagcgccgccaagacgctggcagaccttcagaaggtacttaacgatattgatatggacaaaggcaacttagaaatcaataagttgaaactatatctagatgccgaacaaatcagccagcaggccgcagacgatttaacaaaaaatgccattgagcaggagaaggcagaagaaacgctgtga

SEQ ID NO: 103199 - DNA, 1620 bp, Enterobacter aerogenes
atgactgataccactgccgcgcatcgcatgaaggttagagcggcagctaaggcgctggcaaagtctggaaaggctgcaatcaaagcaaagccgcatgtcatacgcgcggcgcaatacttcaacaaattctacaagtgggacaccttcaacccctacgcctaccagcttaagtggtttgcatcgggggcgaactatctgctgcgttatctctcagcagcaaaccgaattggtaaaacctatggcgctgcgcatgagttcgcgtatcacgctaccgggcaatacccggactggtggaatggctacaggtgcgaggcgggcacgctgtgggcggtaggtatcagcgcagattcaacgcgtaaggtactgcaaaaggagttgataggaaccaacgacgcgaggtcaacgcagctttacggaaccggttcaatccctcgcgatctgattgtgtgggattccattgtgaggcgcggtgaaacgctggttagcctgcgtgttaagcacatttcaggagtggaaagtgagattcatttttacagcgcaacacaggatgaaactgtgtacatggggcagtcaatcgtctttgcatgggttgacgaacagtccgaaaaggaactggaaatcattgcacagtgcaccactcgtactacgaccactggcggttgtattgctgttaccgcgacgcctgaagtcggagcgacagacttttatgctcagtgtcgtgacgacaccaccggagagatttacttccagaatgcgacatgggatgacgccgaccacctgacgccggaagtcaaagccagcctattagcacgtattccgtactaccaacgcaagatgcgatctcttgggattccggtattgggaaccggggctatttacccgtatagcgacgaggagattatttgcgccccgttcgagattcccgatcactggatcgtgttgggtggtctggattttggttattcaggtgttagcgatccttcagttgttttgtgcgtggcgtatgacccggagacgggttgccgttacgtgtttaacgaatggtcatctgatatggatcgcgacctatacgggctatcacatatgcctgattttatggctcgtaaggttacaggtgaggagccaggcgactggcaaactgcaacgggaggagcggagtttgtagggatagggcttcccggcatcattcttaaatcgcctcatgatggtaacggtgtattacccggcacccagcagacccgcgccgaagtgatgcgcggagttggggcaaacgtacaccacgaactctggcaaataccgccagacctcgcgccgatggagaacaaccgccgctcgttggttggttcaatcgctatcatcgcgcaatggttcaaggatggactcttaaagatattcagcacttgcgtagagaccatgcgcgaattgcgtttgtatcagtgggttaagcaggggcagagaaccgttccggcagacaaaaacaaccactttttagacgcacttcgcatcgcagcgatacgtgttagctatgacggcgagtacatgagcagcgcccgcaagcgtaaagcgcagtcgtttgaatattccaatgattatgaaattgccatggaggcattctcttga

SEQ ID NO: 103200 - DNA, 1089 bp, Enterobacter aerogenes
atggccttttatacgatagaaaaaagactaaaagcagacggaacgtcgcgctatagatgcgtggtaggcatcaagagcggcggcaagtacacgcatagagagagtaagacattttcgcggcaggcgcacgccaaaacgtgggggcagcgtcgagtcatcgagattgagcgcgacggaggcgcggagagagagcaggcatcgataacacttcacgacttgatagatctctacctgaaaagcgacaaggtgagggtgggcgagtcgaaaagatatgcgctggctttgataatgcgccgcgatattgccaacaaggatgcgacggaacttagagaggttgatgttgttgagtttggcaagcaacgcctggcggagggcgtgcagaccggaaccgttaacagtaacctaagctatattgcgacggttcttaaatgcgcgtctccgatatttggaattaagataaatatggcggggtttgacgctgcgcgtgagtatatgtggcgtactggaatgatgacagaggcaaataagcgcaccagaaggccgacccggcaagagtctgatttaatccttgaggggttaaggaaacgcgaattaactgcgtattctaaaacccctttttccagaatttatcttttctcaatcctaacatgcatgcggattggtgaggttttgcggcttaggtggcaagatgttgatagtaaaacaaaatctatcttagttagagaccgaaaagacccgcgaaagaagattggtaatcacatggtggtaccgttattaggtgaggcttgggatattttgcaggagcaaccaaggcgcggtgaattaatatttccatacgcgagagctaatatctcaaaggcgtttaggttggttaaaaattctcttggtatagaggatttgcattatcacgatttacgccgcgagggggcgtctcgtttgtttgaaatggggttcagtgttgaggaggtggcgcaggtaacaggacacaaaaacctgcaaacactttggactgtttaccgagagatttaccctcaaacacttcatgagcgctttgagcaactcaaagaccgcagcaagcctaccaaataa

SEQ ID NO: 103201 - DNA, 1182 bp, Enterobacter aerogenes
atgcaaaacagtagcgccgcccttccccgccgcgggttcgacttaacctcctccgcttttcttatcgtcgcctttctgacggggatcgccggagccttacaaaccccgaccctgagcctgtttctgaccaatgaggtgcacgtgcgcccggcaatggtcggcttcttttttaccggcagcgcggtcatcggcattctggtaagtcagtttcttgccgggcgttccgatcgtaaaggcgatcgcaagcagctgattgtcgcctgctgcctgctgggggtgcttgcctgcgtgctgttcgcctggaaccgcaactactttattctgctgttcgtcggcgtctttctcagtagttttggctccaccgccaacccacaaatgttcgccctcgcccgcgagcacgcggacaaaaccgggcgcgaggcggtgatgttcagctccattctgcgcgcgcaggtctcgctagcgtgggtgatcggcccgccgctggcctacgcgctggcgatgggttttggttttaccgtgatgtatctcagcgccgccgtggcgtttatcgtctgcgcgctgatggtctggttcttcctgcccagcatgcgtaaagagagcaaaaccgccggtggtcatcttgaagcgccgcgcaccaaccgccgcgatgcgctgctgctgttcagcatctgtacgttaatgtggggcaccaacagcctctatatcattaatatgccgctgtttatcattaatgaactgcatctgccggagaaactggccgggctgatgatggggaccgccgccgggctggaaatccccaccatgctgattgccggttattacgcgaaacgttttggaaagcgcttgttgatgcgcattgccgcgcttgccggactgctgttttatgtcggtatgctgactgtccataccccggccctgttgctggcgatgcaggcgctgaacgcgatttacatcgggatcctggccggtatcggtatgctctattttcaggatctgatgccgggccaggcgggcgcggcgaccacgctgtataccaataccacgcgcgtcggctggatcatcgccggctcgctggcgggcgttgtcgcggaaatctggagctatcacgcggtgttctggattgcgctggcgatgggaattatcgcccagggctgcctgtggcggattaaagacgtttaa

SEQ ID NO: 103202 - DNA, 198 bp, Enterobacter aerogenes
atgagtaattgtatattaggcaagccggctaacaccccatgcgtgcagctggatgaacatctgcgctgcaagatttttgcctcgccgctgcgccctaaagtctgtgcaggtttacagccggccgcggaaatgtgcggcagcacgcgtcagcaggcgatggcttatctcattcatctcgaagcgctgaccgcgccttaa

SEQ ID NO: 103203 - DNA, 1917 bp, Enterobacter aerogenes
atgaagccaaagttgtattcgtatgtgcgtttttcatctgtgaaacaacgggaaggtaactcgctggagcgtcagcaagatactgcgctaagaattgcatcccgctatgacctcgaacttgatacaacagctttccacgatctcggtatgtcagcgttcaaaggtaaaaacgcgcatgaagggaagctatcagagttcattaagcagattggggtcaaagttcctgttggatcgtggttggtagtcgaaaatcttgaccgtataagccgtgatgatgcctggagcgcgttagatattttcaaaagcatactgagtaagggaatagtcgttgttactggcatggatgaaaaggtttataagtatgcggatgtaaagaataatccaaccgacctaatcatctcattgctaatgttcacccgtgcacacgatgaatcgttaacaaaaaagaatcgggttgaatcccaagcccgctctctgataagacataacctaacaagagaacctggaacgccagcaagagcaatagaatctgtgggtcaaaatgtctggtgggtagacacaaaatcaggatatgttaccccacacccaacgtattttgcggcagcgcagaaaattatagaactaaaacaaagcggtgaaactcttcttggaatccaacgatatcttaacgaacactatcctgccccaaaaaagagggtttataaagaccagacaggccaagcactgacgtccaaaacggaacaatggggcaagcatttaattcgaaccttcttgaatcctactgttcatgggcaaaaagtcttcacgctggataagcgcgatgaatcaggtattgttatatacgatccggattcagaaaagccgttgaaggaaacgttcactattcctgattactacccggtattgatgtcagaaatagactatctgacactttcaaaactggatcgacaccgagcggttactcgaagctcctcaaaatacccagagggtaaccctgagcccgaaatcccgttactatcaggcattggaattcttttctgcgggaagtgtgggtcttttatgttcaaatcaggttcaaacaaaaacaaataccgttatatctgtggctcaaaaattgttcagggtaagccttgcggtaaaaaaggctttacgtcatatcaacttgaacacactattttgcaactaatcgctgatcacgtctggaacaaccatcaagaagataaaacagcctggtacgaatctgagattgcaaaaacctcagaatctattgataagcttctgaaactggcaaccctaacggacagcctcgaagagctagcagaacagattaattcgaacaaacataaaaaagcgacgcttgagagagaatttcatcagtacaaaatcaaccgttcagaaattcaaactacgggctgggagcaattccaacatttcgatgttcatgacacaaagaatcctaaccgtaagcagattagactgaaggtaaagcaagccatcaaacgcattgattgttatgacattgatgggcggcatgatcatttcgaagtaaccttcaccgacgagacaaagcaaagaatagtgattaagttcaatcgcaaccgatctcctggcgtttcgtatgtagaagcacaaacagtcaacgatcatgacttactaaaaatgcaaggacttgtgttgcactccttcattgatgaactgatttcgcctgacaaatttgcgcagcatattaaggaaaaatacgaagtcagtcttcttaacccgacgtatatcaccgagttggaaaatagcacaagccgagacaaaggtaatggaatggctatcatagtggatggatctacaagcaaaacttatgcaactgtcaacggtactaagtacgagataaactcgttggaagacttagaaaaactttcgcactaa

SEQ ID NO: 103204 - DNA, 864 bp, Enterobacter aerogenes
atgaaactgttaaaatcatacaaaatcattatcttacaatcgttgattctttcaggcacgacacttgcagcaccgggcgacttcaatggtttccgcgatattggttctatagatgagctaatggcacttccacaagaggagctttgttcgaacggtggaccatcgcgaaatgaaatctatcaaatactccttaatgaaccgctaaccctatctatgtatcaaaatgatccaaatgcagcccgcatgcttatcaatgaacaatcccaaaatatcaatgccaagattaaacaaaaatgttcaaccaaagagaatgtttccactcgaaaacttacaagagcaatgcttcgtaatgaagaggaaatgtgcaaagctggtgcgccaactaaagatgaactcaaggttcttataaacgaatcgaacgaaattgatgaacaactaagagcaatgccttatgaaggacgccttcttatggaggaggctgcaaaattaaatgggactacactccgtgaaatgttcatagatgatgtgactaatgctgcggcaaaaaattggcaaaaagcctgttcagaaaaatcatatcttaaaaagagtgaaaaaaaatccacgcaagaaagaaaggacaacaatccgccttcaaatatcaaaaacgaagataactccgatgtcagtcaaaaaacatacaacatcagcgatcaaaaattaaacaacgcatggaataagttgaataaagatatacgtaagaaattactacctgcacagagagaatggataaagtcaaaatctatttgcaatggtaattgggtatgtctcactgatatgacgaacaaacgtactattgaactggaagctgaaaatgcaagctaa

SEQ ID NO: 103205 - DNA, 609 bp, Enterobacter aerogenes
gtgaaatcaccatatgaaagctatataaaaaaagcggttatagccgttgctataatctacggcatcggtaacatcttgtacgggctatcaactactccagatccatctaacacacctgaaacaaaggtcgtggaaaatacgaatacaaccccctcacaccaaccaacagaaccatcaaaaccattgccaatcgacatattccctaggatgtacactaccggggaagtgtatgctagatttcaagagcatgaattccgggcaacaaatgacttcaaaaattgccgattgatggttacaggaaaaatagaaaatattggtactgttactttcagcaaaaaacctctggtaaccttaagtattcccggttctgatgaggggttgaagttcatattcgaagatacggactccaataatgacgaagtggctacattagatatcggagagtcggtagtgatcgccgggataaatgcagaaaaaggatcctttggtggtgtatttctcgatgactccatactaatgtcagacatgatctccaaggaaccacacaaacagcgacaaattttagttcccagtggtggaatttttgacagagtgatttgtcgtaagtag

SEQ ID NO: 103206 - DNA, 234 bp, Enterobacter aerogenes
atgttcactattcctaatcaatcctcggtagcaaaagcctggcaagagtttgatgatgatggtcgaatgaaaccctcatcctattacgaccgaatcgttgatgtgatggaggaactattcaagatcaccttggttctgaaggggcatactgagtatcttgcagatcgttacagtgaacggaaagaaagccatgaacaactttcaattcgggttaatcagcaaaaatcgacctga

SEQ ID NO: 103207 - DNA, 354 bp, Enterobacter aerogenes
atgtattggtttttcattgagggctgtttacagatgctacctgttcaactttttaagctgcttgcagacgaaacacgcacgacgattattctgctgctgcgagaagctggggaactgtgcgtgtgcgagctttgctcggtcaccaatcagtctcaaccgaagatttcacgacatatagccttgttacgcgacgccggattggtgctggatcgccgcgaaggaaaatggatttattatcgactttcaccacacatgcctgcctgggcggcatccataatcgaaatcgcctggagtagccagcgcgatgaagtacggctgtctttgaataacgtaaatgctgccgtatgcggctga

SEQ ID NO: 103208 - DNA, 1290 bp, Enterobacter aerogenes
atgttgttggcaggtgcaatcttcgtattaaccattgtttttgtgatttggcagcctcatggcctcagcattggctggacagcatctattggtgcggtactagctttagtatcgggtgttatacaggtggatgacatcccagttgtatggcacatcgtctggaatgctaccgcagcttttattgcggttatcatcatcagcttacttcttgatgagtctggtttctttgaatggtgcgctttacatgttgcccgttggggtgatgggcgtgggcgattgttgttcacctacattgtattacttggggcggctgttgctgctctgtttgctaatgatggtgccgcgctgattcttacgccgattgttattgctatgctgctggcattaggattcagtaaaggaaccacgctcgcttttgttatggctgcgggatttattgcggatacagcaagtttaccgctgatcgtttctaatttagtgaacattgtttccgctgacttcttcaaactgggcttcagcaattacgcttccgtgatggttccggtagatcttgctgcgattgctgccacgcttgctgtactccatctcttctttcggaaagacattccagccgtttacgaattgtcccgattgaaagctccagcagaagctattaaagacctgcctacgttcagaactggttggatagtgctattgcttctcttggtcggtttttttgtgctcgaacctctcgggatccctgtcagtgcgattgcagcagtaggagcgttaatacttttcatcgttgctaaacgagggcattcgatcaacacgggcaaggtattgcgtggcgcgccctggcaaattgtggtgttctcacttgggatgtacttggttgtttatggtctacgtaacgcaggacttacagaacatctttcgggtgtcctaaaccagtttgcggataaaggtgtctgggcagcaacgttgggaaccggctttttatctgcgtttttgtcatccatcatgaacaacatgcctactgtgttggttggcgctctatctatagatgagagtacgacatcaggggttatcaaggaagcgatgatctatgccaacgtgattggctgcgatctgggacccaaaattacaccaataggaagtcttgctacgctgctttggttgcatgtccttgaacagaaaaacataaaaataagttggagttactacttccgtgtgggcgttgtaatgacgctaccagtactgttcgttacccttagtgcactggcgttacgcctgtcgtttcccctgtaa

SEQ ID NO: 103209 - DNA, 819 bp, Enterobacter aerogenes
atgagttttgtagttaagcaaagtcgggaactttttaagtcgcttatatccaatcgccgtttaatatataccttaacacgtagggaagttgttagtcgatatcgtggctcagtattaggattactatggtcttttttcacgccagtactaatgttagtggtatatacatttgtgtttagtgtggtttttcaggctaaatgggggggggacaactcttcccgtacagcatttgccttggtattattttcgggcttaattatattcaatttgttttcggaatgtattaacaaagcacctatcacaatacttagtaattctaactatgtgaagaaagtaatattccctttggaaatattaccatgggttaatctatttgcagctttgtttcattttgctataagttgcttagtttggattgttttctatattattgaggtcggtgtacctcatctgactatatttttacttcctgtgatactgataccgtttattttaatggtaatggggctaagttggtttttggcatccctaggtgtatatttaagggatgttaaccaaatagtcggtatagcaacaatggtactaatgtttttatctcctattttttttccgacatctgcacttccagaatcagtaaggcctttattatcgcttaacccgcttgctcagtttattgaacaagcgagggatgtgatgtattgggggcgaatccctgcatttgtgccatattttattgggttaattgttaatgcgataatcgcatgggcaggtttcctttggttccaaaaaacacggaaagggtttgcagatgtcatctga

SEQ ID NO: 103210 - DNA, 1347 bp, Enterobacter aerogenes
atgtcatctgatgatgttattcaaatagctaatttaagtaagtgttatcaaatttatgattctcctaaagatcgattgctgcagatgttttttcgaactcgaagacagctttaccgagagttttgggctttaaaagatgtaacatttaaccttaaaaaaggcgaaacagttggcattatcggtcgaaatggatctggtaaatcaactttgctccaaatgatttgcggtacattgcatcctactgatggttcagtaaaaataaatggtcgaatagctgcattattagagctaggtgcagggtttaaccctgaatttactggccatgagaatatttttatggctgcatctctgtatggtttgactaatgaacaaattagggagcgttatgataaaattctttcgtttgctgatataggagactatatcgatcaaccagtcaaaacatattccagtggaatgtatgttcgattagcctttgctgttatagctcatgttgatgccgatattttagttgttgatgaggctctggctgtgggtgacgctgtttttacacagaaatgtatgcgtttcatcaggaagtttaaagaaaatggtacgttattatttgttagccatgacactcattctgttttaaatttatgtgacaaagctatttggcttcacaaaggtgaaatgatagcatcaggtaaagctaaagctattacagagcaatatttacagtatactctgcaagaagtctatggtgacgaagcgaagctggatgccatcaaaaatacaaatcaaaatgaagcgttggagatgcactccctgaccactgaaattgaaagttcggtagccaatcaaatgtttgactataatagtcaatatggtattgataataatttatcggatgctaatggttggaaaaccggggctggtgaaattattgatatttctttgattaagattgcaaccgatactccaaatcagttattcaaagggggggaaaaggttaagttgcgtattaccgctgctttatatcaaagatttgattcaccgatattaggttttcttgtgaaggatcggttaggtcaagtgttgttcggtgagaataccttaccgtttacggataataacaactttagcgtccattctggtgggaaaatagttgctgaatttgtttttaaattgccaatgcttcctaatggtgagtactctatgatggtgtctttagcaaatggtgatataaatagtcatgtacaacatcattggttgcatgatgctttaataattaatgtctcttctagcgatgttcgttggggattagtcggtattaagtttgatgatgtaaaactggaaaaagaatga

SEQ ID NO: 103211 - DNA, 3558 bp, Enterobacter aerogenes
atgaaaaatttaatagagtgctataatgaacataatggtaagtcttccgataaatgggagctttatcttcatacttatcaccaatatctttccagtattagatcgcatgttaatgatttccttgagattggggtgcaaaatggtgggtctttagaaatttggagagattatttctataatgccgaaaatatcgttgggtgcgatataaatcctgaatgccaaaaattaaaatatgacgataatgcaataaaaattattataggtaactcgtcaacagaaatcgttaaagcgcaaatccaaaaaatttctccatcgtttgatttgatcatagatgatggttcgcatgattcatctgatattataaagtcatttctactttattttccacttataaaagataatggcatttatattattgaagatttacactgtagctattggcaagattttgaaggtggcctttatgatccattctcctcaatggcgtttctcaaaaaattagctgacgtgcagaatcatgagcattgggggatcacattaagtgctgaggagttttttcaaccattttatgaacattacggttgtgaaaatctagggtcaattaattatagcgaaattcactccgtcacttttttaaattctctatgcattattcaaaagtgtaaggcgaagcataatctgctaggcattcggcatgttgttggtgatgaagaatcggttgttcaaggaaataagaattataatggaacttttatgcctaccatgtgccaaaggcataacttttggagttcgttaaaaattcatcctgaaatggaatggaagaagctagttgttgctgaacaaaatcaggctaagacaattgttacccaacagaagcaaattgaagagttgttgcagcgagttaaacagcaggataagcacatcagaaatttggatgactctttgaacatctttaatcaaacattacaagataaagatgatattattaaacgtttaggctttgataatcaggcactgctaacatccactagttggcgaatcaccaaccccatgcgtaaggctgtgttgaatgctcggcgagttaaaaaagctgcaaaaattgtcacggaggttatcggaacacacggcgttgcctatacataccgaaagggtatggcagtattcaaaaatgagggtatcaaaggcacgattcaacgaataagaaatgctgcagcattacagaacatacaatcaagcagacagcggaaagaattaccttcagttagccttgaagcatcaaaaatattgagcttacgagtactaattgtggccgaaatgtcgataccacagtgtcgaaagtatcgcgttgaacagaaagttgaactatttagaaagctagacattccggtcactgtccttaattggaataatactcaagaatgtattaatgcacttcaaacacattcgttaattattttttatcgagtgcccgcattcgacagcgttaatttaatatttgatgagtgtgaacgtctcaatcttgaaacgtattgggaggtcgacgacctaatatttgatgcagaagttatgaggaatagtcgcactctgaatgagttggataaggatatttttcagggtttattagatggtgctcatttatacagaaccgcaatgttacgctgcaaatttgctattgcttcgactcctcatcttgctgaagaaatggaagctgctggtgttgcacgagcatttgtagtagaaaatgctctcgaccctgaaaccatagctacagcttcgtcattgcctgaaactcgtaaaagttatcaggataacattatacgtatcgtttatggctctggtaccagtacacataatgttgatttccttgaagcctcagatgcggtactatcgattctccaaaaatataaaaatgtacatttccgcttgatcggaactttagaactcccgaaggaatacgatactgtaaaaaaccaaatcgaaagaatagagttttgcccgtatactgattatttgagaattctaaacgaatgcgatataagtatcgcacctttagaaaactatgtgtttaatgattctaagagtaatattaaatacattgaggcttctattttaggaatcccttgtatctgttcgccaaggcctaatttttctaacgtcatttcagatggagaaaatggtttcttatgcgaaagtactacacagtggagaaatgctctcgataaattagtgaactcgatggagttacgtcatttagtgggaatgaaagctaaggaaacagtacttgctcgttactcccaagaatatattgccgaaaaacaggttaagccatttattgatggtttcaaatgttctgataaaaatgtcaaaaagcagattttatcagtaaactgctattatggaccacgttcttttggtggtgctactattgttgctgaagcactcaatacgcgtttaaataatgatgaacatttcaatgttcatgtgtttacagctttgaacgatgaatatggcccactcaatacactccgtcgctacgaatttgatgggcaagattgttatggattggttattcctaatgacctatcatccaggaaacagatcgtaaatcatgacatagatattgagtttgagcgtgtgctcgatcttacacagcctgatttagttcattttcattctattcagggattgggcgttacaatgctggatatatgccatgaacgtaaaattcctattgtagtaacagcccatgattattggtggttgtatgagaatcaatttattttaagcttcgaagaagagcataaatcgaataaaatatctgagcgtattggtttcatagaaaagcatgaagacttttatcagattaagaaacggaactcgctaaaactggctgatattattttgactccaagcctttttacttctgaaatatacaggggggaaggttttgaacatgttctcattaataaaaatggtgtttctacgcctgtttccgagcgtttacgtctgctccgacgtcccttacgttttggctacgttggcggtaataccaatattaaaggttttcatttgataaagcaggtatttgccaaagtttcaccaaatcaagcatgtttagttattgtcgataatactttaaatcttggttttccatcttttaatcatcatgatctcgaagggattaactctttcgaagtggttccggcttttactcaggatgagattgatgatttttatgctggaattgatgttttactctatcctacgcaatcaaaagaaagctttggtttaacagtacgcgaggccctcattcgtgatgtatgggttattacaagtgatgccggcggggccgcagaggatattatcgaaggtagcaacggtttaattattccatttaataatgatagcagggatctttaccaggcagttatagagacaattgaatattttgctggaagagattcatctgaacccattaaactacctcattctcatattcgaagctttgatgagcaatatgaagaattggcagaaatttacttggatattttaaaataa

SEQ ID NO: 103212 - DNA, 891 bp, Enterobacter aerogenes
gtgagacatgaaatactcgtaatcacaataacattcaatcctgaaatcgtatgtttgaatacgcagattgaccaattaaaaaaaagtaatgtagatattctaatcgttgataatggttcgactaacagcactgaaatttcgcatttgttgaagcagagtccagtatctgtgacgctacatttatttgagactaatgttgggattgctactgcacaaaattggggcattaattatgctagaaagcagagatataagtatgttttgttaatggatcaagatagtatcccttccaatggcatggttgatactctttttcgcgcactgcagcagcatggcgatgcagctgcagtggggccagtgtttattgatcatcatgggagtcgacatgctcgctttattcgtgttgaaggacttcggatcaataaaacgctcgaacctgataaatccggttgcgtttcagtagatcacttaatttcttcggggtcactaattccactttcagttttcgactatatcggcgatatggatgatagtctatttatagattacgtcgatgtggagtggtctctccgtgcacgcagtcagggactacgttgctatggggtattgaatgcttgcatggtacattccttaggagagcgccgtgtttccataggtagtcgaagtgttgccatccataaccctgtacgtcattattatcaggttcgtaatgctatatttctatataaaaaaaattatatcccatgtaactggaagattgttgatgcctgtaagctaatcggcaagttggctatttttattttctcagcagaaaaaaagcacgaggaaattaaaatgatttcaaagggggttgtcgatgctttcagaaatgtcggtggaaagtataaataa

SEQ ID NO: 103213 - DNA, 861 bp, Enterobacter aerogenes
atgctttcagaaatgtcggtggaaagtataaataataaaggttatgggtgtagagtagtgaaaaaacaagtatcaataaatatctcaattgttacatattttatcgatagtgatattttcccactgttagattcttttttgaatgcagtaaaaaaaacgccttatttgaagtataaagttgctattattgaaaatggcaataaagaaaaaacaaacattcacatgcaagttgaaaaaaaatatccatttgttacgataaatattattggcgagaatttagggtatggtcgagcacataatctcactattgaccaaaaatttgattatcatttgatattaaatcctgacattgagtttttccctgagtccctttattcagctttgcagtttatggaaaataacaccgactgtggcctattgtcccctcaatgcttctgggtaaatggggatcggcaatatttatgcaaaagataccctgatgtatctgttttatttattcgagcatttgcacccaaatttatacagaatattttccgtaaaaagcttgagtattattgtatgaaggatgaaatacaggccgagtccgtattatggaatccgccgaccgttactgggtgttttatgctttttagaactaacactctagttagcttaggtggctttgataaagacttttttctttattttgaagatactgatttgagcttaagggcctgtagaattactagcgtcgcttatgttcctgatgtgaaaatattacatcatggtggtaacgtttccaaaaaaggtttaaagcatattctattttttaccgcatcgatgataaagtttttcaggaagcatggctggagttttatttga

SEQ ID NO: 103214 - DNA, 882 bp, Enterobacter aerogenes
atgaccaccactgtaaatttatccaatacagatgatctcatgaaccatttacattggtttcaacaaacaattccaaatcctgcggcaaaatcgcaccgtggtgtagctatcaattatttggatttgaatgagcgaagagattcttttataagagaattaaaaagcacagcatcaaattgggtatattcaaaaaaaaggtacagtgcaattcttaacaaagaactaaaatcgagaaatcatgacttacaaaatacaataagctatctccatgaattaatggcactaaaatttagaaaaggctgtcctcaaggacagtatggcgaactcttattatttaattttatacagcattttttccaagcagctccgttattgagaaaaatgccaataacgacgaacccgggattagaacgacacggcgctgatgcaatacattatttcgataatggtgataagcaaatatttttcttgggtgagtcaaagtgttatgaatctaagtataaatttaacgaagcactttcctcatctgtaaatagcatcttgaattcaattcagaacatagaaaacgaattactactttatagatatgatgattttatagaaccagagctgcaatcgattgcggattccttattgaaaggaaaattagaaaaccccattttcgaattggtttgtttgattgtctatgaagaaaacaaaaatacagcagcggctactgcctccgaaataagaaaaaaaattgaagaatgtgttgaagacagatggaaaaatgtaaatgcaaatttatatgctaattttaacatgtcatacattagcaggatacattatattgttttcccgtcttggtcgttatctaatttgttaattaattttgaaggatag

SEQ ID NO: 103215 - DNA, 5328 bp, Enterobacter aerogenes
atgagcggagcagcagatctacagcagtgggagacacatcaggcgaaagatgaattgctgcaaggcgttgaacgtgttctcagacatgccgttcaggcgcacaaacatggattaaaagtttatcaaagtctgcaaaacctcaatgaggtaatcggaactgagtatggtaaccgagtcatttatgaactgattcaaaatgctcatgatgcgcacaactccgaagaaaatggacggatagccgtccgtctagtgttagaaaactcttccgggggaacactatatatcgccaacgaggggcgaggattccgccatcaggatgttgaagcagtaaaaaacttggcgatcagttctaaagaaattggtgaagggattggtaacaaggggctcggatttcgtagcattgaggcgctgacccaatctgtcaagatctattcttgctcaaatacaaacgggaaggagagatttgaggggtactgtttccgttttgcagataccaacgaaattgcgaaaagtatttgcgatcttgacgttgatgacgctactagctacgaggttgccaaaatagttccccgctatctagtgcctgttcctctggaggagcaatcggatgatgttcgtgcttttgcccgcaatgggttctccaccgttatcgtggcaccgttggaaactgaagctgcggttatgctggccagaacgcaagtacaagagctgaccaatcgcgatgtaccgctgatgctgttcctcgatcgtattattgaaatcagtatcgagatcgtgaccccggatgggaaatccgaaaagcacatcctgcagcggcagcaaaagttgctgggcagaattcccgacgcgccagatgtcacgctctacgaagttaatgttggtcagaggaaacgttttttagtagccagaagcaatgttgataaagcgcgcgtgcagcaagctgtgatcgacagcttattgatggcaccacagttaaagcgttggcgggactggaaaggaacaccgattgtttctgtcgcagtaggtctaaacaaatcgacggtaacatctggaagactatacaactttttgcctatggggggagaagccacctcaccgatttgcggctatatcgatgcgccattttttgccgatattgataggcgtaatacgaatatgaatctgccattgaaccgcttgttaatggaagtggctgcagaaacctgtgccactgcggctttgtccgtcgtatctcgtgagctggctgtcggtgcatctgcggtttttgatctatttgcctggacgggagaacatcgtcgcatgatgcaaactgcaatggaaggcaagggaacatcgttcagcaaagtccgcttgattccggtgataaccccgcaaggaaagcagcaatggtcgagcctggaggaagtcagtatttggcctgatggtaaatttaacatcctgaagccgaaagatattgctagatacagtggtgcacagttggtttctggcgagttgaatacgccgcgcgtagcacgtttacgggagataacaaaattctcctatttatttcagtcgttagacccttcgactcagacactgagaaaatgggcagaagcttttgcccgttcgttggtggaacggaaatcgcccgctgctagttggagcaaattttatgatgatctgatcacgttgtttgcggcggtaaaagtaaaacttagtacgcttgaaaactgcccaattctatatgaccgccaaggtaaacttcagcccgctggaggacataacagtaatgaacacaatggcgtatttgtgcgtcggcatgtctccagaggtgagaaaaagaaagagaagcgttccgggattccattaccgcctgcgattatttcccggcgctaccgatttctggatgaaagaatcctgcttagtgcggcgacgttcaatgcatttacctccgctgatctgataagagagtacgacccggtcaaagctttgtcagggctgaaaacggcactgagtgataaggcaacaaacaaacagcgccaggatgcgctgctttgggcatttgagatatggcgcgctggaagcgtcgttgtcgatgcggagttgaaaaaagctgatctccatattcccgtgcggtcggggtggtctgcggcaagcaaggcaatgttttcatcttcctggacgcaaaatgggaaagttgtggaaagctatttaaccggagcagcggcgacctctctggactgccggcaggcatcagacttgttaatggttgagccgcaagagtggccggggagagtgcaaaacagcaaaactgactggatccgattcctacgtgtactaggtgttgcagatgggttacaacccattgaatcgaaggtaaaaacgcgtgcatatggcgacggttggaatagctttttacgaaatggagatgagcgtgaagggtttgacagtgactggcgggctgaagtacagcggtcgcagataagtttctcccatcctcagacggtctactcgacggaaggtaaaatatggcgactgcccgggcagcttgagtattcttcatttcctgaagatcttcgggagcagttatgcaccctgattgttgcctttctgaagacgcagaatgcagagttttttacctttgaggtcggccgttttgaacgcccgccttcgcaaactgacacccggacattgcctaccccgcttggcacttttttacgtactaaagcttggcttacctgcaccagctctcttgctgaaggattgtgttttagacgtccaaatacgtgctgggcttcgcgagagcgtcgcaataaacctccacgctttgtggatcatctgttagagcacagcgttgacattgttgaagagagtcaactggcggagcgcctgttttctacgaaaattggtttgcgtgactggaacgatatcgagacggctttggagcgcatgagggagctgatccacatcgttccacagttgaatgctggcgacaggacggatttgcagcgggaataccaacgaagctggcgtgaaattatcaatagcggagttacgctgcccgacgggctggacttgattgtatttcgccgtggacagcatgaagtgctgcgcggcaatatcgatctgccaccagtgttaattgtaaccagcgcaggacaaaaggctgaagcgcaaatgcttgcttccgcgggctatgcaatactcagtattgggttagaggagacagacaagctcatagctcgccttagtgatatgggacgattttcacctcgcaagattgatgatggcggagtgcaacttcgtcttgatggcgagtcgttttatcccgatgagagcgacccgttacttatttctttcggcatgcattggctgccggaaattatggttattggtcatgctttgctagcggaaaatctggaacgaggcgtgcatgcttcaacggttgaaaagcaacttcgcgcaatcagagtgcgccgctgtaagaccctttcgtttgctatccagggcgaagatgccaggcctacggaatcgttcataagctatgcctggccccatgaaacaatgccaacattgattattgaagaaggactggtatttaactggcagaccttagcaaagatttcgcgcaacctatcacgactagtggatgcccggttacgttttattgaaaccttgcttttgcgccttgccgttggtcgggatgatggctttttcagtaaaccggatgacgctctcctggcatgggagatgaattgcgatgtgcaaacgatccgcgatcattacgcccggctacgtatggacattactcatgtgattaccatgctgtgtcctttggtaacgtacttcaaaggcattgaactggcacagcaactccagcgggagtatgccttagctagatcggtatttgatgtgcgtcattggattgcatcacatctttctgacaccgaatatccggctgaaaagatgctggaattttgtgaaacagcaaccgatttcagtgaacttagaaaaatgctgtcacttaattttcggcagtttaatctggcgctggaagcgttgggtgaaacaccactctccaatgaggatacgttacgtaggctttttacggcatatgtcggacagcaacgtttgcacgtttcaggtcggttacgccgacactatctggcgacgttcgatgccggcggcgatttgtcaaactatgttgagcataaatctttaggtttcattaccttcaatcctgaatgggttatgacgtatgaaaccctgaccaaagaaatggtggatgcacaggttaatgctcagctttttgaggcgttgggaccggacaacgatgaagaattgcctacgctcagtgcagtattagaagcgaatcgtaaaaatgtacgcgattttgccatgcaggctcagccgcaagtttccgcctggtgccgccagaatggtgttcaggttcattctcactggcagtacaacgagcctcaggccttttgccgacaacttgaaaataagggcctcctcgattttcggtaccttgcactggattcaataccggattactgcctgcgcgctgggttatggccgccaacgatgcccctcagcttggataataatgtgctgaaccttgatatgagccgggtatccgaagaaaaggaacgcgctgagcaggcaaagcggcaacaggaactagaacgtcggagtatcatttttgccggacagtcacttgatacggacagcccacagtttactgagcaatttcgggaactggcgagtgctgatggcagttggaaggggcgaagccagagcaagacgcagagcttgatggattttggcgcggcggcaatgcgccaggctagtggcggtggtggcggaaaaagaactgggcgcgcgtatcgtgagcctagattgacgcccgctcagcagcaagccatggggttggcgagcgagtggctggcttttcagtatctacgtgagcgttttactgattatatggatgaagcctgttgggtatcgggcaaccggttctcgttttgtggggggggagagggtgatgattcagctggctacgattttatggtgaagacaccgaaagtggagtggctttttgaagtcaaatcgacccttgaagatagtcaggaatttgaactgactgcaaatgaacttcgagtggccagtgcggtggcgaaagacacaagtcgacgttatcggattctctacgtcccttatgtattttcgccagataaatggcgcgttattgaattgccaaacccgatgggcgacaaaacgcgcaatcatttcagcgttgtggggcagggatctttacgtttgcgtttccagctccatgatcagtga

SEQ ID NO: 103216 - DNA, 573 bp, Enterobacter aerogenes
atggcttggttaggtattccatttcctgcgggtgctgtagagtcgctaattataaataaattaccaactatcacactggatacacctttcgcttgggacacggttttaggttctttcatagctggtgcgattcctgcaatcattgcatggcttgcgataaagaataatttcaagttgtctgatagacaagcgaaacgcactgaaaaattaaatcttgaagaaaaactccggattgcctcattagactatctttgttccattgagtcggtagtattcaatatgactaagtatttagcgagagattacaaaacacatgatcatgcattgggttatcctgaatattttcaagcagctttggatttagcgcaaaaaaacgagcgctacttattgttgctggttaagccagacgaaaggtcaaatgaattcttagaggcgattattaaagttaataaatcggttcagccatttgtaactctttctcaagttagcgatgaatgtccaaagatattaaagaaagcagcggataattttattttctgctttcataaatatatacagatgcacgaacactaa

SEQ ID NO: 103217 - DNA, 147 bp, Enterobacter aerogenes; identical to SEQ ID NO: 80620

SEQ ID NO: 103218 - DNA, 573 bp, Enterobacter aerogenes; identical to SEQ ID NO: 80619

SEQ ID NO: 103219 - DNA, 1068 bp, Enterobacter aerogenes
atgagttctcaccattactatccacagctacgatggaaacctgctgagtatgagtctctgatgcagctaaatcagacaacaatctcaggaattactcccatcattaccattcttgatattgactgggactacgaaaatgactgttataaaaaatcgttgagcggctatttatctgacttcggtactaatcttgcaacgtcttggacaccgaatcgtccagtattgttagatttaaagtatttagataaacatggttcgagtcgttctcatcccttagatatgtgcattaatgatgccagatctcatggaaaggagattgtccctgtcgtttccccaacatcctcggcaaactacatacatgctgttcagagaaacgtatctaatggcgtagccatttcacttagtccaacgacgtggcacgcgtttccacaactgttaaatctgttaaatcttcaaccaagtttgattgatatcatcattgattatggcgatatccaaaacgccaacgataacttaaaacaacaggcattagccacgatcaactcgctttcaggacaagccccttggagaacggtgattttatcttcaacctcttatccaagctcgcaaacgggaattccacagcatgtaattcatcctattccacgacatgagtatgctctttggttatatgtagtacagaatttagggaatggcaggacaccatgtttcagtgattatccaactgcaagtgccaccattacgagcgtggacccgcgattcatgtctcagtatgttgcggtgagatattcgaatgacaattcatggatttttgtaaagggcactgccgttaaggggaatggatggggtcaaacgaaaactctatgtactactctcgtcaattcagctctatatcaggcatatggtccaaactttagttggggggatcagtacatttataatagggctaacggcactaataaatcaggtggctctaaagaatggcgcaaggtagcccatacacaccatctcacactagtagttaggcagttaactctgttatcacaaactttaccggctaggccctaa

SEQ ID NO: 103220 - DNA, 420 bp, Enterobacter aerogenes
gtggagcgcagcgaaaacgtgatcctgctgggacctccaggtgtcggaaaaacccgtctggtcgttgctctctgcgtgaaagcgacggatgcagggcatcgggtactgatcctggatgaaataggctatctgccaatgaccagagaggaagccagcctgttcttccggctactgaaccgtcgatatgaaaaagcgagcatcatcctgacgtcaaacaaaggcttcgcagactggggagagatgttcggagataacgtactggcaacggcgatcctggatcggctgctgcatcactcaaccacgctgaatatcaaaggagaaagttaccggttaaaggagaaacgcaaagctggtgtgctgaccaaaaacgcaacgccaatcagtgaagatgaaatggtgaaaagcggacagcatcagtaa

SEQ ID NO: 103221 - DNA, 207 bp, Enterobacter aerogenes
atgaacagtaaaccatccctgtttgaagatcagttcgttgatatgactttcatcacccgcctgctgggggtcagtgataagtggatttaccgactcatcaaagatggcatatttccaaaacccatcaaactggggcgaagttcacgatggctacagagtgaagtggaagcctggctacaggtgagaatccacgaatcacgcagctaa

SEQ ID NO: 103222 - DNA, 582 bp, Enterobacter aerogenes
atgaaaagacattacccacatttaaagaaaatcatccctaacgacttcctgctgaatttgattaatcaccatttcaatcagatcctggcatgtcacgccaagatactggcatttcgaatggattttgattatcagcggggtactaatcgattcattcgtaactcctcgatagaaatacaggatgacctcagagagcttactcagacaatgattagccttcctggcgttatcggtagtttctgggtactggaatggacattagaaggggcagttcatgcccatgctattttttatcttaatggtcgggaacatcagaaatcattcccattcattttaaaggcaggggaactgtggcatcaaattacctatggcgagggaaagtaccagcgatgcaaaccaaaggaatatcatcaggacaacattaacaatgtcgttgaatatcacaataacgaagccataaacagtctcagacgtatagccagttatctaacaaaagaagaccaaaaatatggttatctaatttggggatgtaatgaggtcccctcgcctgcaaggcagggtagaccaagaaagtttagttag

SEQ ID NO: 103223 - DNA, 930 bp, Enterobacter aerogenes
atgagtgcaggaaaacaagtgaccagtctctggacgaaaagagtaaatttatggctttactgggatatctttcgctcagcattaatgcatgttgatgagtctcgtgaattagtggaaagaataggtgatgccactcttttcaaagagtcttgcattaactatatgaataaaaaagaaatggttaagtattggagtgcggaagatttctttgaaacgagtaagcgagaggttgagggtaagttaataccttttagtgaacttgagtggattgattgtgagcgttcgttgtcatttgttgctaattatattcatgccgaatataagctatatacaaataataacaccccctctcttcttgatatcactttacctgaatggagccttggttctgacaagggtggtgtaaattatgaggggttaattcttttgatcgactaccaatgtcgtgtatcaagctttaaccatattcgttcaaacttagaacgtttgaaaaattcctggctccgtatccagaaaaaatttggcaatccgttctggttctcatcaaccagatatgatgctaaatacctggcagattatcagtgggtgatgtcttacttcgataagaacaaaatgatcaatggtaatgtggatttttggtttgaaaaaaatttgaatctgaaagttcactcaatatttgatcaatgggttgagaataaatccgatgctgaaggtgaattgtttattataaaaacaaaaaaagcatggggtcagaaaaaattcagagatagtgttgcaaacaaaaaggttctcaatacctatattagcaaagacagtaagagacaacttgattatctggcaagtcaaaatgaaatgaaaatcaatgaattgattgagatgctgatcaatgatgcatacgcaaaagctaaactgaaaagttgggaaaattaa

SEQ ID NO: 103224 - DNA, 864 bp, Enterobacter aerogenes
atgaaacaatttgacggtctgcactcactgcagcaaccgctttccggcctgccccaatgggtcactgaacgcattctgcagcatataaatcagcttactcactatgagccggtgataggcattatgggcaaaaccgggacaggaaagagcagcttgtgcaataccctgtttgctggggatatatcaccggtcagtgatgtgtctgcctgtactcgaaaaccactgcagtttcgcctgcagctcggcaaacgcactatgactattatggatctacccggtgttggggagtccgaactacgggatgctgaatatgccgcactctaccgtgaacaacttcctcggctcgacctggtgctgtggttgatcaaggccgatgatcgagcgctggcggtggatgaacatttttaccgggaggtgattggtgaggcataccggcataaggtgttgtttgttatcagtcagtccgacaaggttgaacccacctgcggtggtgaaaagttgtctacagagcagaaacaaaatatcagccgtaaaatctgtctgctacatgagttgttccaaccagtaaatccgatctgtgcggtgtcggttcgtctgcaatggggactgcgggtaatggcagagcgtatgatgcgttgcctgccacgcgaggccagcagtccggtatcggtacaactcagtgcgccgcttcgtaccgatgccgttaataaaaaagcctgtgacgattttggggaaacggtcggctcggtactggatacagtaagttccatgcccctgataccggcccaggttcggtcagtcatccagtctgtgcgcgacatcgtggtatcagtcgcccgtgcagtctggaatttcttcttctga

SEQ ID NO: 103225 - DNA, 318 bp, Enterobacter aerogenes
atgagcaacactacatggggcctgcagcgggatatcactccgagcctgggagcacgtctggtgcaggagggcaatcggctgcactatctggctgaccgggctagtatcaccggtaagtttagtgacgaagaatgtcttaagctggatgtggtatttccacattttatcagccagatagagtcgatgctgaccactggtgaactgaatccccgtcatgcccactgcgtcaccctgtactacaacagtttcatctgcgaagccgatactcttggcagttgcggctacgtacacatcgccatttaccccgctcagcgttaa

SEQ ID NO: 103226 - DNA, 204 bp, Enterobacter aerogenes
atgccggtatcacgctggctgatgccgttaactttctggtggataagtacgagctggttcgtatcgatcgcagagggtttagctggcaagaacaatcaccttatcttcgggccgttgatattctgcgagcacgacaggcaactggcttgttacgacgaagtcttaatgatgctgtattgtgagagttccgagcagtcttcctga

SEQ ID NO: 103227 - DNA, 642 bp, Enterobacter aerogenes
atgttcacattggcaaaagatttgctcaatattccagttatcacaagcgtcacccttgccattctcgccgcaattgcgaaaaagtatgtccacttcagccgacgggatttcttttctcgttctcctttagagcagatcgaagctgttaaatggttaaggcaatcaaaaccaccatcttcaaacccactagatgtggctgaacaacaattccgccttctatctttaggtctacatagggacagagatttatcctacaggcttgtggcttttcattccagccactctcaaacccatattcaatcactcaaagcggtattacgttggccggggttatatgatatcaacgatggcaagatatacccccatagtcatttgaagtggtctctaccactcatgcttatttttatactgacccttatgggttcagagataattaaaagctattcacgtgaagatgtcagtcagtttattttctttctaactgtcatcttagctactcttattccatggttctggatgttatcctgtactctcaagatattcggcatcagtaaaaaactgaacacatacactccaccagtcattgatgctgaaaccgataaagaggatttcagttcaatcattaataataaatatccttaa

SEQ ID NO: 103228 - DNA, 468 bp, Enterobacter aerogenes
atgtttgatttttctgcagaaataaaaccatttcattcgttaggcgatgtgctgttaaatacaaatatatctgtctatcttgctgaaatgtatgctgaccattgtgttgagtacaaagagtatcttctacctgatgcgagtaagagattttcctatgtattggatgatactttaactatatcaaccgaacctgatggaaatatattttctattggatgcaatcaaaattacaaagggttatacaaaaacttattatatgccggtcaagaatttggtgagataaaaaaactcacttatcggcaaagaatatttaatggttccattattatagacgaggattttggcattcaatttatattaccctcaccatttgatgagatagctgacagtatagataacattccgtccgacttgaaattgaatgaaatatatataggggatttttcattttggaatccatgtaaataa

SEQ ID NO: 103229 - DNA, 1470 bp, Enterobacter aerogenes
atgctaagaaaaattgataaaaatacaggcttcaatgcatcagagggaaaattgataaatttggcagataacgcattccttggtttatggtcatacgcaaatatacacagtgatgaaggctactctaaaaataaaacaggcaaagaagtatgtgatttgctggtagtatttggtgataatgtaataatcttctccgataaaagcattaaatttaatgaagataaagatattagcattgcctggaaaagatggtttagaggttcggtgatagattcttctcgtcaattgtatggagcggagaagttcataaaagaaaacccgcacaggatctatatcgataaagattgcaaagtgaaattccctgttaaaataaataaaacatcacgattccaccttattgcggttacggacaatatctccgcgccagcaaaaaaatactttgactcattatcgaaaggtagttcaggcactttggttaacgcttttatatatgatgcgaaagaatgcctgaataatattttttgcgtaggtgatctgtatccgaacaagacgtttattcatgtacttgatgaactttcactgacgctactgttaaccgagttaaatactgcaaccgatttcataggatacttaattgctaaagagaaggcagtcagagaacaacgtcttgcgattagccttggtgaggaagaaatattagctagctatttgctaggggataaaaaaatcatatctgatgacattttaagagagcaaggattagtttccattccagaaggtgaatgggttcactacactaaatcatttcagtatcaacatgctattgccatcaaaaaaggaagcattttttgggatgactttattgaaaattgctctaaaagtatattggcagctaatgtaggcttcttcggggataagccattctcaatgcatgaggcagctataagagaggtagctaaagaaagtagatcatcacgttattatttatctaaactcttcaaggaaaaaatggattcagtgccttcgcacataatgtcctccatgctggttgaatcgcctgacgaatcgggaaagttttatctattgctcttagttcctcaaaaagatgaaattgattaccaggcatatagggagcaccgagtagcgcttataaacatgtatttcccaattgcctttgcaagacacaaacaaataaaaaaaataatagcaattgcgactgagcctaaaaataacagtggcaggtcagaagacattatttatatccactttcctaaacccatgccgagagacgaaagagctgaaatacttaaagcggctagggacattaacgtcatgtcagattttgtgccttggaagcagtcagccactatcaaacattacactccgcctaattccaatatacaaaagttaggtaggaatgaaccatgctattgtggctcaggggaaaaatacaaaaagtgccacggttaa

SEQ ID NO: 103230 - DNA, 1068 bp, Enterobacter aerogenes
atgaacaacgcaacactcatgtatctaattaaaatgattttcagacccaaagaccaagtatcccgactgacgttaggactgcttaaaattggaatggtcggcttagttggaggctggggagttaaccttgttttttcagaggaatttctccaaaaaaatattaatatcatcgacggattaacattcacttatcaaaaatgttctgatcttgctctttattttggtgtgttttttctgattgttgggtttattttttggtgtgtttgtgcttgctttgctcttagagatttgagcaagcgggatattgctcttatccgcgcatttggatttgaaaatactgaccctaaagctgcggagaaaatgctttctttaagagaaaaagcaaaaatattaaatgttgatttcaaattgttcgattcaagggataaaaataataatttgtctaatgcaaattttatccgacaaacaatcagagaaagaatacatcatactggagcaacaacggcatatgtaacagcaattggtagcgtgccgtatctttatatgattggtagctttatgacagatggacacttagctctaaggttgtttgactttgatcgggataaaaatgtctttcatcctcttgatgcacctcccacgaatgcaaagatagtaaaatactacaatggccagataataactgatagtaaatgtgtgtcatcaaataatggacgagttataggtctcgcaatttcatttacgatggagattttagaaaaagatcttccaactgattttatagggcatacattgcatgttcaactaaatacaggatttcgatttgataatcttccagaggaggatgaacaagagaaaatagttaaaggcattagttatatcatctctgaattaaaaaaagaggcagatgaagtacacctttttgtttctgcacaagcgtcagttatcgttagattgggtgctctctatcaggaaggtttgcatggtaccatcaatatttggcactggaattctattgctaataaatatgaatggtgtttgagggttaccggtaaaaatataagctag

SEQ ID NO: 103231 - DNA, 492 bp, Enterobacter aerogenes
atgatgcatgtgatatttgcaatggataattttgatttgataactgttgagactgaacattttagtctccaaataacaaataaagtgtatgatatctgggagatgcatcgccagatcaaaccaatggatccggaagcgtttggagtacttgttggtaataaagatctggaaatcgagaattatggattagtcgaaatcacagtaccacagaaagaagaccgatgctcaagaatgagttttactctccgagatcccgaacatcagagtattgtcgatcatttgcataagagttcgcaaggtcaattaatatactttggtacatggcatacacatccagaaaaaaatccacatgcctcatacatcgatatcagggactggaagcaatgcagattacggaatcctgagcagagactttttttcataataatcggaacagaaaaaaaagcactttactattttcaaaatgaaaatctccttcgacaggaattctga

SEQ ID NO: 103232 - DNA, 810 bp, Enterobacter aerogenes
atgcctaggagcggggcagaacaatccctcctaaacaaaaaagttatgcttgtcggatgcggctctgttgggggggatatcgcagataaacttgctgcttctggcgttggtcatttagatttatatgatccagacacactttctctgaataatctttatcgccatattctacccccgatttatacttcgttccataaatcgcaagcattgtggcacagcctcaccagtaaatatccgtggttggaggttgaaaaatatacaaatacgctacttgatttaaggaatcgcaaattactaatggagtatgatcttatcgtcattgcgataggagcaccgactcaggaacgattgtttcatgactatttgatcaaggaaaaaattaatgttccagtaattaacacatgggtcgaaggatatggcataggggggcacgcgattctggaaattcctgaaacaaaaggttgtttacgttgtgcatatgttgaccccgttgatttttcgagagggctggcctcaaatttgaattttttggctccaaatcaggaactgacgagaaatcatgctggatgtggtgatgccttcttaccttatacctacatagcctcaactcaaacggcactcattactgctgatcttggcgtcaaataccttcttggtaaaattcgggaatcatccagagtgagttggaaaggaagtgctgaggatgcaatagaaaacggcttcaaattaagcgggaggtatcatacattcacccgtacattagaagtgctccctttgctcaatgatgcatgtgatatttgcaatggataa

SEQ ID NO: 103233 - DNA, 1407 bp, Enterobacter aerogenes
atgtccaagcaacagatcggggttgtcggtatggctgtgatggggcgtaaccttgcgctaaacatcgaaagccgtggttataccgtctctgttttcaaccgctcccgtgacaagaccgaagaagtcattgcccagaaccctggcaagaaactggtcccgcattataccgtgcaggagtttgttgaatccctggaaactccgcgccgtatattgttaatggttaaagctggcgctggcacagacagtgcaattgactccctaaaaccgtacctggacaaaggcgacatcattattgatggaggtaataccttcttccaggacactattcgtcgtaatcgtgaactctccgcagaaggttttaacttcattggtaccggcgtttctggtggggaagagggcgcactaaaaggcccatctatcatgcctggtggccagaaagaagcttacgaactggttgcaccaattcttaaacaaatcgctgctcgtgcggaagatggcgaaccttgtgttgcctatattggagctgatggcgctggccactatgtcaagatggtgcataacggcattgagtatggcgatatgcagcttattgcggaagcatacgctttactaaaaggtggtctggctctttctaatgaagaactggcaacaatctttactgagtggaacgaaggtgagctcagcagttacctgattgatatcaccaaagacatcttcactaaaaaagatgaagaaggtaaataccttgttgatgtgattcttgatgaagcggccaacaaaggtacaggtaaatggaccagccagagctcactcgacctgggcgagccgctgtccctgatcaccgaatctgtttttgcgcgatacatctcttcacttaaggaccagcgtgttgcagcgtctaaagtcttgacggggccaaaacctcaaccggctggcgacaagacggagtttgtagagaaagtccgtcgcgctctgtatctgggcaaaatcgtttcttatgctcaaggcttctcccaactacgtgccgcatctgatgagtacaactgggacctgaactacggagagattgccaaaatcttccgcgctggttgcatcatccgagcccagttcttgcagaagattacagatgcttatgagcagaatgcaagcatcgctaatctgctgttggctccatacttcaaacatattgctgatgattatcagcaggcactgcgcgatgttgttgcttatgctgtgcagaatggtattcctgtacccacattctctgctgctattgcttattacgacagctatcgttctgtggtcttgcctgctaacctgattcaagctcagcgtgattattttggcgctcatacttataagcgtactgataaatctggtgttttccatactgaatggattgaataa

SEQ ID NO: 103234 - DNA, 258 bp, Enterobacter aerogenes
atggcctttacggaaatcgttacccctccaggcgaaatggtcctgttcatggcgttcctggcgacgatcgtcatgacctcttcggtccgggccgcggctatcattgttgccctgatggttatctccaggaccgcccgactggtggtgtccattctggtcaccctgcttcgggccattctgccatacctactgttgccccggacgatgaccgtcatttgggccatcggcaaaagcctgagcgctcagcacgcaagataa

SEQ ID NO: 103235 - DNA, 768 bp, Enterobacter aerogenes
gtgccggatggtgaagcggtgccgttccgcgccggcggttatattcagatcgaatgcccgtcgcataaagtggcctatgccgactttgatattcccgatgaatatcgctcagactgggataagttcaacctgttccgctatgtctctgaggtgaaagagccgaccctgcgcgcctactcgatggctaactacccagaagaggagggcatcattatgctcaacgtgcgtatcgccacgccgccgccgaaggttccggatgcgccgccggggattatgtcgtcctatatctggtcgctgaagcctggcgataaggtgacgatttccgggccgtttggcgagttctttgccaaagagaccgacgccgagatggtgtttatcggcggcggagcgggcatggcgccgatgcgttcacacatctttgaccagcttaagcgcctgcacagcacgcgtaaaatcagcttctggtacggcgcgcgttcgctgcgtgaaatgttctatgacgatgagtttgaacagctggcgcgcgaaaaccccaattttaccttccacgtcgcgctctccgatccgctgccggaagataactggaccgggcatacgggctttatccataatgttctgtatgaaaactatctgcgcgaccatccggcgccggaagattgcgagttctatatgtgcgggccgccggtgatgaacgccgcggtgattaaaatgctcaaagatctgggcgtcgaagatgagaacatcatgctcgatgactttggaggctga

SEQ ID NO: 103236 - DNA, 417 bp, Enterobacter aerogenes
atggaaattattcttggcgtggtgatgttcacgctgatcgtgctggtcctgtcggggcttattctggtggcgcgctcgaagctggtgaacgcgggcgacgtggttattgaaatcaataacgaagcggataaacagatccgcacgccggcgggcgacaaactgctgaacacgctctccagcaacggtatcttcgtctcttccgcctgcggcggcggcggctcctgcggccagtgccgggtgaccatcaaagaaggcggcggcgatattctgccgacagagctttcgcatatcaccaaacgcgaagccaaagaagggtgccgcctggcctgccaggtggcggtgaagcagaatatgaaaattgagctgccggaagagattttcggcgtgaaaaaatgggagtgcgaggttatcatctaa

SEQ ID NO: 103237 - DNA, 306 bp, Enterobacter aerogenes
atgattaacaaaagaattgctagcttaattgcaggtgttttagttgtttctgctattcagcctatagcgggtttaatgggtagtaatcgttgctatatttttgatatttcccatttctacacagatcaaaaagctaaagaatattctgctaaaacgattgatgcagctactaaaggcgataaagtcgccatgtgtgataactataaagaggctgatttttattcccgtatgggtggcgatcaatcagggcatgataagagtgataaagatattgctgaattaatgaaaatgtgtggcatgggatga

SEQ ID NO: 103238 - DNA, 189 bp, Enterobacter aerogenes
atgacagggctacagcttacaggcgttatttttgctttagtggtggcttggattttctttgcttgtaaagaatatgcagctaaagcaccacctaagaaaaccaaaaagcaaaaagacgatgaagcttggattgaagaaatcaatacaggctttgatgaatggtttaatgaattaaaggctagaaaataa

SEQ ID NO: 103239 - DNA, 252 bp, Enterobacter aerogenes
atggataacattacattggcacagtgtgcggtgaatggtagcgatgtaggacacttagacgatgtagatcatctttgcagaaaggagctactgaagcgtgaagcagagaagaagataagccctgtggacgttcagacgggtacacaggccgcttctcaggtcacacagcagaatgtagcagacactgaagggaataattcaattgcaggctctgcaattgttgcaggtgccattaacaaagggggcttctaa

SEQ ID NO: 103240 - DNA, 279 bp, Enterobacter aerogenes
atgagcggtaaacgttatcccgaagagtttaaaattgaagcagtcaaacaggttgttgatcgtggttattctgtttccagcgttgcaacacgtctcgatatcaccacccacagcctttacgcctggataaagaaatacggtccggattcttccactaataaagaacagtcagatgttcaggacgagatccgccgtctccagaaagaactgaagcgggttaccgacgaacgtgacatattaaaaaaagccgcggcgtacttcgcaatgctgtccgactga

SEQ ID NO: 103241 - DNA, 432 bp, Enterobacter aerogenes
atgctctgtcgggtgctggatgttcatcccagtggtttttatgcctggcttaagcagacgcattcacaacgccatcagacagacctgagactgacaggacagattaaacagttctggctggagtcgggatgcgtctatggttatagcaagatccatctggatctgcgggataccggacaacagtgcggggtcaacagagtctggcgactgatgaaacgtgccggaataaaggctcaggtcggataccggagcccgcgggcacgtaaaggcgaggctagtatcgtgtcacccaacaggctccagcgacagttcaatccggatgctccggatgagcgttgggtaacggatataacctacatcagaacccacgaaggctggctgtatcttgccgtagttgtcgatctgttctcacgcaaaattatcaggtggtaa

SEQ ID NO: 103242 - DNA, 393 bp, Enterobacter aerogenes
atgcaataccggatgacaaaagacattgtcctgaatgcattgctgatgtctgtatggcggcgtaatccccaaaaacaggtgctggttcactcggatcagggtagtcagtacacaagccatgagtggcagtcgttcctgaaatcacacggcctggatggcagcatgagccgtcgcggtaactgccatgataatgcggttgcagaaagctttttccagttgctgaagcgtgaacggataaagaaaaagatctacggaacgcgggaagaagcccgcagcgatatttttgattacatcgaaatgttttataacagtaagcgtcggcatggttttagcgatcagatgtcaccggcagaatatgaaaaccagtattatcaacggctaggaagtgtctag

SEQ ID NO: 103243 - DNA, 939 bp, Enterobacter aerogenes
atggccatcgttatgcaggctatgcagtggggcatgaatccctatacggtcgcgcaaaaaacgcatcaggtaaacggcgtactcggatatgaagcccagctcgtcaacgcggtaatcgccagttccagtgctatcaacggtcgatttcattaccgctacggcggagactgggaccgttgcacaaggactcaggaaattaccagggaaaaacacggtaaaaatgggaaatacaacgttaccgaacgggtgcgaggctggactgatgaagacgaaatcgggctgtttgttcaggtcggcgcgatccttcgcggtgagtcagaaatcacctggggtgagccgctttatctctcgggtgttgtaacttgtaattccccattgtgggtttctaacccgaagcagcagatcgcttatctgggcgtgaaatactgggctcgcctgtactgccctgaagtgattctgggtgtttatagcccggatgaagttgagcaacgaacagaacgagaaatcaatccggctgcggtgcaaagaatgtcagtagccgagattaccagcggctcaaacaccaccaccagcgaacagggcacaggtatcagcattgattcacttgctgatgatttccgtgatcgcatagaacgcgccgaatctgttgatgcggcaaaagccatcagagctgatctggataaagagaaagctgtgctgggtactgttctcttcaccgaattgaaaggtaaagcggtgcagcgctacttcatggttgatgcaagaaacaaagttgaggctgccataaattcacttcctaacccgggggatccggaagccaaagcattattcgcgaaggcagaaaataccctgacctcatcgcgccgacacctcggtgatgaactgtatgaccagttccgtatcacgctggacgacatgaaaccggaatacgttggctaa

SEQ ID NO: 103244 - DNA, 1032 bp, Enterobacter aerogenes
atggctggcgagaaaaagaagccgtattgcccgcgtattgtgtctgagaatgatgtaggagtgcataaatcactggggctggaggcgcagacctgcagagttggcattccccgaccgatgccggggatagtgattttggtccatggcgtgaacgacgtcggcgaggcgtaccagaatcaggagaaggggattattgccggactgaagaaacggcttaatcggccggatttttacgcccacgaatggaaagactacagaatcaccgttcccggccgttcccccatcatcccgttctattgggggtataagcctgtcactcatgcggattatgtggcagatcagaaacgctatcgtaatgaagtaggaaagctgagggaccaggcccatctgccgttcgacgcctatcaggaagataatgaggctaaaaaagccagcctggggaatgacggaaaaggtgcatttaagtaccagaacgacaactttggtaatgcgctggaagcgaactttgccaaagggggcgggacctttgcgaatgcgactaccacgatcccggatatgttagggccgggggcaggaggtttaggcgtggccgctgcaggctttgcctcattacacttaaatggtggcgatttcactcatcccatttatgaaaacccgcaccgtatctatcagttttttgcggctcagcggctggccgatttgattattcagataagggcagaggataaaaccaaagatgatgtgattaacgtggtcgctcatagccaggggacgatcatcaccatgctggcaaacgtgttggttaaacaggctggctacgatcccgttaactgcgtcattcttaatcattccccctattcacaggaatcccgcaacgctgaaaatattcagccaggatatcaacagaccgatgcggccaggcaaaagacattcaaaaatttctgcaacctgatgtatacgcaatggaaaggggggggggaaattaaccgagagcgaattactggccctggaggcctcctgtaccctgcgtaa

SEQ ID NO: 103245 - DNA, 567 bp, Enterobacter aerogenes
atgcatgacctcaacgatctggcctggtttgttcaggtggtagaccatggcggttttgccgctgccggtcgggcgctcgaccagcctaaatccaaactcagccgccgcattgcgcaactggaagaacgcctgggcgtgcgcctgattcaacgaaccacccgacagttcgccgtaacggaagtcggccaaactttctatcaacactgcaaggcgatgttgatagaagccgaagcggcgcatcaggcggtagaaacgctgcagtctgaaccgcgcggcagcgttaagctcacctgtccggtaaccctgttgcatgcccatgttggcccgatgctggcgcgctttatggtgcgatacccaggggtgacgctacatctggaagccactaaccggcgggtggacgtggtgggcgagggggttgatgtggccatccgcgtgcggccaaggccatttgaagatagcgaccttgtcatgcgggtgttggccgatcgcggccatcgcctggtggcgagtccggcgctgatcgctcgtcttgggcgcccacaggcgccggcggaattgagtacctag

SEQ ID NO: 103246 - DNA, 207 bp, Enterobacter aerogenes
atggcgggcgttggcgtggtacagcttcctttattaatggtgcgcgatcaattggcatcaggggagcttgaaatcgtgcttgatgagtggcaaccgcgacgggaagtcattcacgcggtgtttgcctcgcggcgcggtttattaccttctgtcagagcgctggtggattatctcagcgaggagtatcagcgcatggaagaggattag

SEQ ID NO: 103247 - DNA, 246 bp, Enterobacter aerogenes
gtggcggggccagtggttttcccggcggcgctgcgcctggacgggctactggtggtgcggcttgtggttttcccggcggcgctgcgcttggccgggctactggctggtggtgcggcctttgagatgggtagcccgggcgaggcatttatgccgaccccgggaaagtttacaggggccagatgcgaaaagagcccgtactttcgtacgagctcttatctcgaatatggcggtgaggggggggattga

SEQ ID NO: 103248 - DNA, 300 bp, Enterobacter aerogenes
atgaaaatgaaacttaccgcgctaatgagcggaatgattttggccagttctgcgctgtgcttcagcgcggcagcggctgataaaattgtcattgcccaccgcggcgccagcgggtatctgccggaacataccctgccggcgaaagcgatggcttacgctcagggggcggattaccttgagcaagatctggtcatgactaaagacgaccggctggtggtgttgcatgaccactatctcgatcgggtaactgacgtagcgcagcgtttcccgcagcgggcgcgtaacgcagcgggcgcgtaa

SEQ ID NO: 103249 - DNA, 1251 bp, Enterobacter aerogenes
gtgcttaccgataccaaattaaaaaacctcaagcctcaggccaaactctacaaagtttcagaccgagacgggctgtatgttgctgtgctcacgtccggcagtgtctcgttccggtatgactaccgaattaacggccgccgggaaacgctggttattggtcagtatggccgtgacggtatcacgctggctgaagccagggatgaactgatagccgctaaaaaactgctgaacgcaggccagtcgccagctgcgacgaaacgtgacggtatcaaacggatccgcggcgccgaaacattcgcggtacataccgacgcctacatgaaacatgtagtccttgctgaaagcaccagggcaatgaagcgggcggttattgacagggatatcctcccggcgctggggaataagttgatgtctgaaatcactacgcctatggtgcgcgacctctgcgatcggatagttgagcgcggcggacgtgctacggcggtgcaggcgcgcgaaataatcagcagcgtgtaccgctacgccaatgaccgcgggcatgggttattcaatcctgccgcagatatcaaaccttcggcgatcgccatgtttaaaccgcgcgaccgttgcctgcagccggaagaaataggcgttctgttcagggcgctggataccgtcagcacgttgccaactttaaaactggcggtaaagctcattctgatcactatggtgcgcaaaaccgagttcatcatggcgacgtggaaagaagtggatttcagcaaaggcacctggacgataccctctgacaggatgaaggggagccggtcgcacgtcatctacctgccaactcaggcacaggatctgatggtaggcctacagatgtgcgccggtggcagtgactatcttctgcccgggcgctacagcaccagtaagcccttatcgaatgcagctcttaactccgttatcgatcgcgcggtggctgttgccgcagatactggagagaacctgcaacctctcactgtgcacgacctgcgccgcacagcgagcacgcttttgcatgaagcgggtttcccgtcagactggatagagaaggcgctggcgcatgaacagaaaggcgtgcgggcggtctacaacaaggcggagtatttccgccagcgcgcctacatgctgcagcagtgggccaatatgattgatgcatggatagacggggagcattacgacctggtgccgttctccccttcagcgtttgaaaggtggatgaccgaacaataa

SEQ ID NO: 103250 - DNA, 294 bp, Enterobacter aerogenes
atgaatatttcggaagaggcgtcgcttatccgccagctcgaagaggcacgcgccgttatcaatcagcgcaatggggaaatattgcgtctgcagagagaggcggagcgctaccgagaacagcgtgattctgcaaatgcgatggttcagtttctgcgagagacctttgagaacagtaccgctacgcatctgcgaatttgtccttattgccagcagatccatgatgacagattagcgtgcccagcattcacgaaaacaggtggattattgttcggtcatccacctttcaaacgctga

SEQ ID NO: 103251 - DNA, 213 bp, Enterobacter aerogenes
atggattacgtcgtggcggctatgctgggaactgcgctactgccggggtggtttatgactaatccgcacgacaacattcgcgtaggtagtgtcaccctggtttattcatcattgcgtcgtgggtggctggcgccgggcggccaggtcatccagaacccattgaaggctcagcgcgtggctgaacaactgaatagcaagaaggtggtagcatga

SEQ ID NO: 103252 - DNA, 294 bp, Enterobacter aerogenes
atgaaccgtattgaaaaatatcacgctcagtacgctccgcagcgtagagcatcaaaggtcatcgccgttacacctgcagcccttgcgtttgaacagagagcgatagagcgcgaaaacaaaggtcagtatcgcctggccgcccgcctgtggcttgagtgtatggatgccgcgaccggagaggttgagcgcgcacgcattgcggtacgaagggatcagtgcatcggcaaaggtaatggattacgtcgtggcggctatgctgggaactgcgctactgccggggtggtttatgactaa

SEQ ID NO: 103253 - DNA, 249 bp, Enterobacter aerogenes
atgaaaggtgcattaggcaaaaaggaactgctggcggtggtgccgttatcaatgagcacaatcgatcgactggagaagaatggccagttccctaagcgctggtatatcacggataagcgctgcgcatggactcaggaagaagttgagaaatggcttgatgaacgaatggctgccagcccggtagagtttggcggaaaaaagcctccggttgaacagcgagtatttcgcccggtaggtaacgctgcgtga

SEQ ID NO: 103254 - DNA, 855 bp, Enterobacter aerogenes
atgagcaacgacatcacaatcacttctcaacctggcgctaccgtcggcaccgcggcggcaatattcagtccggaaggtatcaaccagttagtgcgctttgctgagctgatggcacagagcaaggccacagttccgcaacaccttgctggcaaacctgctgactgcctggcggtaaccatgcaggcagcgcagtggggaatgaacccgttcgctgtggcacaaaagacacacatcgttaacggaactcttggttatgaggctcaacttgttaatgccgtagttcaaagatctggagctatcaaaggtaggttccattacgaatacaaaggtgaaggagcttctcttgagtgtcgtgtaggggctgtaattcgtggagaacaggaaataacctggaacgaatggctgtgtatttccagtgttacaaccaaaaattcacctctgtggaaaacgaatccgaaacaacagttcggataccttcaggttaaaaactgggcaagggctcacactccaggggcgattttgggcgtctacacccctgatgaattgcaggatgccgcgccgcgcgtagagcgtgacatcacgccaccagtaagaagcgccgccgggatgaactcgctcatcaacgctaaacctgatcagcagccggaagaacggaccagaaaatctgatgcccgcgatccggatgaaatgctgacagccttcacagatgcagcaatgaactacaacaccattgccgatctggataaggcatacaaatacgtcgctaaaaatctggctaacgatgaagagcgtctgtcgaaagcaaccgacgtctacaccatccgccgcgatgaactgaacgaaatcccgatgtaa

SEQ ID NO: 103255 - DNA, 150 bp, Enterobacter aerogenes
atgcaatggcaaatcattaacggctggtactgcgtcacggcttgcggactgatgagctggaagtttcgcacgctgcaggaggctatcagctgggcattcgtcagcaaactggcggcaaaaacggaaatggatatgggggtgttcaagtga

SEQ ID NO: 103256 - DNA, 588 bp, Enterobacter aerogenes
atgaaaagcatctacgacatacgacgtgataacctcaacgaaataatccggcagaacttcgataacacgcagttgagattcgccgaaaggattaagaaatcgcagaacctggttaacaggtggtgtaagggtacgaaaaacatcggcggcaatgccgcacgcgagattgaggctttcgcaaggaaggaacgtttctggctggacatcgatcacatgtctgatgcacccgcgcagctagggctccttaacccggatgaatggagcgtggaaaagcaggcatctttcaccctcggcctctggatgggctcacacccgactctgaactctgagaaaaaagtctctgacgctgccggtattggccaggccaccgttaaccgcattctgaactgcgacggcagcaccagcatcggcgtactgcatgccatagcgcgtgcctttggaagagaagcttacgagctgattatgccgtctgacgcgcgcggcatgattgagtatgaccaccaggctttcgaaaaacttccgcaggaagagaagaacaagatcaccgcgttcattgacttcattttcagtcagaacagagaaagctga

SEQ ID NO: 103257 - DNA, 234 bp, Enterobacter aerogenes
atgagcgaagaaaataaatttaatttcaaaaagtgctggcttgatttgtcgcccgctgagcgcgaggcgtttgctgcggaagccggaacgaccagccattacatccagacccatctcaccgggcgccgcaagatgccacgcaagcgtttgatggatggactgtttaaagcgtgcaaggcccgagaatggacccggaataaaaacgacctcgtcctctacttctgcgacctctga

SEQ ID NO: 103258 - DNA, 204 bp, Enterobacter aerogenes
atgaagcgaattacacagcgcgaggcgctcgaactcggcctgacccggttctataccggcaaaaagtgcatccatggccacgatagccagcgctacacaatcagcggcgaatgtgtccagtgcaacaacgaccgtgcgcgtcgtcagcagcagttacgctctgagaaattaaaggcagccagaaaggcgcgggaggcagcatga

SEQ ID NO: 103259 - DNA, 771 bp, Enterobacter aerogenes
atggccagtagctggataaaagtcgaggtgatcacaccagacaagccggagattttccagatagcagaaatcctgaatatcgaccccgacgcggtactcggtaagctcgttcgcatatgggcatgggcagatcaacagaccgttgacggtaacgctggcagcgttacaaaaggagtgctcgaccgtatcgcttttattacaggattcgctgacgcactgatcgccgttggttggctcgcttacgacggcaataagcttgtattgccaaactttgagcgacataacggggaaagctctaaaaaacgggcacttacaaacagaagggtggcagctcaccgtaaaaatgaaacgcaaaaagtaacgcagtcagcgttacaaaaagcgttaccagaggaagaggaagaggaagaggaagaagtaaaagataaaaacccccctaaccccccaaggggaagggagcctaaaaaatcatatccgtatcctgaacagctcaatgccgaagcctgggaggagtggaaagcttaccggtcagaaatgcggtttaaatcctacgcgccaaccgaacggagcgagggggcggcgatcaccgagctgataaacttatctggtggtaaccacgcgcggcagatgcagatcgtgaagcagagcatggccaagggatggaaaggtctatttgagctgaaaggcggaacggaaaggcgcgatgtaaacgctatctctgagcctgatacgcagatcccgccgggattcagaggcgggccgacacactga

SEQ ID NO: 103260 - DNA, 393 bp, Enterobacter aerogenes
atgaagaaatcattgcaggcgctcgggagacttaaggccgggcagatgaataaaaccgagacggcttactgccagcacctcgaactgcgcaagcgctacggggaaatcgcctggtaccggtttgaaggaatcaaactgaggctggctgataactgtttcctgactgtcgattttgccgtgatgttggccgatgggcggctggtgatggtggatgttaagggaagcaaggcggtctttactgacgatgcgagagtcaagatgaaggttgcggcagacagctatccattcgtctttcaggttgctatccgaaacctaaaaagctcggcggaggatgggagattgaagagttatgagcacgaagaccaatgctgctggattgattgtatccggtga

SEQ ID NO: 103261 - DNA, 642 bp, Enterobacter aerogenes
atgagcacgaagaccaatgctgctggattgattgtatccggtgacaaaaatccgaactggaaaggcgggaaagtagaaaaggtttgcgccgtatgtggcaagcaataccaggttaagcgggtcaattcttcctcgcgtttttgctcgcttcagtgtgtaggcgtttcgcaaagaggaatcagtaggcctagtagaaagggaagcccgggtaagcgtgtggggagtgttgaaatcgaatgcgtagtttgccgggctgtttttacggtttacagggcgcacgccaagagaatcaggtgttgctcgaaatcgtgctccaacgcaatgaggtcatctctgatgaagggtgacggtaaccctaattggtctggtggcttatcacgcttgccatatccatgggatttcagagaaacgagcaagaaggtgatcgagcgtgatgggtttgtctgtcagaaccctgggtgtgatggaactgacgaaaggctaaccacacatcacatcaattacgacaaacaagactgccgacaggaaaacctaatttgcctttgttccagttgtaactcaaaggccaacttcgggcgcggtgaatggcaaaggttctatgagtcgctgatgtcgggaagagctctaaaacaacgatcctga

SEQ ID NO: 103262 - DNA, 213 bp, Enterobacter aerogenes
gtgagcgcagaattaacttctttctctggccttatgggtgacctgcgctggggtgttgataagcacattatcaactacgaaaacgaacatgtttggatgcggccgtgcaatggcggctttaccgactgctgtcattacgggtacgaatgcgaacgccacaaaccaatgcgtgaagcggaagacaagcagctgcgcgagggggccgacaaatga

SEQ ID NO: 103263 - DNA, 327 bp, Enterobacter aerogenes
atgagcgacttcgatgcttcatcaaaagttaaggctcgcaagttacatcgttgctgtgaatgttacggcgctatcaatccaggtgatacctacgagaaagtttttgtcatccaggatggcgatgccagaaacttcaagacatgccagaaatgcacagaagcacgtgaccacctccgtgagcaaggccgggaaggcgaccgcaattacgcatttcgcgcatatcggcttgtcgtcctgatggataagcgccgcatggcttatgccaacgcatacaacgcggagaccgtgaaaattcgcgattctcttgctcaaggagtctcagcatga

SEQ ID NO: 103264 - DNA, 690 bp, Enterobacter aerogenes
atgactgatatcaccgaactggcgcagcgtatgaaggctgcggctgagaaacttgacgcagaccaatggcagacgcgcaagggttttagcggtattgaggtaatcgtcaaaggtagccttgaaaagcgacatggttgtgtgtctttccaacctgttgctgctgacattgctgacactaaaacagcaagagcgattgcattattcagccctgccaacgttctcgcgctggtagaggcgctggagaaggcgcagcaggagagggaaaactggcgtaccagctttgataacgagcgatttcgtgcggataagctcaaagcgcatatcgacgatattgaacctatccgcgcagcagccgaaaaacttgttcgctgcaaaggtcgctatcacagcgagcagaactatcgcgcactggcggcgatgtttggcgtgacaactccagacctgccgcagcttgagcatgaaaacgttcattatgccgatgctgcagaaatggagattgcgactctccgccagcgcatcgccgagctggagtcccgcaccgtcaccgtgaagctgaccgatatcaacgagtacctggcagaggttcacgataaaacgctaaatcgggcctttcgcctactggctgaaggtgttcgcgcaggcgatgtcgctgctatgcgcgccgctggcatcaaggtggaggctgagtga

SEQ ID NO: 103265 - DNA, 612 bp, Enterobacter aerogenes
atgaccaataaccagttaaccaaagaatggctacagcagactatcgccgaactggagtctgtacgcgatgaaattccgttcgggattgacacaaatagcgaattagaactggctgctttcaagttggcgctggccgcaatggacagcgagccggtccgcaaccctgtgctgtcgtatgccgacagttatcgtgatatggcgaaacaaggcgttgagtcagtcccaatatggagcgtcattaccgacctggaacgaaacatagcgccgctctatcaccacgcgcagcagccggtggttgacgccgatgataatttctattcgtggtttggcagggagtggcaggagaattatcagcataaccaatacaccacagcagctaagcaaatgctcggcgtgatggctgaatctgcatggaaggctggacaccgcgccgccatgctccaggctggcaactctccggtaattccagatggtttaatcgccgcagttaatcgtcttctcgatagcgacggaagccgtggttgttatagcgcgatccgctgccacgacgcacgcgcggaagtagagcgcttgctcgcagccgccccgcaggaggtaccagatggaaaatga

SEQ ID NO: 103266 - DNA, 396 bp, Enterobacter aerogenes
atggaaaatgaaggcgacaacgtcatcactctggtgcagcccaagcgagacgaagagaagctactgaatatcaccgtaaccgacagaaaggactacaggaagcaacactgcaagcataaagccgttgaagtcgatgagaaaggacggatcattctgtgccttcaatgcggctgtgctgtagacccattccagtacgttcttcagtgcgcgactgatggcgaggctgtggtgagagaaattcagcaactttataaccgccgtgacgaactgcgcgaggctgtagccaacctggagcgcgaagaaaagaacgctaaggcccggctgcgcgccgccagaacgtcaatcctctttgctgagaatgacctgaaaaacactgagcaggggataaagcaatga

SEQ ID NO: 103267 - DNA, 330 bp, Enterobacter aerogenes
atgggttttccctctccagcaaccgactacatcgagcagcgtctcagcgtaaccattctctgccagtttgacgccaactgccgcgctatcgaaaccagtgcaggctatgcagttatcaacgtatccatcaggccaaagcagcgctctcacgtgctcatctcgttttgcggcagcgcgcagttcgccattgtgcgcgggcgggcgctgattaccagtgacggagaagcgatcgagggtgacgctctgaatgatgtcgaggttaaaggggtggtgacatacctgataaaccgggagggctggcacaacgaagatgatattccgatcatgtaa

SEQ ID NO: 103268 - DNA, 1479 bp, Enterobacter aerogenes
atgacggccgcagccatgtctccggaagagcagcttgtcgaggatatcgcctcgttcacctatgaccctctcggctatgcgctgtatgcgttcccgtggagcgaggagggtacagagctggcgcacgccaccggtccgcgtaaatggcaggctgacgcattccgcgagatacgcgatcacctccagaaccccgcgacgcgtcaccagccgctgatgctggcccgcgcatccggccacggtatcggcaagtccgcattcatctcgatgctcatcaactggggcatgtccacctgcgaggactgcaaggtggtggtgaccgccaacaccgacaatcagctgcgcaccaagacctggccggaaatcatcaaatggtcgaacctggccataacgaaagagtggttcacctgcaccgctacggcgatgtacagcaacgatccgggccacgataaacgctggcgcgctgacgcaatcccatggtctgagcacaacaccgaggcgttcgccggcctgcacaacgagcgcaagcgcatcatcgtcgtattcgatgaggcctccaatattgccgatctggtgtgggaggtagccgagggcgcgctgacggacgaagacacggaaattatctgggtggcattcggtaacccgacgcgtaacaccgggcgattccgcgagtgcttccgcaaatacaagcatcgctggaagtgcgcgcagatagattctcgtaccgtggaaggtaccaacaagcagcaactgcagaaatgggtggacgactacggcgaggacagcgactttgtgaaggtccgcgtgcgcgggatattccctgatgcatctgaaaaccagttcattccttccggactgacacaaccagctgtaggcagggtaataactcctgcgcaggttcagcatgccgcagtggttcttggtgttgacccgtcacaccagggtaaagacccggctgttatttacctcaggcagggtttgcattgtaagaagcttggagagtggcaacgaaccaccgatgacgtgtggtttgctaaggtgatcgcagactttgaagaccagtaccaggcggatgccgtatttattgactatggctatggtaccggccttaaatcagttggtgataactgggggcgttcctggacgctaattcagtttggtggtgggacatccgatccagaaatggggaataagcgcggtgagatgtacaaatctgcccgcgatgcgctgaaacttggtgcgcagttggatagccagaacctggccgatgaactgagtgcgccagaatacaaagtcaggttgaaagacagccggaagattctgcaggaaaaggatgaggtaaaagagctacttggacgctctccaaacgatgccgatgcctatgtgctaacctacgctttccctgtggtgaagaagcaattcaactatggacagcaaagccagcagggcaaggccatcactgaatacgatccctatgcatga

SEQ ID NO: 103269 - DNA, 420 bp, Enterobacter aerogenes
atgagtgacaaagatatcgagcagcaaattcaggccaaaggcttaacagcaccacgagttacgccagatcttattgagagtcttatccgttcagaagtttatttctctggcaccgatggtgctaattctcctggtgcgcgcgttaaatctgaatatgttgaaggtgagcgcatccttgcaccactcgacttgctaaccttctgcgttctggtgctgcgcaacggcttcaccgtcaccggcgaaagcgcttgcgccagcccggagaacttcgacccggagatcggacgcaagattgcccgtgaaaacgcggttaataagatctggatgctggaaggttacctgctgaagcagcgccttcatgatgaccgctctgatgtctgggaaaacgaagacgactgtcgacgcgcattagaagattaa

SEQ ID NO: 103270 - DNA, 300 bp, Enterobacter aerogenes
atgacagattttgatgatgaccagttagctgctgaatcagcacgcaagaaggaaatccttctacagcgcgacatcgacgacatccgtttcgtgatggatagcgcgcagggccgccgggttatctgggctgttctggagcaggggaaagtgttctcagcctgctttgccggcgacccacaggttacagctttcaacgaagggcagcgcaacctggcgctggcattgtttcagcgcgtgatggcgcactgcccggatcagtatctgaagatggccgcagaggctaatgaggaaaccaaatga

SEQ ID NO: 103271 - DNA, 324 bp, Enterobacter aerogenes
atgagccagttacaaacccagcgtgtagttcgtctgaatggcgcaaggcaggttgtcgaggttcccgatccggcggcggcggtaattggcgcgccgacaacgactgattacggcggcgtaaagcttggcgcctctattgcggcggcagcggctgccactgcaacggcagatacagcttctgctgcaaccgatgttgccggacttcttgttgaccataacgacctggtgacgaagtacaacgcgcttcttgcggatgctgcggcgcttcgtacaacgctgaacgctgttcttgcgcagctgaaagccaaaacgatcccggtttaa

SEQ ID NO: 103272 - DNA, 690 bp, Enterobacter aerogenes
atgaatctatttgagcgcctgctgtatcgccgcctttgcaatgagcaaccagctgatggtggcacggcgccggcggcatctgaacctgcagcacctgctggcgacccctctactccggcatcagagcctgcgcaacaggaaggcgaaaagcctgccgatgaaggcgcagagcagaacgataaggccgataaacaagacggcgaaaaaccggaagagaaggacgaacagaaaccggaaggcgcgccggagaaatacgaatttcaggcaggcgaaggtgtcgagctggacgccgaagcgctgaaggacttcgaaccggttgcccgtgatctgaacctgaccaatgagcaggcgcagaagctggttgatgcatacccgaaaattcttgccggtgtgcagcagcgtcagacagaagcctggcaggcgcaaaccgagcagtgggccgctgacgttaaggccgataaggaagtaggcggagacaagctgacggcaaacctcagcgcagcgcagcgcgcacttgatcagttcggtactcccgagcttcgcgaatatctggacggcactggactgggtaaccatccggagctggtgaaggcattcattaaggtcggtaaagcgatgtcggaagatggcgtgattactggcaaagaaagcggccagcgtagtgctgccgaagtgctctatggcaaataa

SEQ ID NO: 103273 - DNA, 345 bp, Enterobacter aerogenes
atgtctggtgaaaaagcaaaataccgcgttcttcgcttgtcacatatcaacagaaatctgtggccggaaggctcagaggttgaatatgacggcgagcctggtagcgctcttgagccgctgaacgatgcggcaaaggaagccaaggcaaaggccaaatctaaaggcaaggcatcagcaacggttaaggcggtttctgagccgctgaacgatgcggatcctgatgatgatctggataagctccgcgaagagtatgaactgctctttaacgagaaacctcatcacaacaccaaagcagaaacgctccgcgagaaaatcgcagagaagcgaaaagatttaggcgtctga

SEQ ID NO: 103274 - DNA, 465 bp, Enterobacter aerogenes
atgattaacgctcagatagtcccggccaccgcagcgcacatcgctgaaattatcccccgcgttcgccaggccgacatcgaggagtttgccgccactaatggctggagtgctgcccgcgtcctggagtgcgggttacgtacatcaacattctgttgcgcaggcctgatcaatggtcgggtggtaactgtcttcggcgttgcgcctaaatctatgattggcggcgccggcctcccatggcttgttggtacggatgatctggaaaaataccagcgtacttttctgcgtcgctgcggaaaggtggtcagtgcaatgctgatcgcttatccgcaccttgaaaactatgttgatgcacgcaaccacgtcgccaaagcgtggctccactggcttggctttaccctggaagacccggcgccgtatggcgtgcaggggataccgtttcaccgcttctatatggagagaaaataa

SEQ ID NO: 103275 - DNA, 540 bp, Enterobacter aerogenes
atgtgcggaccagttgccgtaggtgtcgccatggttgcgatgtcagcaatgcaggcatacaaccagcaccagcaaggtaaatatgctcagtcggttgcgaaccagaatgctgatatcgccgaaactcaggcgcaggatgctgttaaccgaggcaatattcaggccgaagaggtgcgccgccgcaaccggcaggcagccgggacgcaggcagctaccatgggagcgaccggcgcggatctttcctctggcaacgctctggacattttcggagatacagcccagttcggcacgctggatgctctgacgacggttaataacgctcagcgtgaggcttacggttatcaggtacagggaatgaatgcgatcgcagaagggaatgcagcaaaaagtcagtccaacgcagcagttacacaaactttgctcacggccccactgaaagcttatggcgcataccaggcattcggcggcacctggagcccgttcacgcagagtaatgcagcccctatctctgccgcagttggcacaataaccggtcgataa

SEQ ID NO: 103276 - DNA, 2535 bp, Enterobacter aerogenes
atgccagttgtaccaaccgtcaccggtcgccaggttgagagccgcggcgtgcagaccggaggatttcaggccgtagctcagccaaacatcagcgatgcgctggtgaatgtgggtagtcaggcgcttgacgtattcggccaggctaaacagcgcgccgatgtggcaatgtcgcaggatgcatcactgcaactgacgcagacagccagcgacctgatgaccaacccgcagaatggcctgctcaacctgcagggtaaaaatgccctcggtaaggggcaggagtacacgcagctgtttgacgcaaaagcgcaggagctggcgatgcagttgccggagtcttcccgccagggtttcctgcagcaggtgcagcagcagcgcattcagtttacatcgcaggccggtcggcatgagatcggccagcttaatgcatacgaagaagggcagttccaggcaacgctgaccaccggcgccaaaacagcggcgtcgatgtacggcgataatggcagctatgtgctggctaaccagcaggcgtttcagcaaatagaaagcttcggtgcagcgcatggctggagtgacgagcagatacaagccaaaaaggtagaatttaaagagaaggtcgcagatggcgcgctttctcagtggtcagcaaataacgcgatcggcttcattcagagcaacggtgagctgagcgacacggtagccggttcacgccgggctgttgctggcggcggtgagtcagctgctgatggtcctcgcggggtacgaaacaacaacccgggaaacctcgaagccagctcatcaaacccatgggtagggcagaccggcagtgatggacgttttgcaaaattcgaaaccccggaacacgggatccgcgcgctggggcgcaacctgatttcataccagcggcaggggattgataccgttggcgagatcatcaaccgctgggcgccgccgtctgacaacaatgatacggcagcatacatcaaagcggtttgcgcgcagctcggcgtcactgctaaccagccgctcgacgcatcaaaccctgatacgctgcaggcgctctgtgccgccatcattaaacatgaaaatggcacgcaaccatacagccctgaccagctatcaaccggcgtcagcgcggcgctgggcctctctcagttgccaagcagcaataaacgttacacgggaaatgcggcattcgacgctgcgtcgcctgaagcacaggcgactttcctgcgccaggctgaccagatccgccgtcagcagcaggcggagtacagaaccgcgatcgatggacaagtacgcgacgcgactgcggcttacatgcgcggcgttgagtttccaaacccgcctggcgaagctgattttatggctgcctacggcgtacgggagggaaaccagcgatacactgagttcaaaaatacgcagatcgccggtcaatatattggctcattccgcaacatgccgaccagcagcatcaccgcctacgtcaaacaatttgagccgacgccggaacagaccggggaagggtatgcgtcgcgggcggaattattcgaccaggtgtcggctgctgctacgaaggtgatcagccaacgccagaataatccgttcaatgctgcggtggagatcggggcatataaaccgatagccagcaacaacccgaacaacataacggcagaggtcgccaaccggtattcttctcaggagaacctgcgcgcgcttgggattaatgcgccgatactgtccagcgaagaggcggccgcgctgtctgagcaggtgcgcggaaccaaagacgtaaaccagactattagcctgttgcagagtatgggggaaaccttaccggccccggcaatgcgccaggttgcatctgccattgcgccgaataatccagctacagcctattctgcactactgctaggcacgccggataaccagtatgacaataaaaaaccatccatcgcctacagccagttcattggttacaagccgaccatgaacaagtacgacgtttcgaaggtgatcctggcaggtgatcagttgcttaatccaaccaaagcgatgaaagatgctggcataactccggtccagttgccgagcgaagataagttgaaacgcgcattcgacgatcaggtaggtaacgcattcgccaataacccgcaggcgcgccaactcagttataacctgttcaaagcagcttacgccgggatcgcttatcagtctggtgacgcttccatgactcgcacggatgcagccaactctgacgtcgttgataaagcagcacagtacgccactggaggcgtatacaagggctttaatggcggtgatgtggtaatgccattcggcatggacaaatccactttcaaggaccgatacactgcatctgcgcagcaggcgctgaaagatgccgggttgaacgtcaacgcagcgtcaaacttcacaccggtcaatatcggaaataaccagtatcggctggtaagcggcagcgggcgctgggcgacggatccgaaaaccaatgaagctatcgtcgtgagggtagaataa

SEQ ID NO: 103277 - DNA, 690 bp, Enterobacter aerogenes
atgaataccaaaccttccattttcaatttcgaatccgactcacctattcgcaccattatgatcgatggcaatccttggttttttgcatccgatgtatgccgcgctattggcatcgcaaaccatcgtgatgcggttcgtaaacttgatgatgacgagaagggcgtcggctcaaccgacaccctaggcggtgagcaggaatcagttatcatctccgaatccggcctatacaccctaatcctccgctgccgcgatgcggtgacgcctggcactatcccataccgttttcgaaaatgggtaaccagcgaagttctgccgcagatccgcaagaccggacgctacgttcgggaacagctatcgccggcggataaagcgcgtatgctggcgcaggagatgaccagtagcatgatgccggccatcatggatgcactgcagattgagcagaagcattataactacccgctgaagtccacctatcgcgatcatatccattcaccagaaggcgtgatgggactgacgcagaactcaatgctaatgaagctactgcgacagctggacgctgacgggcatgacgtatcaggcgcggcggcagaggtgaccaccatgtttagctatatcgtcggtgttggtacttgcctgcgagatattgagacacatgcgcagtatgtgataacgagagcgaagggattctga

SEQ ID NO: 103278 - DNA, 513 bp, Enterobacter aerogenes
atgtatttgagtgagtattgcggaagaattctacccacaggcgaattcaaaagtgatgattttttaatttcacttaaagaagcctttaaatgtcattggcgtaatggtcatcaccccagcttaggaaaagacactctttttgaaaggcctgatgaagttcttaattaccaccttagaaaagttcatgtaaatattaaccaatacgcaaattacaattactcatgcacaaaaaagtgctgggatgaatggtcatatggtttaatagatgaacatgggcgcttcagacctacaccagtaagtaactcttacttgatttatgcagtgaatgaacatcgagatgctgccttattagcttactgggatccaccagctcatactaaggctaatcagcctgtatggatggattcagtaataaacttcactaaagttttccatgataaaactaatacatcgcccttccctagagagagtgacccatggagctactcatttaaaattaagaagcccgcatag

SEQ ID NO: 103279 - DNA, 363 bp, Enterobacter aerogenes
atgacaaagcttggattcgttgcaaaaggtatggttgaaaaccgtactaaagcaaagcgtcgcaaagcacctgtatctttagggactgtagtactgcgcggctcggttagcggctcggttgtagtacgcggaacagccaccctctttgttggtgaagatggtaacgtcatgcgcgttacagctgtccatgggcatagcaaaaaaatccatggccgtcataggacggcaaagtttgcgcagcaaaaggttaatgctccgaaaatcaatatgatttctgcagaggcatcttctgagctatccttccgcatgctgagcactttagatgatcggatgaaggaagaacagttcgatgtatttgagtga

SEQ ID NO: 103280 - DNA, 261 bp, Enterobacter aerogenes
atgccagagcggtaccgttatcctattgaagaaggttttgcagagcgcatccataccccggcaggtgtcagatctctggttgagcagtcgcagttaatggaacttttacgtgagatgcaaatggacgggcacgacgtcagcggagcggctgcggaactggtggcgctggtcaactacgtgacaagttcgcaggtctctatgcgtgacctgcaaacgcacctggattactgcgcgatgcagttgcggcagcaactcagatag

SEQ ID NO: 103281 - DNA, 348 bp, Enterobacter aerogenes
atgtgttttgagcgaaaaaaggaacgtgcacttgccattatggaaagcaaaaagatgtggcgcagcaactacgcccctcctctgttacgtgggttatggaagttaggactaagaataccgcctttacctttcgcttcattttggcaaataacatttattatgggatttggatttggtctcgtatgggggctcgttatgtggttattcacatggaaagatatgggcgttcaaccttcttgggcgatattaaggagtctctacggtgggattctatttggcgtaatgatggcagcgtttcatagttggcgcaaaaaggccaataatctgcctgactggaaaaacctgtga

SEQ ID NO: 103282 - DNA, 174 bp, Enterobacter aerogenes
atgctgaagctaatggatgtggaaagcctccagcccatccgggtggtccgtaacctgcgcggcagccgtttctcgcagggtcgggctctgccgccgaaagagaaccgcgcgctgttcggtgcctgcgaggtcgatgactccagtgtcggcctccgcgatgctgtgatgctgtga

SEQ ID NO: 103283 - DNA, 2493 bp, Enterobacter aerogenes
atgaataatcatatccgaacagccattttgaatggacgatttgtgttactgcttggcgctggcgcctcttttggctgttcaaatcgactcaaatcaaatcctccaatcggtaatgcgttatcaaaaataattgcggaagatgcagggtttgaattggaagagggcgacgacttagctgatgtatatgcttccggcttaaatcatttaggcgaaataggaatgcaaaagttacttgaaaaatactataagcattgtcagccctctcaagaatatctggatatgatgaaatacccattcccaagagtttatacattcaatattgatgatgccatcgaaaaagcagctggtgtaactacaaacaaagtgttcaatgtaagaagaagaaatagtaggattgaggatttcgatcctttttttagtcaaatggatcttgttaaactaaatggcgatattaattaccctgaggaaggttttattttttctccagcacaatatggggaaggctctgctgaagaacccgtatggtatatggagttagctagagattatcatcgatttacatttgtatttattggtacaaaaatcaaagagcctttttttagacatcaaattgaaaagtacaaaaaaagaacaggagatcaaagtcttaaaagctatcttatagtaccagagctaagctccgtacagcagaatagtttatctgggagcaatattgaatatataaatggaactttatcagatttcatgaattggatgaaagatacatttccttctggattaactcccaaagatatattaatgaatactcggcctgagatggcttatttaagcaacggagaagaaccaactttttcaaaatcaatagcaaaagcgttagataaggtggtgcaagttaacagatctgagttattgaagcatactgaaagtatgcaacccacagtaaaggagttctacaaaggatttaaacctacctggtcagatataattaataatatccccgcacttcttgataatactaaaaaaatcattgaagcttgcgtcggaaacaaattaaacaaaaaattgttcttaatactagggcctgcaggttcaggtaagacaacggctttgaagcagttagctttagaaatagcagacagaacggcgaaaaattgttactatgtcgaagggatacccgaagatttaactaatcttctaaaggtattaaataaaagaaatacgtcctctttttacgtcttcttcgagaaacttgctgacattgcatccgatttatcacaattgatcgcaaatggttttgatgaacacgccatatttgttggttcagagaatgtcagaatatgggagtatcgggttagagaacatcttgagcagttctctccatatatccaaagttatgaatctataagtgaaaaagatgttgatccaatattaaacaagatagagctatatggtaattgggccagattgaaaaaaatgtcttatagaaatagacgccttgaaattttgaaaaaatctaaacgtcagttgttaattgggcttattgaggctacttctggagagggttttgatcaaataattaagcgtgagttcgctgacattaatgataagagtgagcgagctcttttattactttcagggttggcgacactgcacagaagtgaggcatctgagtccaccttaactcgcgctttatcttacttgggagtgacttcaaatgtaagtgaactttgttcaagattatctggattagtgaattataataacgggtatgtaagtactcgacatagaatatatgttgagcggttaacatctctttttgttgatgaggctgaaatgagtgaacttattacggcttacatatattcattttccgtatatcaatttcctatagttgttaatatttctaagaaagatgctgcagtttataaagggctcgttaattataagtttttaaagaaagtacttcgagattcaaaagaatccatacttaatatttattctttttttgaaaagcaactagaactagaaggcttgtttttattgcaatatggtttggctctccgtgcatatggagataatgaactagcgcttcaaaaattgattaatgcccgagaggcttttcctgaatcacctcatatcgagcatgcgtatgcccaacaattacttatcattgctgaaaatactagcgatacaaatttatcgttagaatatttaggtaaggcaaaagacattctaaataggcttgataaaactaacaaacacgaaagtgatcgctatccgattattaccctctcgattagccatgtccgtattttagataagctaggtagggagagtgaggcgaaaataattgccaagcaatattttgatgaactcacatataaatttggaaaaaatgattccaagttgaatgagatggttattgctaccaaaaaattccttactgtatatttcactaaaggaattattgttgacatacatagctatgattaa

SEQ ID NO: 103284 - DNA, 2130 bp, Enterobacter aerogenes
atgataactaacatttcctctcttgaattaggccagtatctaacactagtacgtgaacgtgccggaattaagcaagctgaactagcccgtagggtaacctggagcgcagcagtactatctcgtattgagagtggagaccgttcggtagagtcgggggagctgtcaatgctgttggaagcgattgatactccagaggctctgcgtcttcgtacaattcttgaacgtaactggcagataattgagcgtccaagccttgaccaccccgatcaggatcttttgtggtctgcagaagaagttgccaagcagcttatggagttagctcaaaaacccgacaccaaaaatgccttcgaacgccgtctatctacttacgtaggtgaattgaaggcttcggcaaacttattactcaaacgtgagcatcaagtagcatttattggcagtattggtataggtaaatccactgcaatctgcagacttactggtcttgaggtctccaacacggatgctcacccttcggctcctgtacttgaggctggtgctgggggtattacagtttgtgaagtacaccttcgtcaggggcctagttatggacttattattgaaccatgtctggatgacgttattcgtgctcatgtaaccgattttgcagaatatattcgaggtataggcatccaaggggggagcggagatgaatcacagggaatttcaaaagaaattgagagagcgattcgcaatcttgccagattgcgaatcagcaaaagcaaaggagtggacggaaaaacagtccgtcatgatgaagctaaagagcttgctagcaaattcagcagtacccgcgaagttgttgtcgagattctgtctagaatggagcttcctcgacgtgaccgccgtgatgtttggtatgatgccagcacgggaaaacagcctcttaattggctaaaagacacgtttgaggaagtcaacaatggtcgtcatcctgaatttacacttcctgcacgcattgaagtaatagtaccagatcacctgcttccgatagataatctgtcagtacgttttatagataccaaagggattgatcgtacatcagctcgagcagacctcgaatgccttcttgatgatcctcatacgctagctatcctttgttctggttttaacaatgctccagctgcggaagctagactacttctcgagcgagctaaagatgcaggtgtccgcggtcttatccaaaaggcagcattactagtactccctcgcgcaggcgaagctcttgaagtaaaagatgagatgggaatgagagttgagaatgcggaagaaggttatgaactgaagcatgaacaaatatccatgagtctagcacctcttggattatctgaattagccgtcggcttttttgactctcgccaggatgaccctaaattgttccaggcgtttctatcagaacggctgaataatgtacgtcagtctttcgcccatcagttgagtgaaatcatcactaatgccaacgctcttctgcaaaactatgaactggctcaaactcaagaagtcattcgtcaagcggcacaacaactgcgaacttggatcaaccgacatcgttcgcttgaacatttaaatatgcatgttcaggacagccttattgagcagttgggctacgcctacgcagcaactgttagagcctctgtaaatcgggaaggggactggtacaactttaattttggtcatcaccttggttatggtgcaagaaaaatagcggttcaatcactcagttctgcagtcttggggtttgctgagatttgccagaacatggcagaaacacctgaacttgaagaagcaaacgaattacttggacaatcccagcgtttacttcagacagcttatgacgagctactgtctaaaattcaacttatgggtcaaacatctttccgcgatgaattaaaacaagatagaaatttctggaatagttgccagagagaatgggggcaaggtagtggctacaaaggcaggattgctgcccatagtcgagactggtttaacaacccggagaaaaaacggcttgaagatgaactgtggtcaatgattcaacgtgaatgggatttggcgctaacccgggttgaatcgttactgattaccgacgaataa

SEQ ID NO: 103285 - DNA, 693 bp, Enterobacter aerogenes
atgaaaaaattgctgaatgtatctctttttgtagctgttgtgattctaggtgtcgctctgctggtttccggattactcgatggaactgcttttgtagcatttatcgtttctggttgtctgggagcttctgtttacgcgttgttaccatcgataactgagttttctataggaggtaactcagttaaatttcaggaaaagctccatgaagccgaaatgatcactgatgagctcaaaaagctgaaatcgatagccgtcaaaacaacgctgaaatcgctgaagatacagcaaaaagcaaatatcctcgtttaccaaaatcttttagagtttagggatatttatcaactactctcggatacaaaagaatttgagactgattaccaagtactggtaatggaaaccgcactttcactcagggaaaatgtctttgattttgtggatcttgagatcgagagctataagtctcagtggtctaattggcgcgataaatatgtcagagaatacattagagcaaacatcaatcaggactcactatcttcacgagtgagaatgagtattcgctttgcaaatcagtatctttacttgtctcattttattgatggattgtctgcgggtggcacgccgatgttaaagattataagcgtagaggatggttggcatatgattatgaaaggtactacgtggaagggtcgttga

SEQ ID NO: 103286 - DNA, 225 bp, Enterobacter aerogenes
atgaaacaaaagccggtaaaaaatgcgctgatgatgtttggatcagcgtatctcgttaacgcagaggagatatcaccgatattgggaaagttttactgtttccactgcacgagtccgatgatttacgtctgtgacgatgaatcgcagaaagaacatttcttacatgatttgacggcattaacttatcaggctgctgatatctgcccttatctgatctctgactag

SEQ ID NO: 103287 - DNA, 3234 bp, Enterobacter aerogenes
atgaagttaatccataactccggtaaagatcgtgttattgacttgattcgacctcatttcaaatctggtaaccaactggggtgtgtgaccccatctttctctttatatgcttttgctgaaatgcgtgaagagttgtctgttattgatcaggttcaattgatcttaccctcagcagaaaacctactcgactacctaggagatgaaggtgaccgtagtgcgcgaaattgcctacagacacgatggttagctaaccaatgtgctaaatggataagtgaaaaagtggatcttcgtcgggcgcttgggccggtgccacaaggtactgttgttatacgcaaacctgatgctacacccgagcaagtcgttttggggtcgttcgcatttagcacctctggtcttggattaacgcctggtaacccgctgagcttaattcaggcttcagaatcacccagtgaagccgccatattatcccaatggttcgatatgcaatggctgagtttaaatagagatggaaatagtatttcagcatctgatgataatgatcgcgatgcaatgattgcagctttgaagtccataggtgaacaccgtgatccatctactgtttactcgctcatattgcacaacctatttcgtgatagtgagggggaaatggatgaggagcggatcgttaaatccgcaactggtatccgaaacacagtggtatggaaaaaacttttcaaattccagcgtgatggagtagtcggggcgattgataaacttaatcgttttggtgggtgtatcatcgcggatagtgttggtttgggtaaaacgtttgaagcgctggcaattatcaaatatcacgaattacgtaatgatcgtgttttagtgttagcgccaaagcggctacgtgacaactggactttataccaaactaacgacaagcgtaacattcttgcagctgatcgctttaattatgatgttctgaatcatactgatttgtcacgcgacagagggagttctggtgatatcgacttgtctcacatcaactggggtaactacgatttagtggtgattgatgagtctcacaatttccgcaataaaattacccataaaggtagggagtctcgatataaccgcttgatgcgcagaatcattaaggaaggagtcaagactcgagttctcatgttgtcagctacgccggtcaataatcgtctttcagacttgcgcaatcagattgcctttgtcaccgaaggagatgataccgctttgctggagcatggcataaccagtattgagacaactactcgcaaagctcaagctcaattcaaccgttggttgacaatggatgaacttgaaaaaacaccgtccagattgattgaaatgttaggctttgattatttcacattgctagatcatttaactatcgcgcgatctcgacgacatgtggagaaatactacggcattagtgagactggccgttttcctgagcgcttacccccaataaatattaaggcggacgttgatcttgcaggtgagttccgtgctattcgtgacattaatctggaaatccgccggcttacgttggctagttatgcaccgcttcgttatgttttgccacacaagcaagcagcatatgatgcaaagtacagcacccagattcgcggcggagaaagtttttttcgccaggtagaccgtgaagaaagtttaatcaacttactgcgtgtgaatgtactaaagcgtatggaaagttctgtgaagtcattcgccctgacagtgcagaggcaacttagggatgtggaatcaaccttggctcgcattgaattgcataccggagagcttgaagaaatagacatcacagatgttgatattgatgatcctgcttttgaagctcttctggtaggtcggaaagtcaaagtactacttggtgatgtagacctgattcgctggagacaagatctgatcgaggatcgtaatcgtttagctacattgttgtcagctgctaaacaagttgatgttgatcgtgatgctaaactggcatctcttcgcaagatgattgaagacaaatgtcaacatcccatcaatagcggtaatcgaaaaatcattgtatttacagcgttctctgataccgcaaactatctttatgagcagcttgcccaatgggcgaaagggcagttgggaattgatgctgcactggtaactggtagctcaggtatacagaccaccttgcctggtttgcgtaagagcatgaatgatgtgttgtccgcgtttgctccaagagctaaagagcgtccggaggagcttactgctgaaggtgaagttgatctacttatagcaacagactgtatttctgagggacaaaaccttcaggactgtgattggctgatcaactatgacatccactggaatccggtccgcataattcagcgttttggccgtattgatcgtattggctcaccaaatcaatgcattcagcttgtaaacttctggcctaacatggaattagaggaatacataaatctggagcagcgggttagtggtcgtatggtactacttgatatttctgcgacaggtgaagagaatttgatcgagcagcaatccggtaactctatgaatgatcttgagtatcgtcgtaaacaactgctcaaattgcaggataccgtgatcgatttggaggacctttctactggggtatcgatcactgatcttacactcaacgacttccgtattgatctggcaaagtatttaaagacttatcctgacaagcttgatgctcaaccactcggtgtatacgcagttaccactagcctggatccggaaataccaccaggtatgattttttgtctgcaggcttttgagaagaaagggcataaagtacttgttgaacaagcatcttcagattatccacttgcaccacactacttggttcacatcggagatgatggtgcggtgttattgccttactcacaggctaaacgcatcctcgatagcctgaaacgtctggcgcttgggcgtgaagttcccgacgatacagcgtgtgctagttttgataaaaaaaccagatatggtcaagacatgagtcacgcacaaaaacttcttaccgcagcggttgcatcaatagcgggtaaaaatgaagaacgtgctgttgccagtcttttcactccaggtggaacccacgccatcaagggggagtttgctgggagtaatgattttgaagtgatagcatttatggtcatcttgccagagagtgagtcaatatga

SEQ ID NO: 103288 - DNA, 807 bp, Enterobacter aerogenes
atgacatgtcttgacgcgcaaaccgttatccaggcattggagcttcctgacagctgtcaggtgggtcaacgcgtccccaagaaaatattgttggaaaatattgcggctacggcagctgataagcgtttgatcactgataacatttctgaaatcaagtggttggcggcacttaagcccaatacaataggggtgccagactatcgggatacgaagcgtgagtatcttgagattacgattttatctgtgactttacgaggtgtcgtgaaaccagcaaaccgtgtccgtttggctgagctgctacatcgtgctgttccctatcctgttttattacaactggttgaaggtcaaattcagactctatttttggcccacaaacgatgggctcagaacgagtttggtaaagtagtacttgatggtagcttggtatatgcctcattttttcataccatggttgaagctcctgagactgcctgtctgacatctccggaagtagggcatgcttttttgcaatctttgtcaatctcgcgccaacctcaggccacactctatagtctttaccaagggtggatcgattgcgtacaaacactgttggctgcgcgtttgacagggatctatcgtattgtacccacccaagagcaggctgaggcgcgccggcaggcattgaacgattacgaaaggcttgaaatcgagattaaccgtttgcgtggattggcgctaaaagaaaaacaaatggcgcgccaggttgagctgaatctccaattgcaagcactgctggcagagcgtcaacggatcgtgcttaatctctaa

SEQ ID NO: 103289 - DNA, 2124 bp, Enterobacter aerogenes
gtgaaagcctcagaaactaatttgcttaaatttttacgcaagtctccacagttcgtcattcctatctaccagcgtaattattcatggacggaggcccagtgccaacagctctgggcggatttaatgcgctctgggcgtgataatgggataaatggtcattttattggctctattgtttatgtggagcgcggcctgtccaccgtgactactcaagaggctctacttgttatcgatgggcagcaacggcttacaacctgtaccttgctaatcgcagccttagctaagcattttgaaactaatcaactccctgagttactcgacagtttttctgcgcgcaagctacgcaactactatctgcttaatccggatgaagaaggcgagcgtcactataaactcatattgtcagagaccgacaaagataccctgctggccattctcaaatctaccccgatgccattggagataagttcacgtattgagcagaattacatgctttttcaagagttgatagagaagcatcaggatgagttggaagaaatatgtcaaggacttgctaagcttctgatcgttgaagtctcactggatcgtacacaagacaacccccagttaatcttcgaaagtatgaattctaccggacttgagctaagccaggcagacctgattcgtaactatattttgatgagtttggaaccgaagcttcaagctgagctctatcagagttactggcggccaatggaaaaggcgttcggccaagcggcctacgtgacgcattttgatcccttcatgcgtcattatctcaccgcgaaaacaggtgatatcccgaatgtgcgagatgtttacaccgctttcaaatcttttgctcgttccagccaggttgatattacagtactggttgccgatattcatgcctttgcaaattactactgtgctatggcgcttggtgcagaaaaaaatccactgataaaacaagcttttcatgatcttcgtgagcttaaggtcgatgtagcctatccatttttactggatgtttaccacgattataaaatggaaaggctggggactgatgaattagtaagcattgtccgtctggtcgaaagctatgtgttccgccgagcgatctgtgctatccccactaactcgctcaacaaaacctttgctggactgagccgtacattgaagaaggaccgctatcttgagagtgtccaggccgctttcttactgttgccatcgtatcgtcgtttcccagtgaatgaagagttcgaacgtgagattaaacaacgagacttgtataattttcgtagccgaacttactggttgcgccgcttggaaaaccacggacgaaaagagcggattgtattagaggattacacgattgagcacatcttaccccaaaatgtagagctgtcagctgaatggcgaacagaacttggtcctaactggcaagagatccagcagacttggttacacaccttgggcaacctcactttgactggttataacagtgaatatagtgatgcttcattcgcttacaaacgtgatcaagttattaatagcgaaggcaaaaaaattggtttcaaatacagtgcgctaaatatcaatgaaggactcggtgacattgataaatgggacgaaaatgccattaaaacccgagctgagcagctggccaaaatagcaacaaaagtatggggatcgccagacctgaagagtagtgtacttgatgcttatcgcccaacaataaccgatgcaggcgtacagtacagtatagacgatcacccatatcttaacagtggggcactgagaacgctgtttgatgccctacgcaaggcggttctggagttggatccatgcattcacgaagaatatctcaaactctatattgcctacaaagcagagaccaactttgtcgatgttgttcctcaggctaaacgcttgcgcttgtcgctaaatatgccattcagcgagattgatgatcctaaagggctctgtaccgatgttacgaaccttggtcggtgggggaatggcgatgtggaaattggattatccagtttagagcagcttccctatgtcatgggattgattcgtcaatcctttgatcgtcagatgggaaggccagaggatgcttga

SEQ ID NO: 103290 - DNA, 2028 bp, Enterobacter aerogenes
atgactatgaaaaaaatcgatattaatgatccagaggctcagtctactgatttggtggctggcaatattgaacaactgaagaatttgttccctgagctgattaccgagggggttaacggtgtatcagtaaatgtggatgtgcttagagcattagtgggcgacaaaagtgttacagaggcagatgagaaatacggcctcaattggcatggtaaacgccgcgcccggcaattggcgctgacaccaagtacaggcactttgctaccatgccctgaagagagtgtggattgggatactactcagaacctgatgatcgaaggtgataacctcgaggttctgaaactgatgcaaaaaagctattccggtaagatcaagttaatttatatcgacccgccttataacacaggtaaggactttgtgtaccctgataactttcaggataatattaataattatctagaactaactgggcaggtagaaggtggtcagaagattagtagtaatactgaatcaggtgggaggtttcatactgattggttgaatatgatatatccgagattgaagttggcgagaaaccttttacgcaatgatgggattatcatcgtaagtatcgatgatgtagagtttcctaatttgcgtcggatacttgatgaagtttttggtgaggaaaactttattgcttcacttgtgtgggatcgtaatagaaagaatgatgctaaatatttttcagtgggtcatgaatatatggcagtatatgctaaaaatgaatcattcctttctgctaaccaagtgatcttccgtggtgaaaaagagggagtagatgaggttaaagcagaatttgagcggttaaagaatttacacaattctgattgggtcaatgtccgtgaagggttacttgaatactatcgaactatacctgatgatgatcccaaagcaccacttaagcgattcacaaaagtagatgtcaaagggccataccgtgatgatggaaacattaactggccgggtggtgatgggcctaggtacgaagttctccatccgaatacgaaacttccgtgtaaattgccagtgagcgggtggcgatatccttcagaggagcgtttttgggaagaagtggataaaggacgaattgtctttggagcggacgaatcgacagttccacgtgttcgcactaatctattcgaaaatactgatcaggtaatggttagtgtacattatagttacgcgcaaaaatctgcgaatgagtttaattctcttttcgatgggaggcgtgtttttgataatccaaaaccaattggtgatttaagaagattatttggttatctgactgggccggacgacttaatttgtgatttttttgcaggttctggtactacaggtcacgcagtgatggcacaaaatgctgtggatggcggaaaccgtcgttacatccttgtccaactacctgaaccgatagatatcggaaataaggaacaaaagaatgcagcagaattttgtcaccatcttgacaaacctcttatattagccgagataacgaaagaacgtctacgtcgtgctgcgagcaagattaaagccgataatcagagttggcaaggagataaaggttttcgcgtattcaaactagctcaatcaaatattcgcacctggaatcccataccggaaaatcttgaagctacattacttgatttcgaaaaccatctactcgaaggacgtagtgaagctgatatcctttatgagttattgctcaaactaggtctcgatctttgtgtgccgattgaaaagcgtattatcgctgaacgtgaagtgttctctgttggaggtggtgttctggtgacatgcctggctgagcaaatcaatagcgatcttatagaacctcttgctctagggattgttgattggcgtaaggaattaacaaccgctggtgatactacctgtgtattccgcgatagtgcttttaccgacgatgtggcgaaaactaacctcgcagctatcctggaacagcatggcatccagaatgtgcgtagtttgtga

SEQ ID NO: 103291 - DNA, 3051 bp, Enterobacter aerogenes
atgaaacttcattttgaacctaatcttgactatcagatgcaggcaatcgagtctgtatgtgatctatttcgtggtcaagaaatttgccgcacagagtttactgtgacgatgaaagctccgtcgcagagttcagaccagttcagcgtgacacagcctgagcagttaactttaggaatggccgaatccgatcttggtgttggtaatcgtctgactctacttgatgatgaactacgccagaatttggttgatgtccaattccgtgaaggattgccgccatcagaaacattaacctccggcgattttacggttgagatggagacggggacgggtaagacttacgtttacctgcgtacaatattcgagctaaacaagcgatacggttttagtaagttcgtaatagtagtcccttcggtggcgattaaggaaggagtctataagactctgcaaatgacagaagaacatataaaaggactctacgcaggtgttccttttgattactttctgtatgactctagtaaacctggtccggtacgtaattttgccaccagttcaaatgttcagatcatggtggtcactgtaggggctattaacaaaaaagatgttaataatctctacaaagagaacgaaaaaacaggtggcgaaaagccaattgatctgattaaggcgactcggcctattgtcattgttgacgagccccaaagtgtagatggtggtcttgaaggacgtggtaaagaagcgctggatgccatgaatccactgtgtacgctgcgttactctgccacccatgtgaataaacaccatatggtatttcgccttgatgcggtggatgcctatgaacgcaaattggtcaaacagattgaggtggcctcagcaactgtggaggatgcgcataataaagcatttgtacgcctagtctcagttgccaataaacgaggaactattagtgccagaattgaactggacatcaataccgccagtggtgtgaggaggcaagaacataccgtatctgatggtgacgatcttgaacagctcaccaagcgcccaatttatgcggattttcgtgtcggcgaaatcaatactgcaaagggtgaagaatttatggagctgcgctatcccagcggtgagatatttttgaagccagggcaagcatatggtgatgtagatgcgttagctgtgcagcgcgagatgatacgacgcacaattcgcgaacatttagataaggaaaaacggttacgtccgttaggcattaaagtattgagtctgttctttgtcgatgctgtagaaaagtaccgccagtatgatgcggacggcaatccagtaaaaggcgattatgcgcgaattttcgaagaagaatatcgccgtgctgccaaattgcctgcttatcagagtttgttctccgaaattgatttgaattctaccgcagaagaagttcataacggctatttttcacgagataagaaaggccgctggaccgatacggcagagaacaatgcaggcaatagagagaatgctgagcgagcatataatctgatcatgaaggaaaaggaaaagctactttcctttgatacaccgcttaaatttatcttttcccactcagctcttaaagagggctgggataatccaaacgtttttcagatttgcacgttgcgtgacatccaaagtgagcgcgaacgtcgtcaaactattggtcgtggactacgtttatgcgttaatcagaacggggagcgtgtacgtggttttgaggttaatactctaactgttatagctaccgaaaactatgaacagtttgctgaaaatcttcagaaagaaattgaggcggaaacaggcatacgtttcggtattgtcgagaaacaccaatttgctcttatagctgttgttacgcctaatggacaaacatcccctatggggctcgaacaatccaaagtgttatgggaatacctgaaagcagcgggacatattgatgcaaaaggaaaagttcaggactccttgaaacaagctctaaaggaaggttctttagccttacctgccgagtttgaagtgcaaaggggacaaattgcagaagtattgcgcaaagtgtcaggccgtcttgagattaaaaatgccgatgaccgtcaaccagtatccctacgtaaaggatcggatggtaaagctatatatcttagcgatgagtttaaagcgctatgggatcgcatcaagtataaaaccacctatcgtgtgcaatttgataacgctaagctgataactgactgcattaatttcttgcaaaaagcacctgccattgccaaagcgcgtttgcaatggcgaaaggctgatattgctattggtaaggctggagttcaagctacggagaaagcaggagcctcgacggttgtattagatgaaacagaccttgaactgccagatattttaacggagttacaggatcgtactcaactgacccgtcgtacaatcatcagcatcttgactggaagtgggcgtctggatgattttaagcgtaatccacagcaatttatcgaattagcagctgaaataatcaatcgttgtaaacggctagccttagtggacggcattaaatatcggatgttaggtgaacagcatgtttacgcacaggaactattcgaaaaagaggaacttaccggttatctccagaatatgttaatggacacccacaagtcgatttatgaacatgtagtctacgactcaactacagaacgggactttgctgatgcgctggagaagaatgatgcaattaaactttatgccaaattacctggctggtttaaagttcctactccactaggtagttataacccagactgggctgtacttgtcgaggaagataatgagcagcgcctttattttgtggtagaaaccaaaagcagcctctttgcggacgacttgcgtgataaggaaagtgctaagatcctatgtggcaaggctcatttccaggcccttgctatggaaagtgcaggacttaatgggaatctggctcgttatatagtggcaagttccgttggtgacctcatggttgaagcctctaaggatagctag

SEQ ID NO: 103292 - DNA, 1245 bp, Enterobacter aerogenes
atggataaatttcataaagtagatctggcatttgattttttggttagtaaagaaaataaccaagagttatttacaattcaagaattagcaggtgctacaggatggacaataccaacttgtaaaacttaccctgtgaaaaaatggaatagatacgtctcccgagatggagaacattacacttcatcaggtatcaaatatttaagtaaagaggactttagaaatattcatagccaaaaaaatgttgaaacagtgaaaagtgaacgcagtcttaatctaaaaaaggctagagaatttgcgctacttgctgttgcaacctataataatccattcactgagtttaaaacacatgggtttattgttaatattactattgcttttactgctctatttcacgctatttatgcaaagaaaggtgtaaaatatttctatttaaatgaagatggcacaccaaaaattattgatggtgaagaaaaagcttgggaattaaaaacatgttgtgagaattattggccgggagaatctaagccggaaaagataaacattcagtttttgattgggttaagaaatataattgaacatagaggattacccgaaattgatactttaacatttggagagtgtcaggcggccattaacaacttcgaggatattcttgaaaaggagtttggtgatgatcatgcactgatggttaatttatctcttgccatacaacttacaagaatgtcacagcaagcccaagttgatgctttaaaaagattacaatcaaaaaattttgtagttgtgaaaaaattcattgatgactttaaaaaagatctttcggatgagatcattgaaagccaacaattcaggctcagagcactattggttcctcttgtcggaaaaaaagcatcaaattcagatatagccatagaatttatcaatgtcagtaacctttctgaagaggagttagagaaattagattcaggtatagctttcataaaaggtgtagagaatcaattcaaacttaaacctagtaaagtagtcgaaatggttcatagaaaacataaagacttcaatctgagtactcatgctaaattctggaaattttatgacgtgagaccaatcggtatagataagagctttaaaggtcaatattgtgggtatgtggagggattcgatgggtatttatacaatcaggagtgggttaaaaaaatactatcaacctatgctgataatgaagaattccaacgtgttaagagaagctag

SEQ ID NO: 103293 - DNA, 198 bp, Enterobacter aerogenes
atggattgttactgcgacagcaggcaaaacctgatattgccccaggcggcgatgtcaggtttttttgttttagacgctgaatggtttggttataagggttgttaccgcaatgagcgggcaaaacctgaagaggattatctgttaatgcagatggtctccttcaggtttttttttgccacttattcggcaggaaaataa

SEQ ID NO: 103294 - DNA, 1635 bp, Enterobacter aerogenes
atgattagaagaaatatgatcgcttcggcgatggttttgctggcgccgctttcttattcaacaaatcttattgccgggcaacttacggttgaacaacggctggagcttctggaaaaagcgcttcaggacacgcaaaaagaactcaagaaatatcaggatcaggagaaaaaaaggaaccaggtctgggccgcctggtcgcaaccggtaaatagccagaagagccagagtgcgaaagcgcccacggcgacccaagcggccgctaagccggatgcggtactggtcaaaaatgaacagccggcgcagggcggtgagccaacctatagcgccatgacgctgaaagattttagcaagtttgtaaaagatgaaatcggctttagctataacggctattaccgttctggctgggggaccgcctcgcacggttcgccaaaatcgtgggccatcggctcgcttggccgtttgggtaacgagtattccggctggtttgatttacagcttaaacagcgcgtttttcaggaggacgacaaacgtgtggatgccatcgtgatgctcgatggcaatgtgggtcagcagtattctaccggctggtttggcgacaatgccggcggcgaaaactaccttcagttctcggatatgtacgtcaacaccaaaggctttttgccgtttgccccggaagcggatttttgggtcggtaagcacggtgcgccgaaaatcgagatccagatgctggactggaaaacacaaagaaccgatgcggcagctggcgtagggcttgaaaactggaaagtgggcgccggtaaatttgatatcgcgctggtgcgcgaagatattgatgattacgaccgctctttgactaataagcagcaaattaataccaataccctggatgtgcgttacaaagatattccgctgtgggacaaagcctcgctgatggtcagcgggcgctatgtcgccgccaatcaaagctcatcagagaaatataaagaggggaatgaaggttactaccaatggaaagatacctggatggtgggaacttcgttaacgcagaaatttgataacggcggctttaacgagttctcattattactggcgaataactccatcgccagcagcttctcgcgctatgccggttcgagcccgtataccaccaataatgggcgctattatggcgatcataccaacggcaccgccgtgcgcttaacctcgcagggggaaacctatttgcgtgatgatgtcattatggcgaatgcgatcgtctactcatttggtaatgacgtctatagctatgaaaccggcgcccattcagattttgaatctattcgcgccgtggttcgcccggcatatatctggaataaatataatcagaccggcgttgagttgggctacttcaaacagcagaacaaagatgtgacgggaaagaaatataacgaatccggttataagaccaccttattccataccttcaaagttaataccagtatgctgacctcgcgcccggaaatccgtttttatgcgacttatattaaagccgaagatatcgacctggataaggccgctaacaataccaccgcggtttttgaagatggcaagaacgaccagttcgcactcggcgcgcaggccgaaatttggtggtaa

SEQ ID NO: 103295 - DNA, 666 bp, Enterobacter aerogenes
atgacccaaccacaagcagtatttttcgattgtgacggcacgctggtcgatagcgaggtgatttgctcacgcgcctatgttcacatgtttcaggaattcggtattacgctggatttagccgaaatttttaagcgcttcaagggcgttaagctgtacgagattatcgacaccatcaacgctgaatatggcgttaacctgcagaaagagactctggagccggtgtatcgcgccgaagtcgcccgtctgttcgatagcgagctggagatcatccccggcgccgctgcgctgctggacgcggtgaaaatccccatgtgcgtggtgtcgaatggcccggtcagtaaaatgcagcattcgctcggtagaacgcagatgctgcaccacttcccagaccggctgtacagcggttacgacattcagcgctggaaacccgacccggcgctgatgttccatgcggcagaggccatgcaggtacaagtcgaaaactgtgttctggtcgatgattccagcgcgggagcccaatcaggaattgccgcgggtatggaagtcttttacttctgcgccgacccgcacaaccaaccgatcgatcatccgaaagtaacgacctttaccgatttagctgagctgccggcattgtggagagcgcgtggctgggatattactcgttaa

SEQ ID NO: 103296 - DNA, 858 bp, Enterobacter aerogenes; identical to SEQ ID NO: 74968

SEQ ID NO: 103297 - DNA, 261 bp, Enterobacter aerogenes
atgacgctgatccgctggctgactgccggcgttggcgtggcctacgttccgctgatgtgggcgatcgacgagatcaatcgcggtgaactggagatcctgctgccgagctatcaatcggatccgcggccggtctatgcgctgtataccgaaaaagacaaactgccgctgaaggtgcaggtatgtattaactatctgacggattattttgtcgaggtggcgaagatctatcagggaatgcacgggcgcgggatgacccgttaa

SEQ ID NO: 103298 - DNA, 2880 bp, Enterobacter aerogenes
atgcctatctatccgcaatctgatgttccgccgagcgtaatggataatgctcttcaggcaccaactggttttgatgtatctctgcctgaaggaactaacccggagccacagcagcaacaaccgtctgtatgggatgccgcttttcgtcagaataacctgctcgccgggatgttccgcccggctaaacaattcgagccggcggacggttataacccttattctgataaaaacgaactaaaggggtacgaacaatggggatccgcctttgcggattcaaaatccccggaggaaaccgcctggattaaaaaccagatagacgatgaaaacgaagaccgccgggtgctgtctgaaaccggcgctgaaggaactttggctagtatcgccgctggaattatcgaccctgtcacggtcgcatcgatgtttattcctggcgcacagggtactttggccgcgcgtatcggttcgcaggtagcgatcggtgccgccggtaccacacttagcgaagttgcacttaataaccagcagttcacaaggacactgggtgaaagtgcagcgcatatcaccgccggagctatgttcagcggtattttcgcaagtgctggtgcaatgctatcccccggagtcagagccgcagccacacgtgaaatggccgatgcacttgaaaatgtaggtacggctaacgctattaatcgtggcatagacagcctacctgatggtggaagcgtgggcgctatgcggataagacaggcaactcttgacgacctcactcttgacggaggaaaggctgcagatattgcgttaaaagctggcgggtacatgacgcctatatcacgtgttatatcgtcgccgtcacgcaacgcgcggatcactgcactggaactagcggaaaataactttgcgctgcgcggtaatcaacgcgggttcgagactcccgtagccgctgaaacccgtgtacgcggctggcgaagggaggaagccgctgtagtggttacaaataagcaggcatacgctaaatataaggctgacggcggagatttaaactatacccgattccgtgaagaagttggcgacgccatgagaaatggtgatatccacggtaacgctgctgttcaggatgccgcgcgtgcattgcgtcaggtagtcgatagggtaaaagttgctcagcaggatcttggcttactaccacctgacgctgagttaaaagcattgggccaaaccagttacttccctcgaatctacagagttgggaaaattgtggaggaacgagataaattccgtgagcttttagttaactggtggtcgcgtggcgcttcggctatgtcacgggaagatgcggaaatcgccgcagatgcaacgatcaataaaattgttggcgcaaaaatacctcaagacttcgtgaatgtgttcaccgttaaagttcctggcagttcgcggcagcgtactttaaacctcccggacaatatgatgcgtgattatctggagagtgacgctaattatgtattgcaacgacatattcgtgaggcttctcctgatattgagttaactcgtgtgttcggaaaccgtaaccttgagtcccaacttaaggcgatacaggatgaatatgatgaactgatgcgggcgcgcccccaggatcaggctaaattagctaaagcccgtgagaatgatattcgggatattacggccatgcgtgatcggctggtcggtacgtatggcatgcctgacgacccatcatctttctttgtccgcgctggcagggcaatgcgacaagttaacttttttacaaaactaggtggtatgactgtctccgccattcccgatgttgccaggggagtaatggtgaatggttatcaaagaaccatgaaggcttatggtgcactgatatccaaatcgccggcattcgcggcaaacagaagcgaaatggaaaagatgggggttatggttgaaacggtgcttaactctcgctcgcgcttgatggccgatctggttgatagctcaacgcgtacgaacgctgctgaagcgggactagagcgcgttacggacgtgttcggaaagcttacgctcatggggcagtataacgacattaacaaagcagtaaatggaatggtgactgctgacctgattctttctggctcggctccggcttccagaattgccaagctggggataagcccggctactgcggcgcgtataaacgaacagttccgtaaacatggcgaggtgcttgatgggtggcatatcggtaactttgaaaaatgggacgatgactacgctgcaggtgtattccagtcggcagttttgaaggataccaacaacatcatcatcactccgggggtaggagacacgccgttatgggccagttctcctatcgggcgcacggtattccagttccgatcattcacaacggcatcatataaccgagccacaatcggcggcttatcagaaggcaccgcgcagttttactacggcacagcatttcagattgccctcggtgcgctcacgtatgccttaaaacagtctgcgaatggtaaggaagtggattggtcgcctcagaaactggcgattgaaggaatcgaccgttccggtatccttggtccactgatggaatacaacaacatggcggagaaggccaccggcgggatgtttggcttagggccgctgctcggtaccggtacgcaatcccgatatgccagtcgcggctttattggttctgcgttgggaccaacctttggcctgctggatactgtaaccgatgtgaccgccggcgtgctgaatggtgacgctggcgaccgtgtgctgcatagcgtgcgtactctgttaccaggtaataatctgttctggattgcgccgctgattaaccaggcagaccccggcatgcgttaa

SEQ ID NO: 103299 - DNA, 1623 bp, Enterobacter aerogenes
atggatgaactcgccgtaaagctggtcaagcgtgccgatacgctgaaagccaaccgacaggtgcacgaaagcgtctggcgggaatgctacgactacacctatccgctgcgcggcgcggggctatccgatgaggtgctggacgcacagagcgcgaaatcgaaggtggcacggctgcttgacggcacggccaccgacagcgcccgcatgctggcgtctgctctcatgtccggcatgaccccggcaaacgcgcagtggctgaacctcgatagcgaatctctgccggatgatgccgccgcgtggctgtccacctgcgcaacgctggtatgggaaaacatccacgctgccaacttcgacgccgaaggctacgaggcgaatctcgatgtggtatgcgctggctggttcgcgctgtacatcgacgaagaccgcgaagagggaggattctcattccagcagtggccgctggcgcagtgctatgtcacatccacccgccgcgatggcatcgtggacacgatttatcgccgctaccagctcaccgcggagcaggcgattaaagaatttggcgcggataaggtcagtaagaagattcgcgatgcggccgccaaaaagccggatgacaaattcgacttcctgcactgcattttcccgcgtgaaaactacgtggtgaatgcgcgcctggctaaaaacctgcgctttgcatcgtataacgtggaagtgagcggcaagctcattgtgcgcgaatcgggctatcacgaattcccctgctgcgtaccgcgctggatgaaaattcccggcacgccgtacggtatcggcccggtatatgacgcgctgccggactgcaaagagctgaacgaaacgaagcgcatggagaaggccgcgcaggatctggcgattgccggtatgtggattgctgaagacgacggcgtgcttaacccgcgtacggtcaaagtaggcccgcgccgcatcatcgtggcaaacagcgtagacagcatgaaaccgttgctcaccggcgccgatttcaatgtggcctttaccgcagaagaacgcctgcaggcgtctatccgcaaaatcatgatggccgatcagctgcaaccgcaggacggcccggcaatgaccgccaccgaagtacatgtgcgtgtggcgctgatccgccaattgcttggcccggtctatggccgattccaggctgaatacctgcaaccgctggtagaacgctgtttcggtctggcattccgtgccggtgtattcccgccagcgccggatagcctacaaaacgccaatttcaacgtgcgctatatctcgccgcttgcccgcgcgcagcagctggagaacgtcaccgccattgaacgtttcagcgcgaatattgcgaacctcaccaacatcgaccaggaggttatcgatcttctcgatgccgatgaagccggtcgggtggtggctgatgcgctcggcgtgccggctaaggttgttcgtacttccgatgcggtcgcggaaattcgcgagaagcgccagaaggaacgacagcagcaggcaggacaggcgctgatgatgcaggcaggtagcgaagcagcaaccgccgcagggcagcaggcaggcgcagcactgggccaacgagtagcggggggctaa

SEQ ID NO: 103300 - DNA, 399 bp, Enterobacter aerogenes
atggcacgacagaagaaaaccatcgagacaccggggcaggagacaacacagccgcaggacgccacaggcgcagcgctgaacgctgaaactaccgaaccgacggtgcagcagaacgttgcgacgctgctgggcgctacggcgctggctgagcgcaacgccattcttgccacgctcaatgcgcagggcaccaccatcgttgcgcgcttcgaagagctgggctttaccgatctgaccgaccagaaccttaccgacaacctcgaatttctcaccctcgtacgtaaagccactgaggtcaccatcggcggtgcgggcgcaatggtgacaaacgaagagggcaagccgcagccagtacgcggcgcacctgtattaaccgaacacggctggcatgtgtcgggctaa

SEQ ID NO: 103301 - DNA, 237 bp, Enterobacter aerogenes
atggaatttaaactggttggtgggtcttatgatggcgagtcaattgagctgcacgtagaccgctacggtaacacagactcgcagttaaacctgccgagaaagaaaaccctgtcgcaggggtgtgaagaacttctggcaaacaggccgcaaacgcctgaacgcttcgaggtgtatgtaaaaacaccccacggcgtcaacccggacggtagcactaaatttgtatactggaagcgataa

SEQ ID NO: 103302 - DNA, 270 bp, Enterobacter aerogenes
atgccagtcgtcgccacgtttaaaacagactggttccgcgttatcagcgacataaccagaacggggatcccgctgcaggagatagcccgcgagctggatgtgtcgaagtctgctatcatcggctggaagcagggcgccgcaccgaaccaccacacaggcgaagcgctaatagacttctggtgttacgtcactcagcgcccgcgctccgagctgccggcgcaggtcacatcacggcgattcgtttacgcctggcgcacaaagcgcatttga

SEQ ID NO: 103303 - DNA, 171 bp, Enterobacter aerogenes
atgaacaatttcccacaagtccgttactacgcctctcgcaaaaccaaatttatagagataacccatgcgcctgtaaacggcgtgagcacaaaggtaacgaagccggtaaacggaaaagcagaggcacgccagatcaccaaagagattaatggtactgcctggaacttctaa

SEQ ID NO: 103304 - DNA, 897 bp, Enterobacter aerogenes
atgagccttgaacaaaatctcgaactgaacaaccagctgctgaccaagcaaaactcgctgtatgaacgcaatatcgcgctgctcgaacgtctggtgcagtcccttgcatctggcgttgcacttaaacctgacaccgtggcgcaggtgcaggagtaccgcgaaacagctaccgaaacgaaaaccgcgctgacactcgacgatctgcagttcggcgacgttattgcgctggcggcgttctacccggtaccgcagcaaatcaccgaagacatgctgcagcgcgccattgattaccgcgacgccgaagccgacgccagagtagtgcagattgatgcactggacagcgccctgcagggtgtgaagcgcgctaaagcgctcctgaaacctgccctgctcgacctgtcccgcaacgttcttaagtactgggacgacctgccgaccatcggcgagcgccgcagctttgcagagcgccttctcgacgccgcaccgaccgagcgtgacgcagtgaagccgaagaaaaccagcggcaaaggcaatcaggaacgtaaaggcccgttttactggcatcacccggaaagcggcgcaattggtagcgtggaagacctcggcgccctgaatgagttactggaagacggtctgacagtggagatcaacaaagttgaattccttcagttgcaggaagccgccgcgaaaaacaaagctcagacggaagacagcacaccagatttcgacatgctgcgtaaacaggccgaagagtgcattaaaacgctgtgcaaaggcggttatcgcgctgaggccgtcggcatcctggacagcttcggcgcgaaaaagctgggcgaagtggaagacaaagacctcgctgatctgatcgccaaagccgaaaaagctctggagggctga

SEQ ID NO: 103305 - DNA, 204 bp, Enterobacter aerogenes
atggcacaaggtaacgtcgaaaacttcgcaattattgtgttaatcaacggccgcacatcgcaggtcgagctgaccacatcgcaaaaacgtctgtttgccaaagtcacattgggtgcactacaggactccgaccaaatccggctgatgcctatcgacgatatggtaaagctggaaccagaccacgaagctttttccactgattga

SEQ ID NO: 103306 - DNA, 864 bp, Enterobacter aerogenes
atgattaacgttgtcagcttctcaggtggcaggacttctgcacaccttgcacatctgatgcgccaacgggatcctgatacgcgattcgtattcatggacactggcgcagaacatcccgctacttatcagtttattcgtgatgcagttacacattggggtctggacctaatatgtctgagagttgttgtgaaccccgagctggggaaagcaaacggataccagattgtccatcttgatgatatcggaccggatctgacaccgtgggttgccatgctcaagaagtacggaacgccctatgtcggcggcgaattctgcaccgaccgcatgaagttggggccatttaagaaatactgcgacgagcatatcggcaaaaaggcataccaaacatggataggtattcgggccgacgaaccaaagcggttaactcctaaacccaggacaaattatctggcggacatatccgatattggtaaacaaggggtgatcgattggtgggccaaacaaacttttgaccttcaaattcctgaacatctgggtaactgcgtcttctgcatcaaaaagtccatccaaaaaatcgcgttggctgctaaggacgaaccggagcttgccaggcaattcaatggcattttgactgcggataccgtacgaaaaatgccaaacaggtgcggtactgatttagttatgtaccgtgggaagaatacttttgagggggtaatagctatgttcgccgaggatacgcgggaatctttagctgcaaggatgccgtcccagaacttaaaaaaggtcgctcagaaagcggccctttctttatctgagtctatgaaacccgcatggtggtacgaggaaggatatgaccttatctaa

SEQ ID NO: 103307 - DNA, 195 bp, Enterobacter aerogenes
atgagcctgtcggtcacggtttgcgttttgttgttggtgattaaccgtcttacccaaccggatatctactggtcagtgtgggtggcgattgtctggggcgcgttattgctgctgcggggattacgtctgtttgtctttgccgggtggatccgccagtggcgacaggcgcgactacagcgcctgctgcgcaaatag

SEQ ID NO: 103308 - DNA, 1785 bp, Enterobacter aerogenes
atggcagtgaacagtcaggatcgttcccggtggtacttggggaatgttctctggttcggaggctataacagcaaaactgatcgggagaataactttgggtttctctcgtcagaaagcggaactgagttgttttttcataaaaatgagataagccggaaccatacacctgctgacaatacaccggtgctgttcagggaaggtatcggtaaaaatggcaagcctacggcttttaacgttcacttgctggataaaacagatgaggagacggtagagctcctgattgaatatctccggagtgatattgaggagggccttgatttctctcgttggcgttatcgtgacagcgttattaattgcctgactcagtcctttggcgaaggttccataagacggttagttaccagtgatattactgccacaaaaatattaccgctattttttgaatcacgtaactacgataaccaatttgcatctttcgccgctgataaaaattttgatgatttaatcgcacagcaaatatctcctgcggtcatgccttcgtcatttatcgatgataatatcggtcagttcgctgtttgggtaaaaaattgttctgaggctactggttgccagagggcttcaccatcgaacatcatcaatgtattactcagtcatatatctataagtgctattctctacttggcattttacgattgtataagcagtgagcggattcttgagcatcggcgtgatgatatagagagttttgttcgacgtagtttcacgaaaaataaaatggatatacagccatttgtccgtgatgtctatcagcagaaattttcatcgagagagcaatttcacaaacactccgtaattagtccttttatcacaacgtatttgattaaacagaagatattcagaaaagatttcagtttcgttaatgatattgaatcaaattctgagctttcttctgaccctgaatactttatcctgagtaaattattaccgttaattgggcgcaacgataggcagtctgttctgagtattattctacatgagatatggcagggagtgttgtcaggtaaaattccggtaaatcatccttctattttcaaattgttcccacagtgtagctcattgcaaactcgttccccgaatttagaattatcctgtgaggcgtttcactggaatgcaaaacagcctgatggagcgatagagaaaaaattcctttgtcgttcgaaagtctgtcatgatccgcaggtactaccggacctcagtcgggattacatcgatttcactatttatgactggcttgcccactatggcatgacctatctggttgctggcgaaccttctaagcgagatttcccaattaaactggccggatatttcaaccgtatcagagaattacattctcgcttgcattgtcgcagctgtggggtgctgatggttccagatatgaaatatgctcgcgttgaggccagcgtctgggatgcgaagtctaaagggtttgtgaaaaaacctttccatgccgcgtatcggctaaccgtctttaaatgtgccagtcattcctgcgaacagtttggtattgggcattacattaatcactgcattggttataaatgcagcgaaataattgacgccagagacttgcatgaaaaatgtgcagaagggcgatttatttgtgcatcatgtggttcctgctgtacgacgcatcaggagaaatttggtaatataaataaaggagaaaccgagcaggtcaagtacgatcgcctttatcaggactcgccgttcttttcatcataa

SEQ ID NO: 103309 - DNA, 681 bp, Enterobacter aerogenes
atgaaactgacaaaaagtggtccactgactgaccaagaaaccgactggctggaagagatgctgatggaatatggcacggatgattccgtgctgtgcttttccgaacttgatgggctgctgaccgcaattttgtcaggacctaatatgatttcaccgggtatctggctggatgctatctggggcaagggtgattaccatccggaatggtcatctgagaaagagatggaacgctttatcagactgtgttttcagcacatgaatgatatcgccagttgcctttatgatgcccccgagcagtttgagccgattttcaatgaacgtgaagtgaagggtaaaaagcacaccattgttgaagagtggtgttttggttacatgaaaggcatctctctcgatgactggtctgcactaccagctgatcttcgcccctcactggaagccatcgccctgcacggcattgaaaagaatttttcggtgctggaaaaaatgacccgggcggggtttgaaaaaagtatcacccaaattcaacctgcagcactagatctatatcagcattggctttcactgcgggccacacaacaaactatgcccgcgataccccatgaggcggaaaagctgcccggtcgtaatgacccgtgtccgtgtggcagcggtaaaaaatttaaaaagtgctgcctgcactga

SEQ ID NO: 103310 - DNA, 1272 bp, Enterobacter aerogenes
atgaaattacctgaaggttggcacaataaactcttaggtgacttattcacaaaaatcgtagtggggtacgttggcaacgtaaatgaccactattgcgacgcagccataggagttcctttttacagaacgttaaatataagagatggatattttcgccacgatgatattcgttatgtaacgccagaatttaatgataaaaacaagaaatctcaaattgaaaatgacgacatattgattgctagagttggtgccaatctcggaatggtctgcaaggtaacaggactcaatagaacatcaaatatggcaaatgcgattatcataaaaagtaaatcagccaaaaatgccgatcctgatttctatacttactttttactgtctacctatgggaaatcgcagatttacgctggtgcagccggtggggcgcaaggtgttttcaatactaagctaacacaagaaattgcagttcctgtcccccctcttgctgaacaaaagaaaatcgcccaaattctgtccgcctgggataaggcgatttcggtgacggaaaagcttctcaccaacagtcagcagcagaaaaaagccctgatgcaacaattgcttaccggcaagaaacgcttggggctacctactggtagctatgagtttaagcttactcgctatggctcgattccgaaagattgggattatccagccatcaaggatatatgtactcaagtgagcgagaagaattcagccgctttagattacccggttctctcatgctctaagtatgacggttttgtcgattctctgaagtactttaacaaaaaagtttacagtgatgacttatctggttatcgattgatccatcgaggttgttttggtttcccgtctaaccatatagaagaaggttcgattggcctacagaacctttatgaaacgggtattgttagtccgatttatgtggtttttcgtgcagcaccaaccaaggttgacaactcttatttgtatgcggtgctcaaaacagatcactataagcaaatctttggtgcagcaactaatgcttctgttgaccgcagaggaagcctccgctggaaagaattcaaccagatccatgtgcccttaccaccattaaaagaacaacaaaaaatcgccgccgttttttccgcagccgacgctgaaatcgccactctggagaaaaagctcgcctgcctgaaagaagaaaaaaaagccctgatgcagcagttactgaccgggaaacgtcgggtgaaagtggatgagccggttgccgcatga

SEQ ID NO: 103311 - DNA, 144 bp, Enterobacter aerogenes
atggcatgggtcgaaaatatcaataagtatatagtgaaaaaatcgagccatctgcgtaacacattgatcatcaaatacgatgagcgcgcagctatatcttctttagcaaacaaagaaaataaagatcagatcaaaattatgtga

SEQ ID NO: 103312 - DNA, 624 bp, Enterobacter aerogenes
gtggcggccgatgacagcgccctacgcctgcgtatccgcgagatcacggaaacccgcgtgcattacgggtaccggcgggttcacatcctgctcaggcgggagggctggcgggataaccacaaacgcatttaccgtctctaccgtgagcagggactgtccctgcgcctcaaaagaccgcaccgcaacaaatcagcacaacgccgccagccacagcctcaaggcctgtatccggaccacgtctggggtatggactttgtctccgatgcgctgtttgacgggcgacggctgcgcctgttgacagttatcgacctgtatactcgcgaatgcctgggaatttgcgtgggccagaatctgcgctcaacggaggtcgcagaaatgctgaacaccatcgcgctcagacgccccttaccccggttgctgaaaaccgataacggctctgaatttgcagggaaaatgctggataagtgggtgtatgaacgggggatccgtatagacttttcccggccgggaacaccgacggacaatgccacagtggagtcctttaatggcaggctgcgccaggagtgcctgaacgagaactggttcatgtctctggaggatgcacggtgcaaaatcgaggcctag

SEQ ID NO: 103313 - DNA, 2247 bp, Enterobacter aerogenes
atggaacgtagcgaaaagcaaatcggtgttgaacttatcgaacctgcactcatgaaattcggatgggaatggaagcaagatgtgcgcataggtccgaatgaagatgcctctcgcattttcattgactaccttttgacttttcgcaacatcaccttggcggtacttgatgtaaaagcagagttcaggggggctgcggaaggtatgcggcaggcatctcattatgcaaacctgctgttcattcgtttttccatttctacaaatggacacgactggatcctcaccgataacacgacacgtgaatttgaaacattatcttcccccccctccccagaagaactcatcaaacgtgctggctggtcaattaaatgggcacaatgggataacgttttatcttctccatacctgaacaacatgtctctgcgcactcaacaggaaatggccattgaacggacattaacgcatttcgcgcagggtaaccgtcgtgcacaaatctcaatggttacaggttcaggcaaaagccttgttatgcttcaacttatatggaaatttctggagcagaacaccgctcagcgacgggttctttttctgacagatcgtaaaactctcaacctacaaatgcacgaactgttcaattcatttccttgctctgaacgtcatctgatcgaatatgagttagctaaaaataatttttcagggtctgaaaagctttacttttcgacggtccagcgtttgtatgaaaagaatgaattcactcttttcagatatttatcccctgatttttttgacttgatcgttctgaatgatacgtcaagcttattaaatgagcaaactcttaatatccttagatattttaataatgcattgcaactacgcatatccaatggtctggatattgaggaaaaagacggtatcaaattgtcgtactctgaacgtgcaaatgagtattttggccctcccgttttcgcctatacctcaacgcaggcaatgaatgacggatatttggtgcccgattacatcatccagcgcctgcctgatgacacagggaagggatatacctccctgcagcgaaacgcctctatagcatttggccaaaacctcaatctgcgtatgcattcacgcacgcgtgaaattgtaaaggacttatggaatttactcggtgaacgcaaggccagggacgaaaaaaccgtaatatttagctccgacattacccatgcttcgttgatagtcagtgagctacagcgtttatcaggtagctcagactatgtagccagcctcacgactgttcaagaaaactcagcgcaaataataagatcgttttcgcgcattggagaaagttatcccagaatacttgtcgtggttgatatgttcgtgggattagatgtcccggatattcaaaacgttgtttttatccggcatatcaataatattctccatttcagacagatgaaaggtattggctcaagaccctgttcacaaatagggaaaactcgcctgaccatttatgactattcaggtgctactcttttggaagaaagcttgcaagataagctattcggtaagtatccaaaagtatcaagtgcaggtaatcggcactcccatgaccttgctagaaatcccttctgggaattgtcgtcctccgcgtcaattactggtaatgaagttcatctcgccgatggccgcttactttctgttgatgaatatctggatctcgcgcaaattgctattcagtctgcatgtcataacgatatggatgagctttatcaactttggatcagtaaagaagcccgtgtttcacttcgtaaccagctacagagccagtacgtcaatattcctgttttgagccaatacttgcacctctccgattctgatgaaatcgatattattgcgaaaattggattccagctcactgaaatcccaaccagagcagaacgcgttgagcagttactggaaaagagaaatgagtggcgacgggcatccggaaatacacaacaaactgattttatgccccaattctggcaggctgtattagatcactacagccatagtggggttgatgaacttgagctggcagatacctataattcgcctctttttgtcgaactatttggtgggtttgtagaaattgttcgacagtttggctgcgcacaagcgtttcgaacggacttggaacggataaaaaaacagctgtacaccccgggcgcaggagctgaagacaatgtggtgagagatgaatacaaaaccagataa

SEQ ID NO: 103314 - DNA, 3921 bp, Enterobacter aerogenes
atggcagagctcaaacgttttctgtcagctcaatcattccgggagctcttctccgtttttttattgctgcgatggcaagatgtaaaagatgaagaaaagcagtttatcgcagaatttgaaggaagcgagtatgttcctttgcttcccaccgctctgcagatgcgcaactgggcagacctgactaatcctgcagatgtgacagaaaacatcaatgcactggcctcgcatatcgaatggaacaatgctgaagagtttaatgctgctggttttggttatttaaaatacctcaacaacccattacggcacattcagagtatcgatgcatcactcctgatgcccgtcattcagtggctctgttctcttcaactaaccccattgactgctcccaaaactctgtctgatatttttgaacgcatcctaactgaaaccagagatccgcacgacagagaatactcttcggcggaatccctttcccgcctgatagcagaacttattaatccaaagcctggcgaatcaatatatgatccctgttttggatctggcaatttccttatttcagcgtggaacctgtttcagctgcgtcagaataaacagcaaaattcaagcaacacattacaggtctgtggtaatgatgtaaatatcagcgcgtttctcacgggtctgacaagaataacgctttctggaatttcgtcgatgcagctgactcttgggaacagtcttgacgataatgcaggtaaagatggagcatttgatattgtcgtcgcccatcctccggttggcatcaaaacgcactcaaacgcccattattaccgtcacttcccattcaaatcaccggacatcactggtctgttcgttcagcaagcaatatcccgcttaaatactaatgggcgtgcagtaatcgttgttccggaaggttttttattcaggggcggtgctgatcgggacttacgtaagcatctgctgagaaaaggtatagttcaggctgtcgtaggcttgcctgcaggagtcattattcccggctccagcattcgaggatgtcttttaatactgaataaaactggcgattttcagcatgtacaaatggtggatgcaacgaacctggccgggctaagagcagtcagcaaagcgtcctcccttcttcaattggatgctgaaaaactcagtggccttattctcggacgatattatctagaaagaggggattcttcattacgtttctacccagacgaaacgacgatgcggggggatgaagacacggaagaatattctggatggcaagtttcagtaaccgagctagccgacacagactgggatctcacgcctcgtcgccgagaaagaaatgaattacttaacgccctgaaacctttcacaaaagcgtctgacccaggttatgtcgatcagctttccacaatgtcctctattttcgcgggacgcacgattaaggcaatcgatttaaccttagcgccgcatgacgtgcaggccaagggctacatccggattagcgatcttgctcatggcaggatcgtccgggtgtcgcgttggttaaaacccgatgtcccttataattcacacgtgaacctccaacccggcgatatccttatttcacgctcagggacaattggtaaaaatgccgttgtcagtgaggctgcaacgggggcgctggcaggacacgggctttatgtcattcgccctgataaaaactatttagactctgattatctacttgcatatataaatagccgcgcctgtcaaaattggttttcagcgcacgctcgcggtacagcaattcaaaacattaatcgtgataccgttttgaaattacccattcctgtgctccctttacctatacagagacgcgcagtagccagataccagcaatcaggtactgatattcttacctttatttcgacgctcgccaattatagcgagatggatacctttggcagcttggttcttgagattgaaagccagctcccgcgtttcgttccaggagtggaggccacgccttctttggatctgcttgaatccactgtcgatttggttcgtaatgcccagaaataccctctggcctcttattctgacgagcgcgtgtcgaggagtattcccccttttctccaggctgtttctttacttgaagatgtagggaaaattcccccggggacaggactgctcaacgtattacaggaatcagaacgcgtattattttcagttcatgaaaatctgcttaataatgacacgccgttacggtatgcggctgaacgtttacgagtatggctaaaagccgccataactgacctcttagcgccagttgaactgaagcttttaaaagcaccagtatcacttccttcagatagctatcattcgttttttattgaaattgagaacccgggcgttttaccactaaggggcctccggattcaaactcaacctgactggggatccgaatatctggcttatcttcctgaaaagtccagtttctcactaaacctgcgcggcgacacaccccaagtcgaaggtcgctttaatattcgtctacaatggcaagccattggcttatctggacgggaaaacaacggaatcatagaactcgcattcatagtttccgaaacccgcgaggtaagcaggcttaccgatcaggatctcagcagtagtccctatgtaacaggtagtcctttagagccagagagtggacataatgtgttctttggccgcgaagttattcttgagcgtattcgtcgacaaatatcaacccatggaaatgtcgtattactcgaagggaaccgacgcgccgggaaaacttccatattaaaacacttggagggcaaggatattattcccggctggctatcagtatactgtagcctgcaaggtgtcggtggggcatcgaatgtcgccggcgttccttcggtcgaagtattcagaggtatggccagaagtattgctacagcccttaataaaaacagtatcgatctgcctttacctgacggaaatatgataccgggtggggctcaacagttaggtaccgcacgccttatatcaaaagcctgccgcgaaggtatcagtgaagcagaaccttttgtcgatttttcagtgtatctggatgacatagataaggtattgtcccctttgaaattgggtctcgttttaatgctggacgagttcgataagctccaggaaggtattgatagcggcataacctcaccccaggtgcccgaaaacatacgttatctgatacaaaataatcctcgtttctctgccattctcaccggttcccggcgacttaaacgattgagagaagagtactggtccgcattattcggcttgggcactagcgttcaggtcacagcacttgataagctcaatgctagtaaagttgttaccgaacccgtccgtgacagacttatttttgcgcctgatgcagttgacaaagcactgcaactcactgccatgcatccttatctgttgcagtgtttgtgtaataaggtttttgatttctcgattgaaactcgcagtaaaaacatcaccgccagttttattgacagctgtgccaaagagctggctcgtgacaacgaacattttgcaactttatgggattatgcggggcaaggtcctgctaccggatattatcgccgacaattagtgttaatgctttgcacccagtccagtcgaaataatgaaccccttagctttggttcattacaggagctactcacgcaaaatggtgtcgatgtgcatgaggatgctttggatacagatttggcctatctcagagaacttgagttaattgattattcaggacaacttgatggtggagaatatcgactcgccatcccactcatggctgaatggatagctcagcagcaggatattaatgtcgtgttaagtcacgcccggacagaagcagaggaagaaaatgtctga

SEQ ID NO: 103315 - DNA, 1563 bp, Enterobacter aerogenes
atgtctgatatgcgtttccctatccttgggaccagtattcccccggcaattggaaggcggaatgttataggaagaatgaaagcttcgcttacaaaacctcttccagaccatctacaagtaacgggagcacgttttgcaggcaaaacggtcgtcctgcagcagcttgtcaacatattaagtcaagacaaaagcacctacatttccgtgctaatgtgggatttaggtcaccagaccccagctacagatgaacagtttttatctgctttcgcagagaagcttgcattcggtttagcaaaaaattatccagattatgcaacgcttttacagacatcggaagacgagttgtatgctgacatcaccgaagtacttgaggcgttaaaagcggagaataaacgtgtcctgatgatcatggacgggttcgataaaccgctcgaaaatggtaaattgacgaggaatttatgggaccagttgcgtgaacttgctcaattacctagtcttaggttgataaccgccagtcggcgcagacttagggagttaatcagaaatccgcaagcgcagaccagtgatttttggaatatcttcaactcagaacccgtccacatcggatgttttgatgacaatgacctcgatgaactgcttggtaagttgccaggtatgaatttcgaccagggtgcaatctctgaactctggaatgaaagtaatggctatccggttttactattggggatacttaatgtccttgacaatacatcctccagtggaaccgtcagttcaaaaatcgtgtgcgatgtggccatccaggctttagctgttttacgggaccagttagaatcattatgggttgactgccctgcttcatcacaagatctcttccttcgggtcatggacgaaaaagctattttgagatccggggtcgcacaaagcgacatcgatcgtttgatcgaaaaaggttttgttactcaagctggaaacaaaatacagagaccttgtcggctgctgaccagctacctgaaagatcagccaaatgaaggcaatgcattaatgcgcctctttggcacccctgataactatctctctaacatgaaatcggtatttgagcggcgaattgatcatattgcaggtattgaccctgagttaaaacgttatcttgagcgagccattggtgacctacccgattatccgagtgtctttatgaccaacatccgaggaatcgtcgatcgtgtctttgagcttatctgggctgctgagttaccgggcagaagcatccctgctgactggttaaattactggcagtccaataatgaaagcatcaatggcctgacgtcgggattccctcagggagggaaacgagtctatttgttgaaattaatgacaggcactgaaaactgctcacctagggcgtcaaaaattagcaaaacgacgttttatctggtaaattcaacgcaaagttttggtgattttgggcaacatcagaatggcgcaagtattgacaaggggactgcctatccgatattcctgctatgtctggagttggctgcctcagtgacgagagagctacgctaa

SEQ ID NO: 103316 - DNA, 222 bp, Enterobacter aerogenes
atgtataagaatagatttccgaaaagagataataaccacatcatagaaactttttcgtacaaggtttttagtaactcgatccctaatcaatggataataagagatttaactaaacgagactatgggacagatgttttaattgagtacgtcacagatagtggtgatgtaaccggctatagtggatgtaacaggcagcacaaatctgctgccctcgggaaataa

SEQ ID NO: 103317 - DNA, 1125 bp, Enterobacter aerogenes
gtgcctgttatcgactttcatatacctgatgattttaatcgaaattattcctggtatagtatgccattagctacttcatttgaagatttcactaaagatataacaatacagaaaattgctaaagaatttctagggctaattgaaactttaaaaaagttacatgagttaggagtatctcatagagatattaaacccgataatttcttatattataacgaaagactttgtttagctgactttggattggctaaaacatctgatagtggaaatctcacaccagagagaagagatgttggtgctaaatttacaatggcacctgaaatgagaaggacagcatccactgcagatggaaagttagcagacatattttctcttgctaaatcgttatggattgcattaactaaacagaaccttggcttcgatggtcaatacaatcccaacagttcattagctttaagtaactttcactctaatgtctttttctcaccattggatgaatttctattagcggcaactcagaacagcccagaattaagaccatctcttgatgattttacgtcatcaattaatcggtggttatattttactgagcattttcacgaaaggaatcaggctgaatggcaatggtttttaaataaattattcccagtaggttcacccaaaagagctgaatggaaaaatcaagaagatataatatccatattgtcattactttcccaaaacagtaacttaaatcatatgttctatcctgatggtggaggcaatgacctaacaggtataagtaaggcagccgaaccagggttcatagcacgtcatgttgatgaaaaaagtgtagaactcatcaagccacttaaattatgttttgagtcattcggattttcttcagaatggaattatttttggttagaagtggataatattccaagcatagggataccaaactgtatgcggcataatgacgttgcggaagacttaactgagatttcgccaggttcttatggaagtataggttgctgggaatataatgagtttgatggcgagcctctaccaaataattcacgtccagtgacacgctattgcaagggggcttttgttttttctgtaaaaggtctacctataatctaa

SEQ ID NO: 103318 - DNA, 234 bp, Enterobacter aerogenes
atggacaacatcatcttttcaggcgtgcggatttacttcccgaagccgggagaaaggctaccccagcctcctgatgccattcctacttatgctatccagggaactgttgattcccgttgttgcctcctcggcttcctgcagaattcttggatggtgttgtcattaccggaatatgagcattcaggtaaagccattatggctgctgccaggcaagctaagaagctatggcgctag

SEQ ID NO: 103319 - DNA, 2019 bp, Enterobacter aerogenes
atgttaaagaaaacccctctggcactcttttgtgccggtctgatgatttccggtaccgttctggctgctgattatcagttcactgcagacagcaaaccagcaaccgacaccaccaaaactaaaaacgaagcggtctataaacaactcgattttgccaacaaaaccgatttcgaaaacaccgataaaggcttcattgccccgcttatcaacaacggcgacattgacggcgtgattgatatcacgggcatgaacttcatgcagaaaaaagaagctccgccgtcagtcaatccgagcctgtggcgtcacgcgcaactggtgaaccgcggtggtctgtacaaagtttccgaccatatctatcagattcgaggtcaggacatcgctaacctgaccatcatcgaaactaactccggcatcgtgctgtacgatgtggaatattcgaccgacagcttcaaacgttccattgaactgtatgagaaagagcgtggcaagaagccgctgaaaggcgtgattatctcccacagccacgctgaccacttcggtggctttgggggtatttatgcctccggcctcgcaacaccggaagacatctccagcggtaaaattccgttcctggcaccggaaggtttcgtgcaggaagcggtcagcgaaaacgtgatggccggtaacatcatggcgcgtcgagcgggttatcagtatggtaacgtgctgaagccgggcccaaccggcggtatcactgctgcacttgggccggttctggctaacggtaaatcaactctgccactgccgaacaaaaccatcactaaggatggtgagaaagtgaccatcgacggcgtggattttgtcttctatctgacgccgggagcagaagcccctgcagagatggtgatgtacattccacagtggaaagcactgtcgatggctgaagaagttaaccatctgcagcacaacatctacaccctgcgtggcgcgcagacccgtgatgccagtcagtgggcgtcctacattaactcagccattgcccgctggggtaacgatgtggaagtgcagtttggtccgcacacctggccggtatggggcaacaaagaggttgtcgagtatctgaaggaccagcgtgatgcgtaccagtccatctacaacaccaccatccgttatgccaactacggctaccgcccggatgacatcgctgaaaacgcgaagctgccggaaaaagtgttcaacaagtgggataaccgtccgtactacggcaatacccgcaacaacctgaaatccacctacattaaaaacctgggctggttcagcgggaatgccgctgaactggctaaatacccggatgcagctcgtggtgaacgctacgtgaaagcgatgggtggtgagcagaaagtggttgagctggcggttcagagttacaaagaaggcgactatcgcttcacggctgacctgctgaacaacatcgtggcttacaatgcctccaacaaagatgctaactatctgatggcggacgcccttgagcaactgggttaccaggaagaaaccgcgctgtaccgtaacctgtacctgtccgctgcgcacgaactgcgtgtaggcggcagtgtgccgaataaactgagcaccgcttcaccagaagttatcgccgcactgccaccggaaatgctgatttcctatatcagcatggtctcggaccagattaaggccgagaagctgggcaaccacaccatcgcgctgaacatggataacgataagttcatccttgacctgcacaacggcgtgctgaactacatcaaactgaccgacgatatgcctgcacagaaagccgatgtcaccgtgcagattgccaagactgacctggtcgcagtagtggccggtaaagagaagatggatgacctgcttggcaatggcaaagccaaaattgagggcgatcgcgatattctcaaacaaattaccgccacccttgatacaaacatcaagaacgacatgaacctggtactgcccctgcaaaaggccaatcagattcagcagtaa

SEQ ID NO: 103320 - DNA, 783 bp, Enterobacter aerogenes
atgaaaagaatcgttggttttgccgcactggctttatttatggctgatggccaggctgctgatgggggaggaagtgctgctcaggcgaacaatcctctggcaaacatgactgcattcaatatgcagaactattatattggtgatgtaagcggaacagataaagaagcaaaccagttctggctacgttacgctacgccattctcgttaggagaaagtgactggttattacgtgcatcactccctgttaacacctatccggccccgccatatggcgggcacaaaactggtgtgggtgatcttaatctgtttgcgtcctggcttattgatactggcaatcctgcggtaagttttggatttggtccacagataactgctccaacggcctcagaagatgccgtgggttcaggaaaatggtccggcggcctggtcaacgttctgtttgatgccagtaatccgaaattccagtatggttatcttgcttcatggcagcacagctttgccggagagtccgatcgcacagatgtcaatatggcgacatttcagccattcatgttttaccagttgggcggaggaacctatctgcgctcggccccgatttgggtctacaaccttcacaacaatgattacagcgtccctttaggcctcggtattggtcaggtgatcaaaagccaaaaaaccgtgtataacttcttcatcgaaccgcagggcagcattgctgacagagggccggggcaacctcgctggcaaatattcgcagggcttaacctgcaattcctgaactga

SEQ ID NO: 103321 - DNA, 1029 bp, Enterobacter aerogenes
atggctactttggacgcattcaatagggtgattacccatcatactgtcaccattgatactagattccgcacacaaaaaattgatgacagcgataaatctcaatgcatttgtcctgttcctacgatgtcagaactttcaccgatgataagggcggtgcaagggatgaagcacagctatgagaaaggtgatgttgttctcactttacaggacgttaaattctttactaaccgggaagataaaaccgcgactcacttatgtttgcttgtaaacgtagtcgataaaaacggtagcaccacagtattaaaaaacgtgactactgatgaacgtacagagatctctcctaaccacgaggaaggagaaggttatgaagtttcttcgcatatcataatagctcttaatggcaacatgagaacatatgacatgagctatatgcctattcctggagtatctactgcgcgaatcaatgggttccttgacagagtgctttttgaggtgtccagaaaaaatgaagatcgttttacttctaaatcagtaaccaatgaggtgtctgataaaacaaaaaaaccaataaaaatattatacaaacctgtttttgaaatatcaggaaaattagatcaagaattatttaataagatcaacagtgaaggtctatccgatgtaatcctagttaaaaatgaattcaggacaataaatgccccagatgtaaatgctgctataataccaagagaaagtacattgcgaattttaccaaaccatgggaaaaatgatgtccttggttggattcgttctgtatcaaactattttaaagaggataaatatggaggctatgatctgattaagataaaatttaaagaaccagacacaggtttcactcgtcaagttgacttgcagacagccaacattcgtttggatggcctcgaaaaaacttttatcaaaaaaagcactctgaatggtttttcttcgcgtttaaaggattcatatgatactatgaatattgaaattgtcaggaaaattatagagcatatgtga

SEQ ID NO: 103322 - DNA, 576 bp, Enterobacter aerogenes
atgattactgttttttcgcatttactcaaaccattcggatacctgttcattaaggggataggtggtaaaaaggcatatgactggtacgctccagctatccttactgctgtctccatagtttatttttatcttttaaaagtaccgtctgctgatctcataaaagatggcggatttgtgaaatcagtctcttcttttatctctaatttacctggtttttatattgcagcccttgctgcaattgcaacttttaacagagaagaaatagatttccctctaattggtacaaatggcgcaccttttattaaggtaactcgaaccaaagaaaatggaaaaaccattgacactcaagaaaaattaacgagaagactatttttatgcatgctcttttcttttctcactgcgcttagcctgtgtatattaatgttaaatgcttttataacgccgctgaccagcacctataacaatgatatagcaaactggggctatatcattgtatttttgttttttacatggcaaatgttagtatcaacattctttggattatattacttaggtgatagaatacatattaactga

SEQ ID NO: 103323 - DNA, 363 bp, Enterobacter aerogenes
atgcgtgatatgtatgaattattggaccgttggggtgcgtgggcggcagcagatagcagtggtgtggactggcagccaattgcggctgggtttaaaggtttgctgccacacggcaagaaatcacgcattcaatgtgacgatgatgaagggattatgattgatggttgtgtggcacgacttcgtaagtacaagcctgaagagtatgagctgattattgctcactttgttatcggtatatcgttgcgagctttagcaaagaaatgtaagtgctcagatgggactattaggaaggaattacaggctgccttgggattcattgaaggaatgcttatgattttaaatcccaaggttatgttcagttaa

SEQ ID NO: 103324 - DNA, 285 bp, Enterobacter aerogenes
atggcacttgattatcaaccggttgatatgcccgtggcttttagccaggccgatgccgattggatcaagcagcagttactgagcctgacgccagcagcacggcaaaaagccattcagcgttatgcagctgtgtatcaggaatcgtttgaaaccgagcccgtttcataccgtcaggagaatcgggcaaggcatgaagcaaacacgcgacttcgtctgttcgtgagaaatcacggcagggcattgcaggggtatacgactcagccacccctcgccggatcgcagtag

SEQ ID NO: 103325 - DNA, 822 bp, Enterobacter aerogenes
atgtcatatacagaaattcaacctgttacattcaatgagttagtgggtgaagagatcgtagatctaattttcaccaaagcccctacaaaagttttatcacgcgtcgtaaacgctatcatgcacgtagagaaggcaaaaaaacttaaagatattgacgccgaaatggcctcaatcaggcttattgcagccgaagaagaactagtagttgcaatatttgaatggctgaaacttaacaaagagaaaatgccacagcatactgaactagtcaaaagctataaaaatcatcaagtaaaattgatgtttgttccagtgcttctccttatgaaaaatattctttggcattgtgtcttacctatacctaacctaaatgaggaaaatctaaagatttatcctaagtatgacgatgggaaaattgttattatgtttgggttaccattctcggacgtagaatttccattgaacccgttatctgtgtttatcacaatgggcgaagatgtagaagaaaatcaggtggttgattcattgtattcagagttggaagaaacagtaaaaataaaatacggcatgacattaaaacaatttataaagcaacgtgccgaatttagaaatattcttctttatgctggggatgcgctacctattaattacatggttgattatgacgagatgacatctacctgttatagcgcctacgaggcactgttatggtctttagctgcactcctaaccaacgatccattatcaccacatcttggtgcagttagtcaatttattgctatttataaaaaagttttattagattctaaagttatcaggctttaa

SEQ ID NO: 103326 - DNA, 273 bp, Enterobacter aerogenes
atgatttataccttaaaaaggaaggggcagagagccccttcagtcaactttagccagcgtgacggtaagaatcacgtacaccatcacgataaccatcagcaaacgcagcctgaggacttttgtgacgaacagttcccgcctgactatcaggaagagccgccaaatcaacccaaggttgacctgtacgagctagaccagcgcgatacccctgatcataggcacaaccacaacatttgtgacgaccatcaccaccttgatcatgaggtaagctga

SEQ ID NO: 103327 - DNA, 321 bp, Enterobacter aerogenes
atgaaggaagccagatactatgcattaaaccttcacagcagcgctgtgattgaacttggggtcatgaaagaaagtgaagcctatccaacattgcgcaaaaaaatcattactgagtgtgaaacaatcccaagtattgagagcattgagtgtgattattatcccgtcggtggtgaaaaagcaaaagaggccgaaaacgaaggcggatggtttaaagttgttcaatttgatggagtagatgcggatcatgtaaccctgagaaaactatctccagtatttgtacttattaatacgacacagtaccccaagttcaggcaattttaa

SEQ ID NO: 103328 - DNA, 621 bp, Enterobacter aerogenes
atgggtaacgcaatggtcgcgctgaagacagcggacgaagtgaaggcagtcagcgcggagctggcacggaatacaaagacgaatcttttccgctgtttgtgggctatgcagttcgagagcgctctccggttctctgacgtggttaaattgacgtgggatcagttcgcagagggcaagacgcatctgatcatcattcagcagaagaagacccgtaaaggcgcggatggcaagcctataaagccacagcctcttagggtcgccatcactccagctatgcgctctatcgtgcaggctcgccgggaggaggcagcagaccgcccttgctttggtgactacatattcagcctgtccgacctgaggtcgaagggtcagccagtcagccataacgcggtgttgactgagtacgggaaatgcggacgccgtgcaggcttccaggatgtgggaagccatacaccacgcaagagtaaaggtcggatcatgtttgagaacggtaagccactggaacacatcagcaacctgctggggcattccaacccggccagcaccctgttttacatcgggttcacgcaggagacggcagacacattagcgggagaattttctctcggagaggaatggtag

SEQ ID NO: 103329 - DNA, 429 bp, Enterobacter aerogenes
atggggaaacctgtcctgttcgatttctcgaacgctaccgcctcagagattgttgccgcaatcgatgcaaaaattactactgctcaaaacctgcacgccttccgtactcgtatgggtggagccaagaaagctgataagcgctatccagctactcgcgaagcactgaacatcattaaacgcctgcgtcagcaagcgaaagatgcaaaaatcatccgtgatattctgcaaccatactcagcagagttggcaaaaggtcgggatgtaatggatatcatcgaaccagtgctttctgcctggcgtgtctattacgcctctcatggcatcggtctgatgaatgagcagatccttctgcttaagatgattgaatctagcggtgaacttgaaggtattaccggtaaagccattccagatctgaccacaaccgaataa

SEQ ID NO: 103330 - DNA, 192 bp, Enterobacter aerogenes
atgaaactgagcctcgatgatgaaacctacgcgattttacgtgaagagtctgatcggctggggatgccggttccgaggatgatccggaacatgtgccagaacctggcgaaacacattcagaaacgcaatgaacaaccactgacgaacccacagggagaacaacatgagccagaacgagacagaaaaaactga

SEQ ID NO: 103331 - DNA, 1017 bp, Enterobacter aerogenes
atgagccagaacgagacagaaaaaactgagaaatacgcttttttctataagcgcctgctgcattccacgcatatcgtgcgccaggatacaggagaagaaattgaaatccctccagagacggaaacactttacagctatatgcgtgaccagtacgagagctataggggtcgcgaaaagccgttttttgagtcgcaagaaagtatgggacttaagtttaaagggcgttgtcgccgctggatagctgccaggattgaggttttaaacagactcggcctggtgaaatctgaggagcaggagcgtgattcctacggtcacaaacgttttcaccatactgttatctctttagaagaggtatccgacaaccttcttttctatggtcctgcatcgatcagtggtggaatactggctgaaggaatgctcatccgtccattaaagaaaaagaagccgcgcggaacgcctaaaaagaaaaaagttgcagcgccattaaacgaggagaacaaaggcgatgacgagcaggcacagcagcaagaacatgaacagcaatcccctgatgtgtcccccacggcgagtgaacctgtgcaacaggctgatggtgtggcctcagcatctgccgaggatgatcctgaacagcgatctggcgtttcacagcctgctggtgataacggcgatgatgtttccggtagtgatgcgatgaacgaacggtactatgccgatcttaataccctcaaccactgggtagaaggctacgacgatgaaggatttatggcctatggtgcgacgtgggggatagaaaaacctggtgcgataacggatctgataaagagccacataagaaaaatccagagtgatggatacaaagggtcaaggtctgccgctaacgataccccatctggtgcagatgattattacaaacagcagcaggcacaaagaatagccgcagcaaaacaaggtgctaataccccgcagcagcaagagtatgaaccgcccctggattttgacgaaacgatcccattttga

SEQ ID NO: 103332 - DNA, 522 bp, Enterobacter aerogenes
ttgaacaatgttgaatgtaacagccgccaggctgaccaagaagaaaaacttcccgatctaacccgacttttcaaaaatcgcgcacgagatagcgatataatcaaaaaatgcaaaaccatgctcatcgccgggtatagcccccagaaaacagcacttttgctgcgcctgccgatagaaaaagttattgatttatataataattcctacaatccgaaatgcaggcgatttgccaaccgcaattcctaccaggattcaaaactagcactgactatgtttcaacagggcgagtccctcgcagatatctgtgctgcgctaggaggactacatctatataccgtggtgatgtccctccggcagaatgggatcgcggagtccgctattgaacagcggctaccccctgaaggcgaccccctgctaattgagttccaacgcgtctgcaaaagaaaggctaccagcagatataaggctattcagatcaatccggtccaacgagtcaacactgggttggcaactactgcctga

SEQ ID NO: 103333 - DNA, 480 bp, Enterobacter aerogenes
atgccgcttgcaattgatgtaaaatgttgtgaaaaactcgcttctgatggcgagtttttgccgttctatcaagagttcgaagactacaagcgcaaaagcgacgacactgaacaaccccgccctagtaataagatgcaacaaagctatgcttcaatctccggattatttggacgcgacagggcaaatgttgatgagacaagccctttctatcaaaggcaagaagggttaagtcatcttcatgtgcgtcaagaagacagcgtttgggaagatgagtctggcgatccgttaatccaatggaaatgtaccagcaacagctacattatctattcatactttgttcataacttggttcgctattactttgtcgttgattttattgatgatgaagcacacgcgaattgggataaccaggaagcaattcaaatgtggattgctgacgctaaagcgtatcgcttaactgttaaagaaattgcagcatag

SEQ ID NO: 103334 - DNA, 159 bp, Enterobacter aerogenes
atgtcaaaagctaaccaaaaagcagctacgaagcgcaacaaccgtaagattcacgctcgtaaattcctggcaacaccagaggggaaagcctggcttgctaagaagcaggaagagcgagaggaaatcaagctggcacgagcggctaacaacatgttttag

SEQ ID NO: 103335 - DNA, 258 bp, Enterobacter aerogenes
atgaaccacatcgaatttatcgagaagcatgttcgcgatgaactgattaagcagggattcacagtggcagtggctcaggggggggcatttcaggccgtcgatatgtacaagcgcatgtcgcaagccagtcgcaaagggaggatttttgatgacgtattacggcacgcgaaactctgggcagagaagcagcagcttccttcagacaaatttgagaagaaacgcgttaagcgtgggcagcaacaaccaagtctgctctga

SEQ ID NO: 103336 - DNA, 267 bp, Enterobacter aerogenes
atgatgttagatcttgaaaatatttataaaaatgaaacagtagaggatgtgctgttgcattttgcgcctatcactccgtaccccagcatcgaccgtatgtatgttcggtataattttgatgtggttgctaatggtgagttactaaggactcatgaaagactattcaaggaaggaaagcttaaacatacagggcaacctcttcccgataaaggacctaactggagagagcctgagtttgttaaagaaaaacggtatgggattaaataa

SEQ ID NO: 103337 - DNA, 276 bp, Enterobacter aerogenes
atgaataagtcaatgctcagagagcagttagatgaaaaactccatcgccgcatagaggaattgaaagaacttgttgttgacgcggctgatgaccgggatggtgaatttttgggatatcctatggcattcgcttacgcgatgaatttgattcgcaccaaagcaaccaaaacgggcatgaattttataagcgcagaatctgccacggatgaccaaatccagagcgcaataaaactcgtagatgaatgcattgctgactggaaagcacagaaccaatag

SEQ ID NO: 103338 - DNA, 318 bp, Enterobacter aerogenes
atggctaaacgtatgcaagataaagaaagcattgccggagtttcatggctgattgtccttgctctgtcatgctggggcggccttgtccgatacctgattgacgttaagcaaaacaaagccacctggagctggattaacgctctcgctcaaatcgcggtatccggatttacagggcttatcggtgggctggttagcgtggaaagcgggctcagcctttacatgatcctggtaacgtcaggcattagcggggcgatgggctctgtggcgctgacttatttctgggaacgcctgacggggatgaaaaatgcaaaccagtga

SEQ ID NO: 103339 - DNA, 471 bp, Enterobacter aerogenes
gtgattggcgtgctggtaaagcgttactggttccaactgcttgtgttggcgttgatcggcgtactggcgttcttcttgaactactatcgtgacaacgccattacctacaaagaccagcgcgataaagccactgaacagctcagcctggctaacgctaccattaaagacatgcatacccgccagcgtgatgtcgctgcactggatgctaaatacaccggagaactggttgatgccaaagctactatcgatcagcttgagtatgacgttgcttctggcaaacgccggttgcagctcaacgcaaaatgtaccgcgaacggagcgaccagcgccggcggcatgggcgatgcttccggcccccgacttactgactccgctgaacgggattatttcaccctcagagagcgaatcatcatcatcactgggcaagtgagttatctgcaggattacatcacgaaacagtgttttcgatga

SEQ ID NO: 103340 - DNA, 885 bp, Enterobacter aerogenes
atggttgatagcgagaagacaaaaagcagtcatattagaaaaagggttaacgacgctgaattcctcatagaaaataaaaggtatgaagcagcgctgttgctattgttaattgcaatagacgggtctgccatcaaggtttttcctaaagggacgcagtccataagtcatcctacaaagaaaaaaaatggtaagtgggtaaaaaatgaaatgtcaaatagtgaacgatatcaacgattcttgggcgtcaggttaatgcaggagttgggatattccttaccggattccacgttccacacccacaccattccccaaatggtaagtggaccagacagacctgagaagattatctataaagcatttagaaataatgatgtgcatgaatcaaaaattcctgaagaatatcattatgtttatagtgacgaaggggtgactagtgcatatggtatttctttttcacatgaagaagtgaagtttgacaaaggttttctgacccttcttaaaaatgttgttgtgagagccgagtgcaaccgagatgagttctccagtaaatttataacattgacgcataagggtggtttgtctatagatgattacattaatgagttaaatattaaaagtgagatatctcatggaagaataagggttttaattaaattgatgcatcatttggatgatgaagcgtatgcgtgttcaaatgacaaactcagagaacaacttaataaactgattccacaacatctaaatggtagtgaccttagtggtttatgtacagcaactagtgttagtgggaatccacctatatgtacgtacgaaaatcttatgactaatgaaggtgttgattttattagggttataaaaaccgatctcattttaactgagagttag

SEQ ID NO: 103341 - DNA, 1350 bp, Enterobacter aerogenes
atgactgacaaattaactctcgccgtcaaccatgcgttgaacgatgcgcggatggcgcgcgcccgtatggggatgctggcgccaacaatggggctggacaataagcgccattcagcatggtgcgagtatggcttccctgaacaggtcacctacgaaaacctctacgccctgtaccgtcgcggtggtatcgctcacggtgcagttgagaagctggtgggcaagtgctggcagactaacccggaaatcatcgagggtgacgatgccgacgagagcaaggttgaaactgcttgggagaagaacaccaaaaaggttttcacaaagcgcctatggcgggcttttgctgaagcagaccgccgccgccaggttggacgttatgcgggtatcctgctgcacatcaatgattccagaacatgggatcagccggtatttcgtgggaagtcactaaaaaaggttacgatcgcatgggctggttcactaacagtcagcgagtgggttactgaccagaaatcggcagattacggccagccaaagcagtggaaatacgttgagagcctgccaaatggcgggacaaatcagcgcttcgtacatcccgatcgcgtcttcatccttggtgactattctaatgatgctattggcttccttgaaccagcctataacgcctttgtgagtctggagaaagtagagggtggatcaggtgagtcattcctgaaaaacgctgcgcgccagcttgctctgagtttcgataaaactatcgatttcagcagcctggcatcgatgtacaacgtcagtgttgacgagttgcaggacagattcaacgaagctgcacgtgagatgaatcgtgggaacgatgttcttctcgcgcttcagggcgcagacgtgacgtctcttgtatctccggtttctgacccggggccaacctacgacgtaaacctgcaaactgctgccgccggggtggatataccgacacgcattctggtcgggaaccaacaggccgagcggtccagcaccgaagaccagaagtacttcaattcgcgttgccagtcacgccgagtagacctcgccttcgagatagaggacttctgcgacaagcttatcgacctgaagatcatcgactctgtcagcaataagaccgttatctgggatgacctgaatgagcagaccggatccgagaagctgaccaacgccaaaaccatgggcgagattaatcagaccatgcagggtagcggtgaaaatccggcattcagtcgcgaagagattcgtacggcggcgggttatgacaatgacgacgaagaaccattaggagaagatgatggcaacgaagaagacgaagccaccaattctaccgcgtaa

SEQ ID NO: 103342 - DNA, 3222 bp, Enterobacter aerogenes
atggcaacaccgttaccgactccaacgcagaatcccgttccaagtacggatatccgggacgcagtttatgccggcgcaatgatggacctgattgtttccagtacggcgaagatgtacaccgaccgtctcggtattgagcgttacaccattgaaggcattcgccagaatcttatccctcttgggcgtcagtatatgacgctggctgatgctcaggcggatatcgctaatattccggtcaactctaccacctacgtacggaatgccgatggtgcagtactggctgacgaatatatgaatgtcggcggcacattgcagcctactggccgggtaatgcctggcagcgcagccctgatggctccaaacctgatgcagaactcccgcgcggcacttacggataagttgccggcattattctctggcgctgattccggtggggtgtgggcagcggccggcgctgagatggctgctcagggagctgtgcaggaggtggtgtgccctccgcgcgcttcgacgtcagacagggcggtgaattatcttttccagcaggatatctcctttgtcagcggcggcagctatattgcgaccgaaatgctgtaccggggaaatacggcgctcatctttacccgtgtcgctccggatacggcggcaacccgcatcagccagcgctacgaagatctgggtaacggaacaatcagagtcaccacgctatggaagattaatggtaatgccgccagcccggctactgtcatttactggggatgccagcagagcggtagtagtgtaacaagctgcgaaattgcctaccccaaaatcgccatttccaggcgccagatttttggtgtaggcggcgatatgtcgatggccgatatgctcaaccagagcggcgcggtcgtaaataattttatttacaacagctttgccgatccgcgtttttctcttccgcgtttgcgtgtcggtagtgtgtcgtggacactggtaagcactctgactaacaccacgatagcctccgcgctgacatctgcaggggcagtatcctgccttgtcgcgccgccggtatcatccggttatgtggatgcgcttgttgagccatgggttgatgaaactgccagtcctggcatgtggggagcgtcgcagtattatgtttatgtggacagcgtttctggcgtaaatccaagggatgagatccgcaaagctgccgtcttctttattgatgtggataacggcactgtgcaggtcacgccggatgttatctcgcaggtcagcaataacctgtttcatgttcgcgcgtcgtaccagttcgccaataaaccgcgacgtatatccatgggcgtacgtcagaccggcgccaacagcacattctatgttttcggcttcttcatggggctggcaaaacagaaaatccgggacattctggagtcacctacccgcgactcaagccttggtgaaagcctgacgggaagcgccagaaatattgcgttcaacccaagcgcggatccggcacaacaacaacagggattatttggcggtggttcatggactcctgtcgccagcctgccagcggacgtacagtcaatttccactctgggggcaaaggccgctgtctctgcacttcgcgtgacttctggctatcgggatgccctggcgaatatcagcctggacggcgtgaagatgggggattatgtccgtatcgaattcggtgtttacgtgaacgccgatgcaggagtggacatcgccaccgcgctgacaaaatgctgcgcgtttttctggaataccactggtgcgtttgagcaaaaaacggcgcaggttaaagagaagataaacgataaaacatacacgatgacctatcagtaccagtatctcggcgctgatgcatcccgcgtgtatctaggtgtgcgtaataccctgtctaatgctgatttctacgtgttcaacaccaacgtggccacatcagcaaacgcgatcaccaacttatcgaaaggcctggtacgtgacccgatgctgaatgcctatatagcatctcaggtatctgcgtcagtcagcccttatccacctttactggccgttaatagcccggttgcaaatgctgaagattatatccttctgcccgatcagattttcgtacatccgacggaaccgctgctgatccagtgtcctcaactgctgatgaactggacggcggatatggggcagttccttgactggtcgatgcgtgggactaatttaaacggacgaccatacagttacgagacgagccggacaatggagtttgacccggcaaaagtgggaactgatgtcagcttcggttttcataaccgacagaagcccggccaatggtctcggcgagacgtcacgctggttcgcggcccggcaacggtcactgcgtcaaagtccatttcacttattggtgattcgttaactaaccgcggacaagtcgcgcgcctgacgacattactcaccgcggcgggcgttaccgtcacgcagattggtacgatgacgcagcaggagggagggaaaggagaagggcgggaaagctgggcggcggcacactttgttggcaagcgcacattacttaacagtacccgaatcaatatcagttccgataacccgtcaggaacaaacaaaaacccgttcctgttcgaagcgacggaagcccagaaaacagcgcatccggaaatgtgtttcctgaacaccggggcggcttctgagaaatcgtatgcagatacgcaaacaggtacgttttacacgtttgattaccggcgctatctggacgctcagggctttgccgatccggatatcgtgtcaattgcgctggcatggaatgaccaggctaatggtcagactcctgacgcctatatcgcgcaaatcaactacatggtggagcagattagggtggcgtgcccgaatgccaggatagccattgccccatattgtcatccgtactcaagccgcgcggtgtggaacgccaacacctcacagtatgtgcgtaacgtcatcggttcgttcaaggggcgccagagtgagaagctgcacatcattccttcatgggggatcatgccagccgataccgcctggagtagtgacggcgctaatatcacgcgggatgcgttgacgggaagttatgtcgatacgcgtagcgataacatccattgggaccagtgggggcggcagtatatggcctacaactgtctgtacccgttctatatctgggcctgcgctcagtag

SEQ ID NO: 103343 - DNA, 558 bp, Enterobacter aerogenes
atgcagttctggatacctaggagttctgtcaataactgtactgaaagccttcttaactatgaaccacatcggcggaaatcgtccgctgatgagtttgaggagctagcgctcatcattaccagcggtgactgttccgactataacacccggcgtgcagaaagttacctcaaagctgcccacgcgatcaggcagcaagagctaattttatcaccagcacttgctggactgactgcgctgattcaatcatgggcgcagacgaagaaagtactgatcagcaaacagcaagccattagactagcgcacggtaatgaagtgacggtactggatatcgtttatcgcgcacacccagtgacaggcgaattaatcgtatctggcacagatcagcagtggcgaaaatgtatatcaagacataaggtcgaagagttaataaaacgctggaaaatgactataaaaaataaatataaattcaatgcgaaagcaggtttaaaatatattaataggtttgttgagggtggtaaatatatcgtaagtgggatgcgccaaagaattgatttctaa

SEQ ID NO: 103344 - DNA, 1434 bp, Enterobacter aerogenes
atgattaatatacaagttgcaggcgcaggagcaggtaaaacctttggcttagctggattaattaaaatccgtacagaagagagagatgggaagaataaaatacatgctctaacatatacaaactctgcaaaagaaaagatcagggatgagctaacaagaagttttaatagacttcctgagtatattaatattgacactgttcattcattcctactcaatgaaatcatttttccatatgcgcaatacgtcttaggtgatagatatcattctgtctctttagaaaccttgcctacagaaaatgtctataaaaattcaagaatagctaaattaaaaaaagatggtgttattcatgttgaaaacgtctataaaaccgctaagcaaattttagacagaaacaattccaagcatacaaacaaatataaaaaaggaaaggtcgactatataaccaatcttttaagcaaaaccatttgctcaatttttattgatgaagtacaagatcttgattcagactgtttaagggtgtttgagatactagggaaaaccgatatttatatttatatgattggagacccaaaacaagcaattaaatatcctaatgctttgcatgatttcatagaatcaataaaaaaaacaaaatgtgataaaataacaatcaaaccgatggaaaataacacgagacgtgtacctcaagcaattctaaacatatcgaataaattttgttatgacgaacaatgtcaaacaacattaaacacattgccaggagaagttcgctatatttacaatgaagtagaacgttacgatgaaatgcttggtgaaatgttaactcgtggtaagttagtaattataaatcaaaaaaacgatttctatactactaaaaaagaaaataaacagcacattccttgggtgctatctaatttaatatctgaaagtgacaaaagagcagggagagatacgaaactgtatattcagtctgtatattttgacttgatagatgaattaaaaatcaacaatcatcaaatggctgtgaacaacattatcaggaagcacaacctttcagggttaatagggcaaagaaaggatttgttcgcaatattttatactttcgctgaaacatgcattagcactgagcatcaagtaagatatattgtaaaaagtattgaagctgttaaaggtttggatagtgatatcgttttcttcattttaaccgactcattcattaactatttagatggggttaacttaacgaaagatcagcattttaataaagaatggaaaaaaatatacgttgctttaacacgtagcaaggataaattaattttcgttttagataaaagaatgattagtcctgaacatctgactattagtgaaaaattctttaaagagaataacattaaaatcatatcagatgcagacgagtgcctaagctggctttga

SEQ ID NO: 103345 - DNA, 1737 bp, Enterobacter aerogenes
atgttcatcaataaagttcaaataaaaaattttcgttgtttcgataatttcgaaacaattttaaatcaactaactataattataggagaaaataactcaggtaaaacaaactttataaaagcactatcattaccacttagccttggatcattagactcatcgccaaagcggttatctgtttcagattttaatagcaattgcgtttctaaatttttatcacaagcccattatttttttaggttggacgataaaacccctaatctattggaagaatatacaaaattacattctctgataccaataattgaagtcactttagaatttagcgatccaaaaaacaatttcgaaaaagcattaataagttcttttttagaggaagatgattcttcccctacattcaaaattaaatatatttatcatccacgcgatgatcttgaacttcttgaaaaagtaaaaaacttagtactttctataccagaaaaaaatgatcttaaatggcatctattcccgattgataactatgattatgatattgtcacaacctcgaacaataaatccatatcatttgacaaattaaaaaatttagtaataaacactatcggtgcggaaagggatgatttttcagattctcaaacaatgagatctaacaacatattaacaaagctacttatcgctgaacttaatgacaatgaaaaacaaaccattaattccgcatacaatactttttttgctgaggtggaaaaagcaaatacatttaaaagaatattaaattctgatgaaagctttgaaaacattaaagaacatttaaaagatgtaggatgcattccaaatcttccaaatttaaaaaacatactttcaaatatcacattgagctatggtcaggaatttctttatcaaaaagggctaggtgaaagaaatctagtatttatattccttttctttgcttattttaaaagcacgagcaaagaatttaatttatgttgcgttgaggaacctgaggcacatctaggggtaaataaattacgctcaaccatagatttcattcaaaaaagcatatctgagtcaaatggattacttcaaacaattgttacaacccataacccatcgataattaacaaattaaaaattgacaatgttatagctttttccggtagtaacgcggtaagcctttctagcttcggtaccgagttaaatgattatctcagaaaaagaccaaactttgatattttaaaattaatttacgcggacaagattattctagttgaagggccatcagaagaaatactaatcagaacctacacatatctcgacaaaaaaaaccttagtgatattgaagtaattagtgtcaatcacaaaggatatagatcattcttagatatatggctacttgttaatcaacataatgctaataaaaagattggtgtcattagagattttgatgaccaaccaacagcacaagctgagcatgaaaagtatcgcgaccgccatcctaatctgtgtgtagaaacaacaattttatatacgctcgaagatgatttagtgaatcatggagacaatttgtcaaatctagcaaattattattcactacctgaagagcatattgccatatcagatcatctcaaagatgacaaaacaggcggtatgattatgctctgtgattctatggttgatgaaaaaaacccgcttcaaatagagcctccgcaacacatcaagaacatcctggaggcgatgaaatga

SEQ ID NO: 103346 - DNA, 1230 bp, Enterobacter aerogenes
atgaaaaaaccatgggaacgaagacttaaagacctttcgcacttgctagaaggttgtgcgaaaacatatttttcacccgagctctttcggttgaacctaaatcagtttttgcaaacggcaagaacaattactttcatcatacaaaaaaataaaagtgatattaaaggttatgatgagtggtatcctaagaatgtgatcgagaaatggaatggcgatcacattatgacatgggcaaaaaattctcggaatactattgaaaaagaaggcgatcttgaaatgtacagtgaagcaaaagctacactgatattttcatatcttgaaactcaagatatcgagattaaatctagccagagtttacttaagcttggtacgagtgaactagtgaaaattgcccataaaaaattcccgtcgtatataaccgatgatgcagttattaaatcggaaagacgctgggtggctaatacccttaaagattatgaattattgtatgcgttgactgttatttatagccgtatgtatgagtgttgtaggtcgttaggttttttaattggggagccaattagtgaaacaataaaaacaccaacacattacgattctcataatgatgagattagacgtgttacttatttgaagttaaaggatttatccaaaaataaaatgacatttgagattgtcgattttgatgaaaatgttatacctaacgctctcaaagaaaaggctatattaatgaagccttcaaataatattaactctactaaagaattaataggtttttcttcaaagattgctgaaatgacattcttagagtacggctttcatgttcaaactctgatgctatttgatgaaggctatcaagttattgatttaattaacacgaattttgaggatcaagctgataagtatatattttggaggtatgtggctgatagggctcatatgtataaagcttatggatttatatggatatcagagctttggcttcgaaatgctaatagtggatataataaatccatacaaagcatgcctattatcggagaacagctgcaaattgttggggttgatagagaaaattatcagagaatcatttcttgggatatagtgagagcgggtgaaaatgacatgcctactttaggtacacgaaaggagcaggagtggagtaatgggaaagcatatttcatgcgctcaattttgcaagcgataggagctgacactgatatgctaaatgattaa

SEQ ID NO: 103347 - DNA, 819 bp, Enterobacter aerogenes
atgactaaacagattatgcatcccgaccatgtcgcagaggtttgcaggcaaatcaaaaactcaaacaacagagatttcatctatgatggatttcgccaattgctaagccagctgccgatgggatttcatgatgtaaccgccacgaccgtgtggcgatcgaggaaaatcgatgtggctcacccggaagggttcgatcatgttaccgatattatttatccacccgcgcagtacgccagaaccggaaggctaaatacggaggggatgtctattttatacgcatctatcagcaatcatgggtgcttggcagaaatcggagcccagccgggggataaagtccatgtgtccgcattcaccctgaaaccagagcagagactgcattgcggctttttgggggatattgttagggcacataaatggagtagcgaggattttccacaggtacgaaagatccttgagccgtatacggaagcgcataaaaccagtattttcatgatagatagtttccttgccgaaacacttgccgatagccaagcgaaggaaaaccactacctgcataccacaacacttgctgatgtcatccgcaatgggaaaaatgcattggatgcaatcgtttatcctggggtggaatcctccggcgctaagaactatgcaatccactgcgacgcgatgtttaaattcaatattgcggatatgtacttgctagagattacccaaaagtatccctacgggctgtatgaatggcggctacttaagcaattagaaagctatgatgatggccgaattatctggaaagagccatcctgtgcaaatgtcgcatga

SEQ ID NO: 103348 - DNA, 3321 bp, Enterobacter aerogenes
atgaccaagaactctgctttgtccgatcgtattcgcattttcattggagcgcctctggagcaccagtctgaactcgattccctcaaggcagcttacgcagcgttgatgcaatcacactgctgggcctatatttttgcaaacatcaaggtttcgggccgtcagctagatctcgtaatcttcactgaaataacaacgctagttatagaagctaaagggtatacccaacctatacgaggagatatgaatggaccgtgggaacaatttggtccttatggtacgaaaaaaatcggaaacgcctatgatcaagtattaggggccaagaacgcgttgcgtgatgaaatgcaatgtgtcacaagagtcgacggatatccaaatgggcttgttgcaattatgccaaccattccggttggatcatgtgtgactctaggtgacttcaaggctgctgttggtagtgaaaagaacatagcacaaatgttgaaccagcgatcgggggcactccttacggaagaattatgtgaaacacttgccctgcgattgcgtctggaagaactcgagagcgttgatgctgcattaagtgaacagatattgacggcgacaagatcgtatgccacatacattgcggctttcgccgagttctatggcccagtagcagctaagctcctagatgatcaatatgagcatgaaggggctgccattacacttatagatgtgcaatccatggctgctggaagtgtggagggcatattgatcctagggccatcgggttgcggaaaaactctcctttcaacctcctgtgcaatttcgtgcctagacaaaatttgtattccgatcttcttttccgccaaagattttaatggccaacttcaggatattcttgatagagaggttgctctcctaaattcccgttcagcgcgtagcatcgttaacaccagtaagcttcttggtaagcggatcattcttttcattgatggatacaatgaatgccgggatgacttcaaggtcgctttgaccaggagtttgaaagcatttgcgttgcgttttggggctgggcttgtcattagtacgcagcatgaattgtctcgctcagaaattttatcaatggaaactatcattgtcatgagtccgtcagatgaactcaaagcgtcgcttgccagaatcgacgaattgggtgatcagacaggaaacagcaaggagcttcttcagattgctcaatcgggtttggaggctgaactcgttgggaaagcaggttcgttgttgactatgggcgcaagcagattcgctctatttgatgcctattcgagggtcaagctggggagctcagcaagcgaaggaattcgtgttttaagtaattttgcaggtattcttgctgcgagggcctgtttcagtctttccattcgtgagtttgacagacatggtgactccgttggccttagccgcgagacccgggatgtactgtttggctcacagattatctctttgcgtggtgaccgagtaagctttattcatgagttgttctatgcggcctttgctgcggagtctgttattcgcagtgctggtagcgatctcttccagattcaatcagctctaaattcgccacgctttcattcttcccggccattcatcattggtagtgttgaggacgaccgtttaatacaaggtattcttgatatgactaaggaccaagatctcctggcctcctgttatcagggagaatgtggagcactagcgcaatctatagtgaagcgaaggatagatgaaattctcgagggcatggttgttgaggctcaaggaatcgagtttgagctgaacagtgaggtatggggcggcgtgactgtagttggtacttcgctacgtgctgatatcagatattgtcaaagttatcttcaacctattggtcagactctaatggaagggcaatatttcgatgccgttatggctgcatgtaaatacatggacaaagccatattgaatgcggagagaaaattgtctagtgaagccaaacttaggaagatctcactccggcacgccttgttctcaggggcttatgtctttcagcgctccacggcaatctcgcaaatagtgaactttagccgtaacgggtgcttatcaaatcgcaggaagcagagtaaggggtttgaaatagtcctcaataaagcttggtcgaacgcagagactcctggccagttctatttcctgataggagtgacaaaatttacaggattcgataaggttgcaaccccctacatagtacgactgttacagaatatcactttgtatccatatcaccttcaactcgatttaatcgacttttcgcatcatctgcgtgatgtagaagctccataccgcgctgagatgatcgacgcgcttcaagcatctctcgacaagctgggtgtggtgatgaacacgatgatcattgaagcgttacatgctcttggtgccttgcaagaggaagaatttaattatcaggaggttatcaggcgggaaatcgcagaagctttaggcaatgatggacaagaagctgatcatgctgcctggggggtgttttcatgtcaattcgatcacccttttgattcatcgtactgggaagagatacagaaccttgatgatgtgcaaagaaagcgcctacttataaaggcatgtcgtggcgtagtgcaaccttatctttttttcctcagtattctcattcgacagttgtccgagttcgatgacgcttctgtggctgatgtgattgcaccatggactattttgcctgaggaaaagcacaactttcctcaagatgctatcgaagttttctttaccgcacactcatctttgggacgtctgggcgttcagcttcccgaatcacggggtgattcgtcaacaaaatcgcagcgtgctatgttggcatgcggtgagcttttctattggttaaatcgaagtgatataaaagatccgcaaaactccagtcatacttatgtggcacgtactattttgctagatcatgaggcatgtgcaagtgctggggtgctgtacctcactacgtcgcggttgatgaacgcagatggtgagcgaaaatcgttggtcaaggaatatcctgacttggcacttactatttgtcgtgagtctctaaaaaggagagagaaacaagtttcgttctacgggcatggatttcgggatgacatagcggagattgcatccttctctatccagatcttgggcagatttggaaataggggcgatcttaacgttctcagggacctttgcgatgacgaaaattttggagttggggctcttgatgccatcaaaaggattgaagctcgcacgagtttcaaacaggcttaa

SEQ ID NO: 103349 - DNA, 786 bp, Enterobacter aerogenes
atggacttattctcacggcgtcaaggtctggttcgccctgaagcagaaatcaagatcaggaatgaggctccacaggaagtacgagacgcgacgatccagattgcctatcaatgcggtctaaaaccaagtgatattaggacacttctgtgtcggatcctctttcgagctcccgacaggaacaattggtcagagtttccaaacatagatagcgaggttcaagaactaactgatgactgcgagtggttcgagatctatgacctaatcgaaatgcttgcagacgtgtgtgcacgcagaggtcaagactactctgaagagatgaaccgatttttccgctctgctggtgttggttggcaacttatcgacaatcgagtcgaaatgcgtggcaatgaagtattcgaagtcgctgtccgtcaaggtcaggtgatattgcgtgagcagaagcgaatgacggcggcaagtgagctccatgaagctttgaacgatctttcccggcgtcctcagccagaaacgaccggcgctattcagcacgccatggcagcacttgagtgtgtggctcgcgacgtgaccggaagtaaagacacactgggtcagcttgttcagcgtaatgctggcattttccctccccccatcaatcagattgttgagaaggcatgggggtacacctccaactatggtcgccacctaacggaagggcagccacctcaattcgaagaagcagagctgatggtgggcatcagtggtgttctttgccgctatctttcccgaagagtgccgagtagatcgtaa

SEQ ID NO: 103350 - DNA, 432 bp, Enterobacter aerogenes
ttggctattaaatttggcatattgccttttgatgaagaagagattatggcggctatttcatattgctatctgagtgctgttaatccgatgaaggctaaattttctgacatgtttaaaaaggaatttcttgatgaattaattaaaaatgactttgatgacattagatttattaaggcgaagaaggatgtcgtcaatgacattaatatattaaaaatggaagtgaataatacagctgtgtttgctgttgataaggattttttcaaagaaaatataacaacttcattaaaaaatgcaattgatgtgctaattaaaaataatgtgctttatgctgatgctaaaggtaaaacaacacgtcagataccctatcgtggtgagcggttggcgaggcgctattgtcttaaacgcgatgacttattgcggcttataagctag

SEQ ID NO: 103351 - DNA, 771 bp, Enterobacter aerogenes
atgagtgctggacaaaataaagcataccggcttgtcaaaatatacaatacaaataatgaaagatatgaacgcttattgattccatcatcagaaatagatgacaaacgtattttacgtaaaaggctactcgatgcgggattatcacaagaattggacgatgatgagtggagtgaaatctatataaatttacgccaaaatcctaaaaaacgagtactcctatgtgataagtcgggttacgtaaatgttgatggaaaactatgctacttaaccgttaataattatttaattgggaaatgtagcagctatgcccaattagcttatccgggttcctcagcattttcaaataatgaaagtagtcagggaacgttagaggaatggcagaaatatgtagcagtttatgttcttcatagtcctcaaatggtcttagctttgtgtagtgcttttgcgggatattgtattcattttactgaaatagaaacggggggattccacctctatgctaaaagttctaaaggcaaaagtaccaccctacttgttgctgcatcagttagggggacgaaagagctgattaagtcatggaaaatgacggaaacagcatgtgaagagatagcagcagcgcataacgataatgtccttttattgaatgaacttaaattattacataaggatgagagcaaagccgcccagttggctcagcatattatttatcagttaagtgaggaatgtggaaagcaacgagctgctgggtaccaacaatatccagtccggtag

SEQ ID NO: 103352 - DNA, 4581 bp, Enterobacter aerogenes
ttgagcaaagctggtattcaatctaataggggggatggatatcaaacgttggtagcgtttgagtgggctttgaccgtgttatccaatcctgactatcaatggttagagacagattcagtgaaatggctggttgatgacgttgtgatagggcggactgacggtacaataatttgttgtcagtgcaaaaaaaatcaaacaggatttcgagcgtggtcgttcaccgatcttaatgatgagctagaaaaggccattaaaacgcttatacaagatcctactacgacggtcagattctactcccgtaccccttttggtgaactggcagctttacaagagtttagtactaattttccagatgaaagtgcctatcatgctgctttaaaagagacaaaggtacatgaggcgacaaatagaaagctcagtgaattaattgcaaaaatatcttctaattttaatagttatgagcttttatccagaacaaaatttgttactagcgatattcatgagcgaatgagagaaacgctagaagagcgcttacaatatttggtgagtaattctgttgcagcttttaattcactttggacttgccttgattaccaagggatgcgagttactgatacgcaagataataaactgtcatcttgctcgcgtttaaccaaaaccgaccttataaatcttctttctcagtcaggttgtgttatttctcctccaacagacattcaatctatttttaattcattcagaaaaacatcatcgattggtcgttcgtggcaaagagatattggtggtcatcgcattgacactcttttagttagtgaattaattgaggctatcgaaaacaagagccattccatattagtgactggagggccgggttcagggaaaacgtgtattctacttgaattgcaggagaaattagagcaattagcgcaatctgatagtgctatgttaccgctatttattcaatcgcgagagtttgctgatttagaaactacacaggaacggcaatctctagggttagatgagcaatggattgaaaagattgcgcgtgtagctgacagctatcatgtaatagtcataattgattcactagatgtgcttgctatagctcgagaacatacggtgctaacgtattttttagctcaaatagaacagctgttattaattccaaatgttaccgtcattacggcttgcagagagtttgatagacattatgatagacgtatatctcagcgctcatgggataaagagtttaagtgccaggcattagattgggaaggtgaaatcatgccgttgcttgaaaaactctcaatagactcatcagctattgataacacaacgcgacatttaattagcaatccacgtgagttagctctatttataaatcttgctcaaagaggtggtggttttaatatagtggccagccaggcgttagctcaacgctatattgattcaattatgttgacgaatccatcgctaggtgatgaagggaaaatagcacttgaaaatatggccacggaaatgttaaagattcgtagcctgtcgataccaactcaacgatttactgcttcagatgacattcgtagaatgttacttagtcataatgttttgcatgaaactgaggataataaattaacatttgggcatcaaacgttacttgatgtattagttattagtagagcgattcgtcatggattgactttaaatgattttataaaggatctcccaccagtaccttttgtccgcccatctattcgtagttttattgcacagcttgtcaatgaaggaagacaagagtttagaaaacagttacgaacggtgcttaccggaacttatgcttttcatatacgtcgcctagttgccgagtgttttgctgagcaattacctcaagctgatgattggccaatgttacgtgatttacgtaatacgcatcgagatgttttccaagttatttatagtaaagcttcacaagttgaatggcattatttttggctaaggaatcttgttccagttttaaaaaatacgcgtgatgttgatggtataggaattcatacttaccgtatagcgcattggttaaatctagatccatcaggtgtcgttgatttttggatggaaatattaagatctgattggatagataagtcacaattgatcagtaagattgctgtttccatatcgaaaataaaggaagaacatgcatatttgatgtctcctctattgctggagctatttaaatttccacaggaagaatatagctttttaggtagaacccttgctcgttgtgttgctgtagggggtatagatgatgtggtgctttgggattacatgattgctgatgttaaagatgaagacattctatcctatcgttttggaaataagcttaagtgccgaccacacgaatttggtgataaggataataaatttctttcaaataaaatgattaattctattactttgttagagctggctatatcgacaattgaacagtggagcaaagtacgaagttctcgatatggagaagaaaataattatcgaagtggttttctaagtggaacttctcattatgatgatcgcagaatgagggattttgagcataaagatagtcaacgtgtcctgatggatgctttagaagtagctattattcatcatgctgatatcaattctgagtggtggcaaaacaatcgtgagcgtttatgttttaatctagaaggttcacttcgttactttgcattgttagcatgtattaattctccgctaactaatcttgacatatcctctcgtttgctgtcgaaagcagatttattagagtctgagctttcatatgaattgggaactttagttcagaaagtttttatccatttgagttcagaatcccaagacgcaatacagattataatacttgctctttctcagagatatgctgatctccctgagtataggcaatatatgcttaaagctcaggtcaagtttattatttgtataccgtgctatttacgttcaccgtcatgtgtaagtattttagatgaatatatccgttcaaactggccacttgaacataaaccagatgttaatgggtggtgcggaattgtaagagctccgttctcatatgaagtttttaatgagctcagtaatgaaggcattctcagtcttcttgagcactataatgggtataggcgagactcatttagcgacatgttaattggtggagaggagcaagttgctcaacaactgagtgaggcatcttcaagggatccattacgatttttgagttttttatcttcttactggcaggatataaatgaagaattccgaaatcatattatggatggtattgcacattatttgaattatcgttatggaaaccttcgcccaaataatgactggaaaccgattaatgaacctaatattgatgttttagttagcaatactttagatgaattggagcgacattctgtttattggaggcaaaacagctctgcttctgaagtgctacaaggatgctcacatgtagtaaaagatatcaataatgcgaaaagaataacttttttatctattccctatttagcagtggaagaaagagatcctatctcaggagatggtgtcacttttattggtataggtattaatatgattcgagggcatatcgctgatgctcttatggttatggcaataaaattatacgaggaacatatctcttggcctgaattactgttaccgacactacatcaatttgctactaacgatcatcctgcggtgagggctgtagtattacgccgtttacctcatttacagcatattttacctgaagttggttgggggatttttgagttaataatgcggaaaggtagtgaaggactttgggatatggcagaaccttgtctctattatacctatcataatgagtttaacagagtttccccatggttaaacaagattgtatctgaaagtattaaagatggattgcaagcatggggaagaatatctgcattagccgtattgtcagaaaaaatagaaaattgtgaatttatcaaacaattaaaagaattaagtgatagtgatgcatgggaaggtgctatcgatgtttggacacatcgtgagaattttcaacggcatcaggatttatgtcttgctggtttgtccactgcgttaagtgatgataatcaatatgcctcaacattaataggggcgatgggcagcatttttagagaaaaggagcctgtcattattttacctatgcaaatgttagagcgttatttttcattagtatctacgagttctgaagcatcgagaattggcttattcaattttggcgcatggctaaatattgtttcatacatagatcctttgtatgcattgaaggctacggagatttatcttgaatatgttcgtacaacaaaagcctatttgcatgaccataataataatttaatgcagttattgacccgtttatttgcacaagcagaagagaaggaagagtcggatggtggagaaatgctacatcgggtagttgctttgcaagacactatgttggctttaggtgttgatggggtgaatacatggttagaggctgccgagagagtatag

SEQ ID NO: 103353 - DNA, 399 bp, Enterobacter aerogenes
atgttgcttttcaaagaaaaaataaaaccattgcttgtcgctatccccctgataatgtgtttgccgcaaagcgcagtagccagagacctcgccggatgtagtatcaagaaacagaaaattcaaacacaaatccgttatgccaaagagcatcataataattaccgggttgctggcctggagagagcactcagaagagtagaagcgaactgtagcgatgaatctctgcgctgggaacatgaacaaaaaatcagagaaaaacagcaaaaagtcagtgagcgagaatttgaacttaaagaagccaaacgtagcggggatccgaaggacgtgaacaaaaagctaaaaaaacttaaccaggctcgagaagaactcgccgagtatcagcagtcgctttatccataa

SEQ ID NO: 103354 - DNA, 684 bp, Enterobacter aerogenes
ttgaaaagttttttttcactgttaattctatctacttccataatcttattttctagcaacttctgttttgctggcggggtcggacttggggtaacccgtttaatttatccctctgatgccaggcagttatctctctcagtcagaaatacagacgagaatatggcgtttctgattcaaccctggacggaagactatcagggtaaccgaaccagcgactttatgatcactccgccactctccgtgctaaagccgaagagtgaaaagcttctgcgtataatatacgcgggtccggagttaccgacagataaagaaagccttttctggttgacggtaaaagcggtgcctcctgtaaacgaagagaaacaaggtaatacattgcaattggcatcggctaatcgcattaaactattttatcgtccgcagaccttaacgataaggccgcaagatgcaccagcaatgttaagcgctaaaaaaaatggtaacgaaatcgaatttgctaacccttcgccctattttttgaccattgtaaatataaccgtcaatggacgtaatttaaatccactaatggttccgccccagcaaagcattaaaattaaaaatggcgcaacaccaggtggaataataaagtttcagacaattaatgactatggtgctcaaaccaaaccaataacgttgcatttctaa

SEQ ID NO: 103355 - DNA, 1299 bp, Enterobacter aerogenes
atgctgctgctgtttttagtcatgaaggcgcgtatgcacgccttcgtggctttgatggtggtttctattggcgcaggtctcttttccggtatgccgctggataaaatcgcggcgacgatggaaaaagggatgggcggcacgctgggcttcctggcgatagtcgtcgcgctgggcgcgatgttcggtaaaattttgcatgaaaccggcgcggtcgaccagattgcggtgaaaatgctgaagtccttcggccacaaccgcgcgcactatgcgattggccttgctggccttatctgcgcgttaccgctgttcttcgaagtggcgatcgtattgctgattagcgtcgcgttctccatggcgcgccataccggcactaaccttgtgaagctggtgatcccgctgtttgccggcgtagccgccgccgcggcattcctgctgccggggcctgcgccgatgctgctggcttcgcagatgcacgccgatttcggctggatgatcctgattggcctctgcgccgctattccggggatgattatcgccggcccgctgtggggcaacttcatcagccgctatgttgagctgcacattcctgacgatatcagcgaaccgcatctcggcgaaggcaaaatgccgtccttcggctttagcctctcgctgatcctgctgccgctggtgctggtcggcctgaaaaccatcgccgcgcgctttgtgccggtgggatccaccgcctatgaatggttcgagtttatcggccacccattcaccgcgattctggttgcctgtctggtagcgatttacggcctggcggtacgtcaggggatggcgaaagatcgcgtcatggagatctgcggcgcggcgctgcagccggcgggtattattctgctggtgattggcgcaggcggcgtcttcaagcaggtgctggtggactccggcgtcggcccggcgctcggcgaagcgctgactggcctgggtctgccgattgcgattacctgcttcgtgctggcggctgccgtgcgtattattcagggctccgcgaccgtggcgtgtctgacggcggtcggcctggtaatgccggtcattgagcaactgaactacagcggcgcgcaaatggcggctctctccatctgtatcgcgggtggttcgattgtggtgagccacgtgaacgatgccggcttctggctgttcggtaagttcaccggcgccagcgaagcgcagacgttgaaaacctggacgatgatggaaaccatccttggcaccaccggcgccattgtcgggatgattgccttccagctgctgagctaa

SEQ ID NO: 103356 - DNA, 984 bp, Enterobacter aerogenes
atgccaactttaagaaaactcccttccggtaagtatcaagcgatagtcagaaaacaaggctaccctactcaatacaaaacatttgctaaaagaagagatgctcttacatgggctatcagcgcagagcaacgcctacaagacatagaacttataggctcagacaatgactggatgaagcaaaccctatctgatgccatagatttatatgttaatgaaaagggtcaatttcttaagtcttacatgacctctgatagatacagagcagaggctctaagaaaagccctaggggttgtacatctagcagacatatcaccttcgatgattcaggcttataaagataaacgcctatcactagtttcagaaggaacagcccgagctgacctagcttatttacaacgggtgattaacttcttgcgaaaagataagcaaatgtcactacctgacttattcagccatgtaaggcttcccgctaatggtaaacctagagaggccatccctgaccgacagcaacttgaaaagctactatcactcatgccagaagacacaaggccagtagcagcccttgcagctgaaacaggaatgagaagaggcgaaatccttagacttatggtaaaggatgtaaacctttctggtagatgtctgagaattaatgaatcaaagaatggctcatcaagggtcattcccttgagcacaaaggcatgtcagctacttgcagaggcactgtccagatgcaggggcggggttacggctaaattgttccagctctctccttacagagtttctcgcacattcagagaagcagctgatagcatcggtggctttgactgggttttccattctatgaggcactatgcttgcactcgcttctttgaaattggcctacaggcaatagaggtagcagcgattagcgggcataaagatatgagaatgctacagcgttatacccacctatcccctactaccttagcccttaagcttgggtag

SEQ ID NO: 103357 - DNA, 960 bp, Enterobacter aerogenes
atgactacaaagagcaacactactattattacaagcagcatgattagacttcttgtttcaactaaccggaaacaattagttgagggcaatcttaaggatgtagacagttatacagcagcagcaagtatgcttcctctggaggtgtgggcttatgaagacgattctttcaataagctacgtaatgaagtagacctgattcagaagacaggaaagagtagctacgacaaagatttcctcccatcaatgaaggggtacacctgctttgctcaatatattatagattgctggaatacgctctcttctatgaaaggttacaacaaagctaaagttttgtccgatgtagtggataataatatcatttggcttatggttcgttattgtgagttgcctaagttagttgaggcaatagcttctcataaattccgggatacaacagatattcaaaagttgaatgagcttgtattcccatcatctgaaagacgactaaagattattacagctttgaaagaagctaaaggctaccgtgatttaattaaaattactcatgcgcttgtgttatctgatgaagagctatcaaccaactttgagcaactaaccaaaattgatttatctattccgtatatggctacatggtctgcatggttatatgatgaagaaggtaatcgagtacgtaaattgcaggattatagccagcctttaacctcttataatgtgctaaatcttattgattcatcgcctaatgatgcagtacgttcagctattcatgtaatgaacatgcaatcactaacgaaactcacaaatcataagatgatggaatcagatattaaattacaacagcaactcaaaagtgatgaagctaaagcatctattgaagagagtgagcgtaaggctgttatcactaagaaagttggtgatggtgttgcaacttatgatgaacttcaagaatatttatcatggtga

SEQ ID NO: 103358 - DNA, 312 bp, Enterobacter aerogenes
atgattaaaaaggctttaattcctgggtttgctggtagatacatggtaagtgaggatggaaaggtatatgaccttaagcgtaataaagtattaaaagctcattacaatatccgaaaaactttatcagtaaaactaagtaggccggaaggtggtcaaactaccaaaacactaacagggcttattggcgctgcttttgttgataatcctaagggttataaatttactaagcttaagtgcgcatcacttggttaccatgcagataatattgtattcgttgtaaatcaagattccccagtatctatgaatgcgtaa

SEQ ID NO: 103359 - DNA, 618 bp, Enterobacter aerogenes
atgactacccgtgtatacgcttaccttcgagcttctaccaaagaacaagatgctaatcgtgcttctgaggctgtttacgctttcgccgctgataaaggcttaaaggtctctactgcgtttatagagaatgaaagcggggcaagcctcaaacgtcctgagttgttccgtcttctggaagttgctcaagagggtgatattctgctggtggagcaggtagaccgcttaagccgcttaaactctgaggactggcagaagctcagaggaacaatacaagctaaggggatacgtgttgttgccttagatttgcctacatcacatatgcttattcagacgggtgatgaattcaccagccgtatgctagatgcagttaatggcatgatgctagatatgctggctgctatagctcgcaaggattatgaggatagaaagcgccgtcaggctgagggcattaaagcagctaaagagacaggcgcttacaaggggcggcaggttaatcataagctccacgagcaggtgaaagccctgtatgcagcaggtaagaacaagagtgagattcataggctcacaggtgctgccagaactactattaacacaatcctatctgccccttcagactga

SEQ ID NO: 103360 - DNA, 747 bp, Enterobacter aerogenes
atgaactcttttttatcatccactgctaattgtcttgttcgttggcacgacttccctgggacgggagcgccgatgctctttgttcatggattaggttgtgcttcctcctacgaatatccacgcgttgtgacagaccctctttttggtggcagaagggctattctcattgatttacctggctgcgggtatagccaaaagcctagggattatagttactcaatttctgatcaggccagcgtggtagccgagttagtggtgcatctggggatcgagcactgctatctctatgggcacagtatggggggcagtatcagtatcgaagcggctggtttacttgaaaagtacttgttgggcttggtcatatccgagcctaattttcatcccggaggcggttttttcagtaaaaagatttgtagctacggcgaggatgaattcattggcagcgggtggcaagaaatggtagcacaggactctactccttggtcagccagcttagatgctgatgctccgtgggcggtatggcgtggagctgcgaaccttatatcaggcaataactggagggatttatttattcaacttcctattaagaaacagctgatattcggtgagtattctctacctgataatgacttcgcctatctaactgcctctgatatatcaacggttattttacccgcatgtgggcactgtatgtcatgggaaaatcctggggcgcttgcagggtcattatcacaattttgtaaataa

SEQ ID NO: 103361 - DNA, 684 bp, Enterobacter aerogenes
atggatagtaatgaacttagccaactaataaagttacaaattgctagtaaacctccggaagaagaaatatctaggggatcttttactaacaactacaccgggcaaaacgaaaatttcagaataacctttggctgggatatttttacggcttactcctgcgatataaaatggaaagctttcagattacagttagctgcatatttggatacgctatctgaagatgaaagagcagaagaagaaaagaagattcaaagcgaagatgatcattgggaatggtttaataaatcactgttactaaaaagtgatgagtataaatggttctttcttagagtcgatgatgagatacaggctgcttgcttaatctaccatcctaagcaatcggtactttctactcagaaactcttttatgttgaatttatagctgtagccccttggaatcgatatcattcactgggtgataaaaaattctcaggagtaggcactgtattcttaaaggaaataatgagacattgtaaggatgttttaaaatttcaaccgggaatgtgcttacattctttaccgcaagcacaaagtttttatgagcataaacttaaaatgatccactatgttcaggcagataaagatggcttgtggtactatgaaatgcatgaggataaatatcttgactttgtgagggctatataa

SEQ ID NO: 103362 - DNA, 858 bp, Enterobacter aerogenes
atggttaatgatgatgagctttttttaggccgttatagttctaacgatttcagtggtttttatttagagtataaagagtttatcgatagactgaatactgctccggcaaacgtcagaaagcagtttatgcatgatgataaaacttatgattataataagcttgcagtgctttttaatagttataaggacaaaaatagtcagattctattcaggaagtctgataaagcgaaagactttattattgatctttggttatgtaaggtaaggaacaaagttcgtgttcttgaaatgctttcattacccacttataataaagttgatgaggcaattgcttctgaaatattgaagattagttcagagaaaaatggacatattaaaatttcagccgaactaattaagctagggatattggttgtttttgaagagtcttttcctggactcaatcttgatggggctgtatacacaaataaacaaggtaatcctataatcgctttaagtctccgtcacaatcgagcagataacttttggtttactttagcacatgagttggcccatattattcttcattatgataacttaaatgaagtaataattgatgatatagatgagtctattgcacatactcaaggaaaagaattcgaagcgaataagttagctggggaattgttaatacctagaagaatttggcgaagttgtcctgtaaaatattcaaactcaacatttgaggttgaacagtttgcggatgaagtaaatattcacccagcgataatagctggaaggattagaagagaaagagctaactatacaatatttacggatttaatttataaagaagatttacgaaaggacttgttttaa

SEQ ID NO: 103363 - DNA, 861 bp, Enterobacter aerogenes
atggataattatgatgttgaggatactataaagtacaatggggcatataattatgtcggtattattgatactttcggccctctaggaatgatctcggttataggtttagataggcatcctgaccatctatcggctattaaaaatggcttgactaatggttcccttattgtaaatagagttgccgtaagattaacacaagatgattttgaatgttatgcactatgtcgaacctcattaattaatttattaagagaactatattcgctatttgatgatgttgatgttgttttcgattgtaggatttgtaaggaaaattcatcaattatcttgcattcacaaataatggaatttttagtttcacttaaaaatgatgggatctatttttctaaaactattgtaactggttcaactattcccgcatctatatctgacataattcaaacaagagatgaaaaagaagtaattagagaggaggttttgatttatgaaaatgttttattaaaatctttagaggtagatgcggttatatatttaggagattatacttgcgtcagtcctgaatattcagatgttgaattgtttgatgaggatatggataatgttacaacagctaaattaatttatccattcgataaaaaaattattttaattcgcggtggaaagttcaaaaccgatagaggggaattaggtaaattggcaaaaaaactaatcgccaaaacgacgatttatcgaggcaagccttattctactggtgacggttatttacatgacaaggctaataatataggaaagccagcaactgcatcaactatagtccctcatttagtcaatctacatctggtttatatgtttaataaatga

SEQ ID NO: 103364 - DNA, 171 bp, Enterobacter aerogenes
atgtctctcatggatgattatggcctacatctaaaaaaatcggaaatgaacagaacaaatatttctagagaaatatccttaaaaattaataaaaaggaactgaacgaaaaaatcagttccttacttgaaaaaagaaagagttcatttattaaacatataaaccagatgtag

SEQ ID NO: 103365 - DNA, 207 bp, Enterobacter aerogenes
gtgaacacgtttgtggttctaggtattgccctgcctgcgcagcagctggaacagcttcttaaaaccgtagcgcggatagtgttctgccagttcagtcagcgcatggatcaccggttcatcacgccgggtaataaatacaccgtcctgctcagcgataacgtcctgcaggactggcgtaaactcatggcaaattgtgccgtcagatag

SEQ ID NO: 103366 - DNA, 480 bp, Enterobacter aerogenes
atgcacgacgcgctggtctgcggcagacgcttcccgacctttaatgcggtggatgattttaaccgtgaagcactggcgatagaaatcgacctgaatatcccggttcagcgagtcatccgggtgctggacaggatcgtggcaaaccgcggctacccgctgaaaatgcggatggacaacgggccagaactggtctcgctggcgctggcacaatgggccgaagaacatggcgtacagctcgaatttatcaagtcgggtaagccgacacaaaatgcttttatcgaacggtttaaccggacataccggacagaaatcctggatttttacctgttcagaacactgaatgaagcatgggaaattaccgagagctggctgatggaatataacaacgagcggcctcatgaatccctgattaacctgacgccggatgaataccggctgatggctgaaaacccggagctctcaaaaagtgcgtggaactaa

SEQ ID NO: 103367 - DNA, 1965 bp, Enterobacter aerogenes
gtgttttttcaggagtggattgataaagtagagcttgaaccagctttgaatgttctcaaaatttcagcactttactataatcgcttatctgaacaatctgaagatgattatacgtgttattttggtcaatgtatctatctgcttttagtccgttttccttctcattgtgatgagattttaaagatggagaaggactgccgtactattcatgtggcatataatgatttttttagacgcattagggttatgaatgaacgtttttacaggaaagaggaatataagcttagtgcatttttaattttttctgaaataagcttgagtgttatgcgctcactccttgatgatataccaagcagtcggcttgaatcaatttttcccatcatatttagaatgcatggacttccactgtcggaagatgtcactccacataatgtaaaatcaatcagtatgatatttgaccaagtgtgcagttatactggtaacatatttaaagagttacggcattctaattttcttgaaattgaacatcattgttcagaggaaacagtaaaaaatgcatgtggttggataaaagaatgggacgattacgattcacttaatcgtatcagtgatcttttccggttttgtaatgcaaaggttaactatttagatttaaataacatctccatagaagtgaatgaggattgtatttataaggattatgaggttgcacgctcaagatttaccatgaggggtacgggggtctattatgaaattcagaggattttggaagaaaatcctaatttcattgagcaactgaagtcgatagttcctgagtggattaatgaaaacgattttttccccatcgcctattttagtgaaatggaaaatatgtcaccggaggatttatatattgagtatgggggagttaatatttatgcatggatacatgcatatggaatattagtggcgatagcgaaacaggagatggttgaacgtttccgcagaacaacgcctgggaaattacgacttaaagattgggttatttatcatactcgtgatgaatggatacgactttttgttgagggcggcctttgttgggttactgcggcattagtcactgattactttacatttgatgataaagctttagatataaatgattgcccgttactacaatgtaacgatggtctttgtatgttgccttccattgtttcaatgagttgtgtgactcgctccctattatcactttttagtgccaaaaatatttcaatcgatgataagggaaaagttcacgaacgagagtttattcagaaggtcaggaattctaaaatttgtgctgctcaactttcagtacgaaaagattatgactgtgactgcgcaatggtgattcaagatcatttattttttgttgagttgaaatctaatggacatccggtacattttaatcgctattaccagacgcttgtgaatattaatggtggtaatgttgcacagaaaactaaaacctcttggattaaacaagtgacacgatatgctaattattattctactcaattagaattggtccgaaatgctctaggtttacccgcgggatggaagccaaagtgttttcataaaatgattgtcaccacctcggtgtttggggggatttatcatcaagaggggtgctttgttgtcgataaaactgcattttatagctttattgagcgtatggtgagtgtaactaccgaagtgaaaaatggaatgcgtacacagataattcctgaaagtgatcgtttttaccatggtgagattactattgaaaaaatgcttggcttcttgaatgaattaccatctattactgcaaagcgtcgaagagtaaagcagcttgcatataatgtccagtgtggagacataaaattctcttatccgttttttgatatatggcctgcttttgaaactgtactaaaggaagatggtacagaagctgttgcaatattatag

SEQ ID NO: 103368 - DNA, 858 bp, Enterobacter aerogenes
atgatggagagaatgccttcaaaaaaatttatcattggaattccgatattcaccatgaaagcaaaaaaggattcactgtatttatcagcctttaaaaagatagttgattggtatcgttttggcagtcctgactggagtgttcaagatgaactgttgtccatccaaagcataccaaaactatttgagtattactctttattctacattaaagctgttttagaaaaaaaatatatttctaagtcagtaatagaaccaactagtgagacactatcatttagttttaacttcaaaaaagatcttactttaaatttattgtatgagcctaaatattggatggcaaaacattcattggctgatttaagaggacttgttaatactgaaggttggaccatttacaacggtaaagtatcaaagcgttctagctcaggaagattctcaaataggtctccagatttcgttataaaaataagtaattcttttgataacgaaaaatttattattttagatgctaaatatacatattcagataaagcatttgtccactacttacctgatttgacgcttaagtacttacatggacttggttcaatttcaaatactcaaaatcaaatatccggcttaatgattttaaaccctgatgaaagatctcaagtacgagattttcacaatagcacttttgatattttttccgaaacgcctgcgatgccatttttattatgtgcttcaatagctccgggtgatgaatttattgacaataataaattcgaacattccctaatgaaaataattgatcttactatcgagaattttaaagaaaggaataaagaaatattttctctcaaagctattcgagcgtaa

SEQ ID NO: 103369 - DNA, 669 bp, Enterobacter aerogenes
atgttagaggctcaaattaaagatcagaacaagctctttaattttcaaccaatagaagtattggctaaaaaaataaatgctgagagagtagataaaatgctttcatttttagcagaaagtgacagtgaggcattgtattctttttttagagtcacccgccgtaaagctggctacaaacatggcgatactccagttgaaatattacttgaacaaatagaaaatactacagaaaagactttagctctgataaaaaaaatcatcactcgaccaattactaaattagctactcgagaaaaatatgtttatccagacaacagtactaatgttgatgatttaacgttttcgtggctttgccataacgttgatgaactatttgagactgacaatatagacaatgcaattttagaagataacaatagattttatggcgcaagaaaattaattgaataccaagcaacagagaatactgacgtctacgaaaatcaggtattacatggtttcataaatactttaatccaaactgcatctacactattatctggttttgaaaattctgaaagaaaaaatcataaagttaatggtacaccttcaggttacattagtttttttagtcaaatacacaaatttcataaaagcattaacgatagaaaggtattaaaagacttatga

SEQ ID NO: 103370 - DNA, 1068 bp, Enterobacter aerogenes
atgggaaaaaactcccctggtggggtagcaaccccggctaatattggtattgacgctgcctctggtgaatatatcggttttgctgatggggatgatttgtatgatcccacaatgtttgaaaaactttatctttcagcaactcttaatcatgctgatgttgcaatgtgcgattttcttgaatttgaaacagaaactggacttaaaaatgccccgttcgaaccggcctggaagactgtttcccaactaaattcgttagacatccgaagtgcaaacaataagaaaaaaattcttgacctcttacctgttccgtggcggaaaatttataaacaagaacttttaaaggataacgaaatacgtttccctgtaggtgattatttctttgaggataatggatttcattggtttactacactaaatgccgaacgaatttgctttgttaatgaagttctttgctatcatcgaagaaatcgtgctgggcaaaccatgtcttcaggtggagagcggttattaggtgttttccatcagcatagtgttatttatgattatttatcacagaaacaattattgagtgaatatagagattactctcttaactggttgataggtcatttatcatggattcaacaggtcctggatccgcagtattcagataaattttatgatgtgatgaaagggcatattgaaaaatacactgttgcggaggttcaattatacctttctaaaaaatattatgatcggcaaagtattgagttagttgtttgcttactgaggaagaataaatctctattcattgaggtaatgaaaggaaaaatatcttcatcatttattgagaaagttgcttttaattattataagctaggcctggttaattttttactaatgttcggacgacattccaaatttaagttaaaaaataaattttgtcataaacttgtatcgaattcagaaattaaaagattattgattgagcataataataaattggagcatttacacaatcgtatcaatgatcttgaacgtataattgaaactggatttatccttacagaaaaaaataataaaaagtaa

SEQ ID NO: 103371 - DNA, 510 bp, Enterobacter aerogenes
  misc_feature (367)..(376): n is a, c, g, or t
atgacgtatttcatgaggaatattgtttctagtgtatcgctggcattatccgattttattagttttattatctcattatatatatcactagctgtattatcttttgtactgactgatttcgatgctagagtaccaacaagagaattagaaagttggctgtatttacactggttattaggtctgtgttgtgtcatatggtatggaatacgtttacgacactatttttacagaaaaaccttttggtttgaacttaaagaaatcctcagaacattactcatttttgcaataattgaattagcagtaatggcgtttgcaaaatggtatttctcgagatatgtatggcttcttacctggatgattacagctnnnnnnnnnnattacagctatcgcagtaccgtttgcgagaattggtacaaaatggttaatggatcgcttaggcctctggcaacgcgaaacatggattattggttgtggaaaaaatgcgaaagatgcatatttagcaatcaatag

SEQ ID NO: 103372 - DNA, 807 bp, Enterobacter aerogenes
atgcaatttattgtggctgttgaatctgatcaaggggatattcgtaattattggctaaggcaattgatgataaagggatatagatatgtatcagtgatccctacattacgaggtgtgcccctggatagcaccgatatgtcatttattttcagccatgaagtcatgatatttcgtgtgcaacataaccttgcaaaatggtcgtctagatttattaaaagaacatttgatatattggcatcaattggaataattgtgctgctttcgcccctattattgtatatatcattaaaggtaaaaaaagatggtggtccggcgatatatggacatgaacgcgttggtaaaaatggaaaagcttttaaatgtctaaaatttcgttcaatggttattaattcgaaagaagttttagatcaggtgctgcaatctgatccagaagccagaaaggaatgggacgcaacatttaaattaaaaaatgatcctcgtataacaccgattggccaatttttacgtcgaactagtctggatgaattgccacagttatttaatgtgttaaaaggtgagatgagtttggtagggccgcgaccgattattactgctgaacttgagcggtataatgaagaggtagattattatttgttaagtaaacctggtatgacgggattatggcaagtaagtggtcgtagtgatattgattatgatacaagagtatatcttgatgcatggtatgtaaaaaactggtctatgtggaatgatttagcgatactatttaaaacggtcggtgttgtgctaaaaaaagatggtgcatattaa

SEQ ID NO: 103373 - DNA, 123 bp, Enterobacter aerogenes
atgctaaatatttcaacgcaagacctcatgttagtggaattgtttattatctttaagctggaagtaatgttcctcatctcgatgcgaaaagattttcgctggatgaccaccaacaatagataa

SEQ ID NO: 103374 - DNA, 402 bp, Enterobacter aerogenes; identical to SEQ ID NO: 16839

SEQ ID NO: 103375 - DNA, 462 bp, Enterobacter aerogenes
atggtacggaccgttgatattgttatcgttttgcaaccgtttgggtccgggaaaaacacgtgttttgtgttaattcagagcacattgcgctcccgatattttttctgcgttatggctctcatggcgcagggagcgcacagagggcggccagtcgccgccgccctctgtactcccgggctctggccgccaaaatcgccacttcgtggtgccttcgacttatcccggcaggcttcgggtcgggccgaggcagcgtccgtgcaaaacacggccctcagcccgcatccatgcgggctgccccggcctgccgggaacgtctcagcgattttgaggccaccaacctcggcagtttcagccaccatggtgaataaattaacggcgggccccacgaacggtaggccggataaggcgcagccgccatccggcgcaaagctgctccttatccgcggatgttgcccggcgtag

SEQ ID NO: 103376 - DNA, 627 bp, Enterobacter aerogenes
atgtctctcatagcgcagggagcgcacagagggcggccagtcgccgccgccctctgtactcccgggctctggccgccaaaatcgccacttcgtggttccttcgacttatcccggcaggcttcgggtcgggccgaggcagagtccctgcaaatcacggccctcagcccgcatccatgcgggctgccccggccttccgggaacgtctcagcgattttgaggctatcagcaccggcagtttcatccagcgtggtgaagaaattaaaggctggtcgcacgaacggtaggccggataaggcgcagccgccatccggcaaaaaagccaatgtattctttgtcagcaataaaaaaactgcaccttacttcgttgggtatccaactttttgggtgcagttcatttcggtgtttttttttgctgctctcaggccaccttttagaaggtggcttgcattagaacaactcgtgggtttcgccaccgctatcggtaatggtggtgccaacttcgcgcaccgcctgatgggtaggctgcgtgccctcgatgaagtactcggcgcggctgttgccgccgttagccagttgacctgtgctgcggtcgatattcaccgtcacaatacccggcggcggcgttaa

SEQ ID NO: 103377 - DNA, 4065 bp, Enterobacter aerogenes
atgcggcgactggtaattatcggcaacggtatggcggcaacccggctggcagagaagctggcggcgcgcgcgcaggggcgtttcatcatcacgcttatcggcgatgaaccgcagccggcctacaaccgcattcagctctcgccggtactcggcggggaaaaaacggcggcgcaaatccaactgctgccgacggagtggtacgcccagcatggtgtccgcgtgcggcttggcgaggcggtcagcgaagtggatgtcgcggggcggaggctacgcgtcggcggcgtctggctggaatgggatgaactggtgttcgccaccgggtcgcagccgtttatcccgtcgctgccgggtattgagcgcccgcaggtattcgcctttcgcaccctggcggatgttaaagacatcctggcaatccccggcccggcggtggtaatcggcggtggcgtattgggcgtggaggtcgcggcggcgctgcgccgtcacggtggggaagtgacgctactccatcgcggtagcggtttgatggagccgcttaccgatgcttttgccgcggaacagttaaaacaacagcttgaggcacgcggcatccactgcgagttggagagccgaattgccgctattgacgagcagcatgtgcggctggaggacgggcgcgcttttgccgccagccgggtggtgttggccaccggagtgcggccggatatccgtctggcggcgcgcagcggcgtagcctgccagcgggggattatcgtcgaccgccggatggcgacctcgctgccggggatcagcgctatcggcgagtgttgtgagattgacggccaaacctgggggctggtggctccctgcttgcgccaggccgatgtgttagttgaacgcctgtgcggggctcccggcgaagaattcagctggcaggacagcggcacccggctgaaggtcaccggtatcgagttttttagcgccggcgaacagcgggccggcgagcaggaccagatctacagcagttgggaccccatcgatcgccactaccgtcgcctgctgatccgcgatggccggttgcacggcgtgctgctgctgggcgactgccagcaggcggcgccgcttaccgcgcagctcggcagcgataggtctccttcagcggagtggctttttgacccttctataacgcagccgcgggctgcaggaaaaatgacgatgactaaacctgtattagtgctggtcggacacggtatggtcggccaccattttcttgagcaatgcgtgagccggaacctgcaccagcagtaccgtatcgtggtctttggcgaagagcgctatgccgcctatgaccgggttcatctctcggaatatttcgccgggcgcagcgcagagtcgctatcgctggtagagggagacttttttagccagtacgggattgagctgcggccaggagagacgatcgcggaaatcgatcgtccggcgcgaatcgtgcgcgatgcccacggccatgaaacccattgggataagctggtgctggcgaccggctcctatcccttcgtgccgccaatccccggtaacgatgaagaaggctgcttcgtctatcgtacgcttgacgatcttgaccgcattgccgcccgcgccgccactgcgcagagcggggtggtcatcggaggcgggctgttggggctggaagccgccaacgcgttaaaacagttagggcttaagacccatgtggtggagttcgccgccaatctgatggcggtgcagctggataacggcggcgcggcgatgctgcgggagaaaattctcgatctagaggttggcgtgcacaccagcaaagcgacaacggcgatagtgcgcaccgccgacgggctgcagcttaacttcgccgatggcggcacgctgcagaccgatatggtggtcttttccgccgggatccgcccgcaggatgcgctggcgcgcggcgcaggcctggcaatcggcgaacgcggcggtatcggtatcgatgaccactgccggacctcggacgcagatatattggcgattggcgaatgcgcgctgtgggacaacaaaatttatggcctggtggcgccgggctaccacatggcgcgcaccgcggcggcgcagttggccggcgaaaccgcccgctttagcggcgccgatatgagcaccaaactcaaactgctcggcgtggatgtagcgtcgtttggcgatgctcacggacgtacagctggttgccagagctatcaatggaccgatggtccgcggcagatctacaaaaagatcgttgtcagcgctgatggcaaaacgctgctgggcggcgtattggtgggcgatgccggtgactacgcgacgctgttgcagatgatgctgaacggcatggcgctaccgtctcgtccggaaagtctgatcctcccggccatggatggggccacgacgaaagcgctgggggtggcggcgctgccggatagcgcgcagatttgctcttgccataacgtcagtaagggagacatttgccaggcggtcagcgccggagcgggcgatatggcggcgataaaaagctgcactaaagcggcgaccggctgcggaggctgtagcgcgctggtcaaacaggtgatggaacaccagcttaccgggcagggcgtcgaggttaaaaaagatatctgcgagcattttccgtggtcgcggcaggagatctatcatctggtacgagtcaaccacatccataccttcgatcagctcattagccgttacgggcagggccacggctgtgaagtgtgtaaaccgctggtggcgtcggtactggcctcctgctggaatgagtatctgctgaaaccggcgcatttgccgctgcaggacaccaacgatcgctacttcgccaatattcagaaagacggcacttactcggtggtgccgcggatggccgcaggcgaagtgacaccggatgggcttatcgctatcggccagatcgccaaacgttaccagctgtacagtaaagtgaccggaggacagcgtatcgacctgtttggcgcgcggctggagcaactgccggacatctggcgcgagctggcggcggcgggatttgaaaccggacacgcctacggcaaatcattacgcacggtaaaatcctgcgtcggctcgacctggtgccgctatggggttcaggattcaacggggctggcggtaaggcttgaacatcgttacaaggggctgcgcgcgccgcacaaaatcaaaatggcggtctcgggctgtacccgcgaatgtgccgaagcgcaaggtaaagacatcggggttattgcgactgaaaagggctggaatctttacgtctgcggcaacggcgggatgaaaccgcgccatgcggacctctttgcgagtgaccttgatgacgccagcctaatccgtaccgtcgatcggttgttgatgttttatattcgcaccgccgaccgcctgcagcgcaccagtagctggatggataaccttgaaggcggcgtggcgtatctacgcgaggtgatcttgcacgatagtctcggtatcggcgatgagctggagcaggagatggcgcgggtggtggatagctaccagtgcgaatggcagaccaccctgaacgacccacagcggctggcgctatttcgttcctacgttaacagcgatgaggccgatgaggcggtgcagcggcatatcctgcgcggtcagccgcagctggtggcgccgcaagggcttgggcaaccggccctgccgtcgcggccgtggcaggcgatctgcgatctggacgcgatcccgccgcaggcggggatcggcgcgcgcctcggcgagcggcagattgcgctgttccgcttcggcgagcaagtttacgcgctggataaccaggaacccggcagcgaggccaacgtgttatcgcgcggcattttaggcgacgcgggcggcgagccgatcgttatttcgccgctgtataaacagcggattcgcttgcgagatggtcgcttgtacgacagcggcgagccgttggtgcgcgcgtggccggtgaagatcgaacagggcaaagtgtgggtcggcaaccaggcattgctgctgcgcgcggaggcgagctga

SEQ ID NO: 103378 - DNA, 351 bp, Enterobacter aerogenes
atgccatttatcgcacaagatagagtgcatttatcgcgcggcgcatcaattacccgcaccacccttggtcatttctttaagcgcaagcgctttaatttttccactgatactaacggcggcgagcgggcgatggtaccgatcggcaactatgagcgggtaatgccgctggatattctgccgaccatattgctgcgcgatctgcttgccggcgatagcgatagcgcccaggcgctgggctgtctggagctggatgaagaagatctggcgctttgcacctacgtttgtccgggcaaatatgaatacggcccggcgctgcgcagcgtgttaacccagattgagcaggaaggataa

SEQ ID NO: 103379 - DNA, 573 bp, Enterobacter aerogenes
atgctgattggctacatacgtgtgtcaacaaatgaccaaaacacagatttgcaacgcaatgcattaatgtgcgcaggatgtgaacagatttttgaggacaaaatgagcggaaccaagtcggaacgaccaggcctgaaacgcgctttaaagtgccttaaaagaggggatacattggtggtctggaagctggatcggttgggtagaagaatgaaacacctcattgctctcacagaagagctacgcgcaaaaggtgtcaattttcgcagtctgacggattcaatcgataccagcactccgatgggaaggttcttttttcatatgatgggtgcactggcagaaatggagcgtgaactgatagttgagcgcacgctggcaggactggctgctgcgcgatcacaaggaagagttggagggcgtcgcccgaaactgacgaaggagcagcatgagcagatcgcaagattgctccagaaagggtatgacagaaagcggctggcaattatctatgatattggactgtcaacgatctaccgctatcaccctgttgggactgtcataacgcaacctgaaatgtaa

SEQ ID NO: 103380 - DNA, 162 bp, Enterobacter aerogenes
atgactactcaaaacaataagcatgacagccttgattactcagaaaagcccaaaagcaagcacatcgtgacgttcgagcgcgattccggtagaaaaggagaatcgtcttcctctgccaataaaaccactatgccggcagcccctgctccagggaaaaaataa

SEQ ID NO: 103381 - DNA, 633 bp, Enterobacter aerogenes
atgtttgacgtttcgttgttaaatctgccatgggcaacactggtgaccctgaccagtggctatattgggtattttattgcgaatgtgggactgaaggatcaccacaagcccattgaggtgactttttcttcgctgatttttggcctgacagcaatgatggcttaccaggctgttatgtgggcaggtctgaatgcctggctggcaacaccaccagcacttctgtgtgccgttacatgcggtgcgtggtggcgcaggtacggtcgcaaatggatgtacagattactgtggaataatgatatttcatggtctgacgataccagctcagcatggcaggcaatgtttgatcaaacaggcttcagcgttaccgaggtcagagtgattcttcgcgatggttccggtatgatgtcacgactgccagggaactttgaagagtggcctaacggtccgtttaccctggggaataaaggcgatatggttctttacgtcacgcacagcagcccttcaggcagtaacgaatgggaagagtataaaggcgtggttgataagtactggggagctctggcaacctatattccagcagatcagattgccagagtggagatcaggcgcgttcgtgcgacgaacgatgaatga

SEQ ID NO: 103382 - DNA, 399 bp, Enterobacter aerogenes
atgagcgacctgaatcagtttcgaagtaaggggccggaactcctggtggaactggcacagcatacctctgagaccgttcgcgagattattgatattgagcccgaagttgccgaccagattggtcaggccgtcgcgaaccgaatgatgcaggtctggggcgggcaaaacgtttattttcctatgggcatggtatggaaggtcagtcagcgcgaccgggaaatcttcagggagtttaacggacgcaaccaccacgaactggcccgcaagtttggtgtttcgcttcagtgggtctacagcgtggttaagcgggtcagaaaagaagaactggatcggatgcagggcaggttgtttgatgaagatctgccagaggagacgaaagacgttaacaaatccagataa

SEQ ID NO: 103383 - DNA, 450 bp, Enterobacter aerogenes
atgcagaaaaaacgcctgatacagcttatccatattgcccgtaatgaactgggtatggatgaagacacctaccgccagatgttacaggggctgaccggtaaagcctcaaccaaaggaatggataccacacaactaaactgcgtgctggaatccatgaaaaagaaaggctttcgcgttaaaccagccagaaaagccagctccggtttaccgcttgataaccatccgcagtccaggaaaattcgtgcgctatggcttgaaatggctgctgccggcattgttcgtgaccgttcagaaaatgcattagcgaggtggatcaagcgggaaacgggcatcattgccctgcgctggctcagtactgaacaggcaagcagtgttattgagaaactgaagaagtggcagcgcagagctgcgggagtcaaacatgagcgacctgaatcagtttcgaagtaa

SEQ ID NO: 103384 - DNA, 207 bp, Enterobacter aerogenes; identical to SEQ ID NO: 5835

SEQ ID NO: 103385 - DNA, 231 bp, Enterobacter aerogenes; identical to SEQ ID NO: 5834

SEQ ID NO: 103386 - DNA, 684 bp, Enterobacter aerogenes
atgacagaccagaataaacacattgagaaactgaaaaagttgctggcgctggccgcatccggcaacccgcacgaggccgctctggcactgcgccgagcccgtaaactgatggatgttcacggcatcacacattccgacattgctatgagtgatattgatgaaaccatcagtcattactggccgacaggcagtctccgtccaccgcgctacatgctgggcctgatgaacatcatccgcgaggcatttggtgttaactccatcattcaccccggcacgcatcagtctgtggggttctacggcaaccgggaacgtacggcactggctgcatacacctgggaagtgctggcccgtcagctgaaaaaggcgcgtcagcagtatatcagtgcacagaacaaaagaataaaaaccgccacccgcaccagccgtggagaccagtttgccgaaggctgggtgctggccgttatcagtgaaatacagtccttcgccctgaccgatgacgaacgtgaactgatgcagcagtggctggaacataaatacccgcagacgcaaaccaccagggcgcgtaaaccgggaagaagccgcaatggcgacgcctcgcgctatgcggggtttcgtgaagggcagaacgtcagactgcaccgcccggtcagtgggcaggaacaacagaaactggaggccagatga

SEQ ID NO: 103387 - DNA, 216 bp, Enterobacter aerogenes; identical to SEQ ID NO: 5832

SEQ ID NO: 103388 - DNA, 297 bp, Enterobacter aerogenes
atgacacgaaacaccgaactcacccgcaccgccctctaccgtctggccctgcagcgtttcgggccggacgcacaggccctgaaactggcagaagaggccgctgaactggcggccagtgccgcccgcaacctgaacggacagggcagcgaaagtgacctcgcggcagagctggcagacgtggaaatcatgacagagcaactgcgccttcaggggatggaccggctgattgacttccacaaacagaaaaaactggaacgtctggctgcacgactgggtgtgatttacacgaacgagtaa

SEQ ID NO: 103389 - DNA, 273 bp, Enterobacter aerogenes
atgattaccccacaggaagcacgacagcgcacccgaacccttgttgaacactatgtcaacgagtgtgaatgccgcgacctcaccgatgtgaagcacgtcctgacggcgctaatcagcatggccacacaggccattgtggcgaccaacggaaaggaggctgccctgcaggtactgatgaacacactcacccacacggcagagcatgaggtgccgtaccggatggaaaccactgcagaaggcggcctgcacatcaccgtcagccggaagcactga

SEQ ID NO: 103390 - DNA, 195 bp, Enterobacter aerogenes
atgatatttaaatgtattcagtgcgagagggatataacagccctgcgttttcacagcgccatcgccgtgatgtccggtaagtatcacatacctgcagtacgtgtcacccttgtctgcccgtactgcagccagcatttttcggcggacgtgcccgtcatggaattctcccgccctgacagggaggacgcgcaatga

SEQ ID NO: 103391 - DNA, 531 bp, Enterobacter aerogenes
atggcaaaaagtacaaaaggggcaaaacgtatcaaagccgcagcagcactctgggtgccggggacacgcgaagaggtcattgagggaatcagactgcttggtgacgcgcaacgtgaactggtcagggctgaaacagaaatgaatgacaccattggcgacatcactgcacgttatgccccgctcaccgagagcctgaaaaaacgcatgaccgaactgcagtccggtatccagacatggtgtgaggcgcaccgtgatgaactgaccggcaacgggaaggtgaagttcgctaacctcaccaccggcgaggtgcagtggcgaaaccgtccgccgtcagtcagcattcgcggggcggataatgtcattgaactgctgagacgtctggggcttgagcgctttattcgtgtaaaggaggaaataaataaagatgccattctgaatgaaaaagaggctgtgaaaaatattcccggtattaccataaaaagtgatattgaggatttttcaataattccttttgagcaggatgtgcagtaa

SEQ ID NO: 103392 - DNA, 270 bp, Enterobacter aerogenes
atgaaatccaccacaggtatcaaccagcaaatcagcaaagtgcagtcagccattatggcgcttaaggcgacgaacacggatgtacaaagcatcaccatcaggggtaacaaacctgtcatccgcgtttcccggagtgcgcattgcatgcgcatgcttgagcagggaaaggcctgttatctgtataccggacatgaccaaaggggatatttccgtcagggcgttttcgaactgcacggctgtcgcgtcgtgtggccggaatctttgtggtaa

SEQ ID NO: 103393 - DNA, 1167 bp, Enterobacter aerogenes
atgctggtactgaagcagcaactgaaagaggcccgtattccacaggcggtggtggcgagagctgtcgatgtttctgaggccacgctggcccagattgtgaatcataacgcgtggccccgcaccagccccggagaagtgcgccggcgtcttgcgtcctggctggaaagtcaggggattgatacaacgaagagttttgatgctgtacagggcgcagccacgccccgtacagcgggtaccacagataaaacgagcctcagtgaggaagagaatatgttactcaaaaaacaggtgttatttccagcaaccaaaaaagcgtttggtcttttccgtgacccgttcgccgatgaagccatgcagggttctgatgatgtgttcaccaccccggacattcgctacgtgcgtgaggcgttgtaccagacagcccgtcatggtgggtttatggccgtcatcggtgagtccggtgcgggtaaatccacgctgcgccgcgacctgactgaacgtatcaaccgcgagaatgcgccggtaattgttatcgagccatacatcatcgctatggaagacaacgatgtgaaagggaaaaccctgaaggcagcagcgattgccgaagccattatcagtaccatcgcaccactggaaagcatcagacgcagtcaggacgcccgctttcgccagttgcatcgcgtcctgaaagacagcagccaggcggggttcagccacgttttggtgattgaggaggcccacagtctgcccattccgacactgaaacacctcaaacgcttttttgagctggagtccggtttcaaaaaactgctgtccatcgtgctgattggccagccggaactggcgacaaaactgtctgaacgcaatatggaagtccgtgaagtcgttcagcgttgtgaggtggtcgaacttctgcctctggacaataaccttgaagaatttctgacgttcaaactgcaacgggccggtaaacaactgacggacattatggacgccagcgcagtggatgccatacgtgcccgcctgagcaatccgggaagtcatcgtaaaaatatggtcagcctgctgtatccgctggccgtcagtaacctggtgatagccgccatgaatctggccgctgaaatcggggttccacaggtcaacgctgacgttgtcaaaggggtttaa

SEQ ID NO: 103394 - DNA, 1770 bp, Enterobacter aerogenes
atgaatgctgccctgactgaacgactggtttatgtcgcccgcgcggcacgtgacgcggggcatggtaaacgcggtgcaatatacgacgctgcctgtgctgaacttggcatgtcccgcgccactctgctgcgcaggctgaaggaggtctctgtgactgataaacgcaaaaaacgcgctgatgccggacgcagcgccctgacccgcgacgaagccgcgctgatatctgccacactgcgtgaggccacccgcaagaacggtaaacgcctctattccatcgcagatgcagtggaaaccctgcgggctaacggctttatcaccgcaggcagaacagatgaaaccaccggtgagtttttcccgttgtctgaagatgccatcagccgtgctctgcgtaactatggcctgcacccggaacaactggatgctcctgcaccgcataccgaagtggccagtctgcaccccaatcatgtctggcagattgacgcctcactctgcacgctttactacctgagcaatggacataaagggctgcaggtgatggacagcgcgaagttctacaagaacaagcccgctaaccttgcccgtatcgccagtgaccgcgtgtggagttacgagattaccgaccatgccagcggctggatttacgttgagtatgtgacgggcgcggaatcaggtgagaacctgtgttctgtgcttatcaacgccatgcaggagcgtggcggcgcagacgtgctgcacggcgtgccaaaaatactctatctcgaccccggctcggcaaacaccgcgggtatgacgaaaaacatgtgccgctcactgggcatcgacctgatagcgcacaagccgcataacgcccgcgccaccggacaggtggaaaaggcgcgggacattatcgaacgcaagctggagccgggtctgaagttccggccggttcacagtctggaagaactcaatgcgctggccgcgaaatggcgcagccactttaacgccacggctgttcacagccgccacggtaaaacccgcacggatatctggctgaagattactgctgagcagctgaaaaaagcgccttccgttgaggtatgtcgtgaactggctgtggcggcaccagaactccgcaaagtcacgccaaaacttcgtgtctcgttccggggcactgaatttgacgtatcaacggtaccgggcgtactggtcggtgaaaaactgatgattacccgtaacccgtggcgcagcgatgtggcacaggtggttctgaccggtgaggacggccacgagacgttcttcctggtcgaagaagtcagaaagaacgagtttggctttgctgaaggcgcggcggtatttggcgaaagttacaaagccctgccggaaaccccggcgcagatggcggcaaaagaaaccgaagcgctggtcaccggtacagacaacgccgcagatgcagctgccgcacgcaaggcgaaggcgctgccgttcggcgggcggcttgacccatataaacatattgatgacgccacacttccggcctatatgccgaagcgaggtcaggcctctgacgtacgcgggccgcgcactgaacaacgtcccatgactcatgtggaggccgcgaaagccctgcgcgataagttcagcgccgacggccttacctggacgccggaacattaccgccagttaacggcacagtatccggacggcgtaccggaagccgcactggatgaagtcatggccacgctgaccacgccggcccgcagcagcgttatcagcattgttaacggcaactga

SEQ ID NO: 103395 - DNA, 912 bp, Enterobacter aerogenes
atgggacgcaccaaatcaccgattaacactgaactgaacgccgaggtaccgctgtcggatgatctcaatgtcagtctgaacgccatgacacagcatcgtatggagatcatgcagcagtttggcgatggtcagccctatgagcgtgatcgcatagttcatgaggctcggttttatatggcacagagcgctgaggccatgctggaagcaggtaaacgacttattattctcaaagaaaatgaacctcacggggactttgttggaattgtagaagaacaacttggtctgcatgtgcgcgcagcacaacgaatgatgaaagcatctttgaaatacctttcaccaaaactagagccaaaagcgacaacgttgtcgcttttaggtaaggcaaaattatttgaacttgttgctgaagatgacgacgaccttgctgaactggccgacggtggcacagttgccggactgacgcttgacgatgttgatcgcatgtcagtacgtgaattgcgtcaggccctgcgcgaagcgcgcgaaaccaacgcagcacaacagcgcgtactcgccgacaaaaatgaaaaaatagactcactctccaccagactggagaagaaatcccgtattcagccgcctgagcctgatgaagaggttaagaagctgcgggcggaagtgacagcattagcggttgaggcggaatctgctatcgccgttcgactgtccagcgcttttgagacgctgtgcgcatattgtgctgaaaacatgattgatacccccagagacttcatggcaggcctggtctgtcaactggaaagcacagcgcgtagcctgcgctccacatttgacctgccggatgagccaacaggcaatgccgcgccttcatggctgactgagccgacgccacagattaacgggctggaggcataa

SEQ ID NO: 103396 - DNA, 309 bp, Enterobacter aerogenes
atgagtaagacgaatgtttcaagctccggcagtcgcatcctccgggtactcaaagcgctgcgcggtcatgccctgaacggtatttccaacggtgaactggcggcagcactgcacgagtcaccggcaaacatcaaccgggcactcaacaccctcattgaagaagggttggccctgaaactggaaaacgggcgtttcgcgccgggcatccagttactgcagatcgctatggcccacagtaacgagatggcacgtgcacaggatcgcattaacgaaatcaaccaacgtgtcatttcaggtagtcgtttgtaa

SEQ ID NO: 103397 - DNA, 189 bp, Enterobacter aerogenes; identical to SEQ ID NO: 25242

SEQ ID NO: 103398 - DNA, 765 bp, Enterobacter aerogenes
atgaaaatgaagacattacccatcgttccatggattggtggcaaacgtcgcctggcaaaacacatcctgccgctgtttccggcgcatgaatgttatgtggagccgttttgtggggcagcagcgctctattttcttaagacacccggcaagatcgaagtcatcaatgatatcaacggtgaactggtgaatctgtaccgggtggtaaagcatcacctggaagaatttgtccgccagttcaaatgggcgctggtcagccgtcagatctacaaatggctgcagatcaccccggaagaaacactgacggatatccagcgtgcggcacggttctactaccttcagaagcaggcgtttggcggcaaggtggcagagcacagcttcggtacctccaccacatccccgccacgcttcaacctgctgcgtattgaagaagaactgtcagcagcacacctgcggctttccagaacagtcatagaacacatggactggcaacagtgcattgagcgttatgatcgtccgcacacactgttctactgcgacccaccgtacctgggtacggaaggctatggtgtggattttcctgaagggaactactcgcggctggcagagctggcccggtgcatcagaggaaaaatgataatttcggtgaacgatatcccacagatgcgcgaggtgttcactggactgaacatacagacagtgaacatcaactacagtctggcggggaaatccacgccgcgccgtgaactggtaatctgcaacttctga

SEQ ID NO: 103399 - DNA, 216 bp, Enterobacter aerogenes
atgaatccccgattaacgttaacagaacatcagcgccgtgctgaagcagtgaacaatgttctggaagatattatccggttacatcgcggagaactgagtgtctgtcgtgccgcttttcattttcagggaatacaaaagcagtttgatacttctgtttttgcagaaggtattacttatgccctggaccggataaggtcagaaaatcgccccggataa

SEQ ID NO: 103400 - DNA, 402 bp, Enterobacter aerogenes
atgcactccttaaatgatgatttttatgcactcaccggcaaaatattctgccgattactgaacacgcatccggcacctcaggttttgatttattctggttttttcgatatcccggaccaggttgatcacgaccagaaaaagtgccggtattttattgatacgctgatatggcttcgggataacagctatattcgttactctcagttgctggctgtgggagcggctgatgtcgtcctcacggaaaaaacgctccgtctgctcaatgccacgccgacccttctgcagccccggcccgcaccatttaaagagtcacttctggatgcagtaaaaaccggtgaaaatgcagtcatcgctgaatgcgtatcccggattatgcgttacgtgtttaatgaacgtaagtga

SEQ ID NO: 103401 - DNA, 744 bp, Enterobacter aerogenes
atgacgcagacactgaatccggtcatcactgtcaccgtgtccggtcctgtgggcagcggtaaaagttacatattggcgcggatagaggaagtggtgaaacaggaattcgggggcagcgtcattgtcgatgctgcagacgtagatgatgagcggcgtatgagtggcgatgatctgacgacctggcagaagccacggggtggcacagtgatcaggctggaggaatacacgggacagggcctgttgtcatacggcgaggagcgtatctgtcggacgaatgagctgctggatgttatatgccccacgggccggcaaccctggatactgcccgatgcactgcatgccaccattgcggcactgatgacagtttacgatcaggagctgctcatgaaggagctacgtaaactcaccggtcagccaacagaatgtttttctgccccgaagtacgggaaacaggaacacatcccggtgaacacgctccccgttaaccagcctccccggttcttcgacgaatacattctgacaccggaaaataaagctgagcacgaagagatcaaagcggcgttgttccgggaaatcaggaagattgctgaaatgcaactggggggcgggctggacagagtgatggcgagaggagaatgggagtcgctgtttgaaagagtttccccggaattacttcccctcgcactggctatcgggattatgcagacagcggataaacctcacttacgttcattaaacacgtaa

SEQ ID NO: 103402 - DNA, 351 bp, Enterobacter aerogenes
atgaaaaacctgaaaaaattcattccccctgttaaaaaacctcgcctcagcggctggctgctgacctcagtgctgttgctgggcaccatcgctctggtctcgccacagcagttgcctgttgtgatctacaagctggcactcatcacgctggcagcagtgctgggttactggcttgaccgttcgctcttccccaaagcccgtcccggtcagtacctgaaacatgacgacaggctgatggctgatgggcgtttcccggtacagaccggccttcacctggtgttttctgctgcgttaatccgccgtgcactgattgttgcagcggtctgtctggctgttgcgatggggctttaa

SEQ ID NO: 103403 - DNA, 705 bp, Enterobacter aerogenes
atgtccctgaaactggctttcgaagcctttagggtcttcatcagaaccgaacgcctgtcagtccgcgccgggacctttctggttcatatggcacgggtattctttgtcgcaatgttgctctggtgtggcggcttcttcagtcaggcccgcgcagcgcagcctccgcaggcagcgctgcagtatcgcgatgatgtgatccgtaatgcccggcttgaatggggactgtctgcgccggtggctgatttcgctgcgcaactgcatcaggaaagcggctggcgacctgatgcgatctcgccggttggcgctcagggactggcgcagttcatgcccgccaccgccgactggataagtcagttgatgccggggcttaacagccgtgagccatttaatccggcatgggccatccgggcgctggtcagctatgaccgctggctgtggcagcgcgtcagcgccgccagtgactgcgagcgtatggccatgacactgtcgggctataacggtggtctgggctgggtacagcgggacaggcggcttgcatcacaaaaagggctggacagcacccgctggtttggtcatgtcgccacggtgaatgccggacgcagcactgccagctggcgggagaaccgtcattatccccagcgcatcctgttcacgctggccccgcgttatctctcatggggaggggcaagctgtgtgggtacgtaa

SEQ ID NO: 103404 - DNA, 654 bp, Enterobacter aerogenes; identical to SEQ ID NO: 8695

SEQ ID NO: 103405 - DNA, 327 bp, Enterobacter aerogenes; identical to SEQ ID NO: 21885

SEQ ID NO: 103406 - DNA, 312 bp, Enterobacter aerogenes
atggtcgatattacccgggtacgccgcgaatccctgcgctggagtctgctggttgccctgaacaaaacccgcccttataccgccagcgagacgctgctgctggaagtgtcccgcgccatctacccggacaccacgcaactggagctgcgccgtgagcttgattacctggcagatcgcaagatggtggaactggagaagaggccttccggtgactggtttgccgatctgagtcgccttggtgtggatattgtggaatacaccgtggaatgcggccccggtattgcccgcccggaaaaatactggagtgagtga

SEQ ID NO: 103407 - DNA, 543 bp, Enterobacter aerogenes; identical to SEQ ID NO: 8696

SEQ ID NO: 103408 - DNA, 1524 bp, Enterobacter aerogenes
atgacggagctgccgccgcacattcctgacaccgcgagttataaggcccctcccgttctgttgccctaccagcagcgctgggtggcagatgcctctccgcttaaggtgatagaaaagagccgtcgtaccggtattacatgggctgaggcatccgataacgtactgaccgccgcctcttctgcgccagcaggcgggatgaatgtgtattacatcgcttataaccaggacatgaccgtcgaatacattcaggcgtgtgcgatgtgggcacgggcattcaactatgcggccagtgaaattgaagaaggattctgggaagaggacgacgacgacaaacacatcaggacttacaccatcaaatttcctgactccggctttcgtattgttgcgctctccagccgcccgtctaacctgcgtggccgtcagggtattattgttatcgacgaagcggcgttccatgagcaactggacgaactgctgaaagcggcgctggcgatgcttatctgggggggaaaggtacgcgttatctccacccatgacggtgacgacaatccgttcaatacgcttatcggggatatccgtgccggacgtcagggaggcagcgtacatcgcattactttccgggaagccgtatctgaggggctgttccggcgcgtttgtctgcgcaccgggaaggaatggtcggaggcatccgagcaggcctggatggcgtcggtgtacaaattctacggtgccggtgcatccgaagagcttgactgtattccggccaacggtggcggtgcctggctgtcccgagccctgatagagtcccgcatgtccgctgatacgccggtattgcgtctgacctgcaaggaaggttatgaactgctgtctgatgaggttcgcttccgcgagacgcaggactggcttgatgagcatctgaaaccattactggaggcgctccccgctggtgcccgctcttttctggggcgtgactttggccgtagcggggatttgtcggtggactacccgttgttgcaggagaagaacctgatacgacgcgtgccattcgtactggagttgcgtaacgtgccgttcaggcagcaggagcaaatcacctggtatctgatggatggcctgcccggtctgctgggtgcagcgtttgatgcccgtggtaatggtgcctatctggctgaatacgccatgcagcgctacggctccggccgggttcagcaggtgatgccaaccgaaggctggtaccgggagcatatgcctccggtcaaagctgcactggaagacggtaacctggtggacttaccaaaggatgaagacacactggatgacctgcgggccgttcaggtggtgaatggtgtcccccgcgtgccggagcaacgctcaaaagcaaaggctgatggtggtaaacgtcacggggattcagccatcgcactggcgctggcgtatttcgccagccgtgaaattaacaaagggccggtgaaggcaagctcacgccgtcgtcgtcaggcggcccgcatgctggaggggtactga

SEQ ID NO: 103409 - DNA, 1497 bp, Enterobacter aerogenes
atggctaaaggtatctgggtttcacccgatgaatttgttgctttttctgagcctcagaaatcactgaccgcgcagattgcctcccgcagccgcgcgatcgacttttacggactgggcatgtatctgcccaatcctgatcccattctcaaggctcagggacgggatatccgtatctaccgcgaactgcgcaccgacccgctggtcgggggctgtatccgcagacgtaaagcagcgctcaaatcactggagcgtggactggagcgcggtcacgcttctgcccgggtcttccgtttcatccgcgacatgctcgacgatctggatctgtcccgcatcatcggtgagatgagtgatgccgtgctctacgggtatcagccctgtgaaatcatgtggggccgttcggtcagggcgtgggcagtgacggatattgtcggcaaaccgcctgagtggtttcagtttgatacggacaactgcctgcgcttccgggcgcgtgatgcgggtgtggagggtgagctgctgtcaccgtcaaaattcgtggtgccggcacaggatgcctcgtatgacaatccttacggtttcccggacctgtccatgtgcttctggccggtcgccttcaagaaaggcgggatgaaattctggctccgctttgccgaaaagtttggctccccgtgggtgatcggtaagcacccgaggggtgcaaatgatgcagagattgaaaaactgctggactccatggagcagatggtggaggacgcggtggccgccatccccgatgacagcagcatcgaactcaaagccgcggatggtaaggcggacagcagcgaggtattccgcgagctgatcacactgtcacgcagtgagatctccattgcattacttggtcagaatcagaccacggaagcgaacagtaacaaggcctctgcacaggccgggctggaggtaacggctgatatccgcgatgcggatgcggacatcattcaggcagcagtgaatcaggttatcagaacggtggtcaccctgaacttcggcgatgtgccgtgtccggtctgggccatgtgggaacaggagaccattgatgacacccgcgccacccgcgacgaaaaactcacccgggcgggtctgcgtctgaccccgcaatactttaagcgtgagtaccagctgcaggacggcgatattgacgagacaccaccgtcggaacgccagaataacatgctgccgctgtcatttgccgaggcgattgatgccgatattcaggctcagcagcagcttgacgacgcgctggacattctgatgaacggaggtgtgttaaatggcacgctggaacccgtcctggcacctctgtttaagcgggtcgaaaacggggttaacccgtctgagctgctgggcgaactggcggagctctaccctcagatgaacacggacgatctgcaggaacggctggcccgcattctctttgtggcaaatatccggggacgtctgcatgagcgtgacaacggctga

SEQ ID NO: 103410 - DNA, 822 bp, Enterobacter aerogenes
atgagcgtgacaacggctgaactggcgtactgcatgacgcttcccccgaagcgggcagtcagttacctgaagtccaaagggtatcagattacctgggactgggaagaaatgtggcaggaggcccatgcccgcgcctttaccgttgctaaagtgacccgcctggatatcctggaagatattcgcggggcactgcagcaggctgtcgatgaaggaaaaaccgatcgctggttccggcaggagctggagccggtgctgaagcgtaagggatggtggggaccacgtgacacgactgacccggtaacgggtaagccggtcaccattcagcagggcagtccgtggcggctcgataccatctttcgcaccaatatgtccgtactctacagcgccggtcgttgggcggaacagatggaaaacgtcgacgacaggccgtactggatgtataccggcatcaacgacagccatacccgcaggagccatctggcgctgcatggtctggtgctgcgctgggatgacccgttctggcaggcattttacccgccgaacggctggcgctgccgctgtagtgtgattgccctgagtgcggcggatgtccgtgcccgtggcctgaaggttatcagctccggctctgccatgggccaggaactgaaactggtctcagagaaaaccggcgaaatgcggaacgtggccacctttaataccggcaccacgaaggtgaccaccgacgtcggctggtcttatgcaccgggggcagcataccgtcccgacctggcccgctatcagggtacgcttcagccactggcacaacaggaactgagaggataa

SEQ ID NO: 103411 - DNA, 459 bp, Enterobacter aerogenes
atggcttccgataacctggtcagtatcaccattaacgataaatccctgcgccggagcctccgtgcgctggatcttgctgccacagacctggagcccgcgatgcgcaaaatcgccggaaccctgctggcggaaacacagtttaactttcttgatgaggggcgtccggggtggatcccctcgctggcagcggaagaacgtgacgggcagacactgcaggataccgggcgtctgatggggtcagtatcaaccgaccatgacgaccggcaggctgttgtggggaccaacgttgtttacggtgccattcaccagttcgggggtaaaacggggcgtaatgagtctgttgaacttccggcccgcccgttcctgccggtgacgggggatggagaactacagcctgaagtggtaatccccatcctcgataccattgtccgccatcttgaatcatcggcccgtcgctga

SEQ ID NO: 103412 - DNA, 1116 bp, Enterobacter aerogenes; identical to SEQ ID NO: 5807

SEQ ID NO: 103413 - DNA, 954 bp, Enterobacter aerogenes; identical to SEQ ID NO: 19750

SEQ ID NO: 103414 - DNA, 339 bp, Enterobacter aerogenes; identical to SEQ ID NO: 5805

SEQ ID NO: 103415 - DNA, 447 bp, Enterobacter aerogenes
atgtactgcaccctggaggatttgcttgcgcaggtgccggagcggacgcttatcgagctcaccagtgaagagatggacttcgactcacctgcaacagtgaatacccgtgtggtggacagctgtatccgctatgccgacgagctgattgatgcccatctgcgcggacgctatatcctgccactggcagagataccgactgttctgcgggacattgccatcacgctggtccgttaccggctctacgcccgccgcccggaaggtgacctcccggatacggtgaaggatgaccacaaagaagcgctgcggcaactcagggagttacgtgataacaggctcacgctggggctgccgtccactcagaaagatgtgcctgagcctggcgagtttcgtgtacgcagtcgcccggctactttcggcggtcgtgacggtttactggagaaatactga

SEQ ID NO: 103416 - DNA, 465 bp, Enterobacter aerogenes; identical to SEQ ID NO: 5803

SEQ ID NO: 103417 - DNA, 252 bp, Enterobacter aerogenes; identical to SEQ ID NO: 5802

SEQ ID NO: 103418 - DNA, 1428 bp, Enterobacter aerogenes
atggcagctaactatctgcatggtcccgaaaccattgaggtggaaaacggtgcccgcccggttaaaacggtgaaatctgccgttattggcctgattggtaccgccccgatgggggatgtcaatacgctggtacagtgcctgtctgagaaagacgcagcggcatttggcagccagttcaccggctttaccattccgcaggcgctggatgcgatttatgaccatggtgcaggcaccgttctggtcattaacgtcctcgacccggcgaaacataaaacggcgatcgaggatgaggtggttacctttgacaaatcgacagggcaggccagactggcgcatccggttgtcgctaatgtggtggtgaaaaacagtgaaggcagcaccacccacacggcgaacacggactaccgtgttgatgcgcaggcgggtgtgctcacgaacctgggcaaggctattgaggccggtggcagcgtgaaggtgagctatgagtacgcggacccgtcgaaggtgactgcggcggacatcatcggcggggtgaacagcgccggaaaccgaaccggcatgaagctgcttaacgacagcttcaacctgtacggctatttcgccaaaattctgattgcgccggtgttctgcacccagaagagtgtcgcagttgagcttatcgccatggcagagaagctgggcgcggtaacctacattgatgcgcctgtcggtaccacctttgcacaggctctggcaggtcgtggcccggaaggcaccatcaacttcaataccagctccgaccgcgtccgtctgtgctatccgcatgtgaaggtatatgacccggtgacaaacacagagcgtctggagccgctcagccagcgtgcagcaggtctgcgtgccagagtcgatctggacaagggctactggtggtcatcctccaatcaggagattctggggatcaccggcgtggagcgccagctgtccgcgatgattgatgacccgcagagtgaggtgaacctgcttaacgaacaggggatcaccacggtattcagcagttacggcagcggccttcgtctgtggggtaaccggacggcagcatggccaacggtcacccatatgcgtaactttgagaacgttcgccgcaccggtgatgtgatcaacgagtccattcgttatttcagccagcagtacatcgacatgccgattactcaggcgctgattgatgcactgacggagtcggtcaacgcctacggtcgcaaaatgactggtgatggtgcggtactgggcttccgttgctggtttgatccggcccgcaatccggagacggagctggccgccgggcacctgttgctgagctacaaatatacgccaccaccgccgctggagcgactgacgtttgagactgagatcacctcggaatacctgttaaccctgaaagggggcaactga

SEQ ID NO: 103419 - DNA, 522 bp, Enterobacter aerogenes; identical to SEQ ID NO: 5800

SEQ ID NO: 103420 - DNA, 282 bp, Enterobacter aerogenes
gtgagtgttgaactgacggataaaggaggacgatgtgcggcactgggcatgtcaaatggtacgtggtttaccctccttgatattccgggggtggaaaccctttttaatacccgtaaaaccaatgacccgattgactgcacacgttcaaaggcccgcaaactggcggatttgattgaagcatgggagcctcccgaccactggttctccggcaccggcaaatctgagggaaagacgcttctcatcgctttcctgcgtaactgcaaggggtttcgcacttgctga

SEQ ID NO: 103421 - DNA, 336 bp, Enterobacter aerogenes; identical to SEQ ID NO: 19742

SEQ ID NO: 103422 - DNA, 3213 bp, Enterobacter aerogenes
atgtcgggacagttttcagtcggcgttgttatcggcgggatgattggcagcacattccgttctgcaatgagcggtacccgccgtgcgcttgattccctgagcgatacctcacgccgcctgcaggaacgtcagaacgctttaacccgtgcaacagaacgttatggtcaactgggttcttcccggatgcagcatctcaacagcgagctgctgcgggtaagccgcaccatggagcaaattgagcgccagcagcgccgtctgtcagcggcatccgctaccagtgatgcgctgaaagctaaccgcatggcgctgtatggtcaggggattgaagcgtatggcatggcacagactgtttatcatacggtttcccctgccgttcagcagtccatgtcttttcaggacaaaatgattgatatgtcgatcaccgcaaaatatgacaataaaacgcgggatgcacttgccggacagataaaaggctgggcgcttaaatacaatcagtatcaggatgagctgcaggaggcggtgggttcactcatcagcgacaatattgataatgtgtcagatatcggttttctgatgccggatattgcccgcgcgacaacggcaacacgcacgtctgctcaggactgggcaaaagtggccgcagtctggcaaaactccctgaaaggtgcggccagagattttggtgccgttcagaatattatggcttatgccggtgaccaggggtcatttgaaatcccggatcaggtcaagtggatgcagtccctggccccaatgatggcgggtattgccagtggaaaagaggctgttgctgaaatcggggccagtctccagatagcaaaaatcggtgcaggttccaccgacgaagcagccaataattttaaaaactttcttaccaaaatttttgcccgcgatactcagaaacagtttgctgatctgggtattgatttgcagggatctattgcgagttataaggctgcggggatctctccgattgaagggatgttgagtgttatagaacgttacctcaatgccaaaagccccgaagcgctggccggcttcaaatccgccatgaaaataaagaatgatacggcaagagatgaggcacttcaggctctggcgaaaaactttggtctgggtgatatgttcgcggatatgcaggtcatggcatttatccgcccgatgctggccaacatggacagatatcgagagatccgtgccggtgctctcagggctgcggataacgatttgcttgccagtgcttacgatcagcgactgaaatctccccttgaagccactaaaacacttatggtcagcagtcgcgatctggcaattacgctgggcgatcaattagctccatcttttatttctttgactcaggaactgcttccactcattcagggggcaaaacactgggtagcgactcacccgcaatttgtcagtggggcttttaagctcatcagtgcgctccttgcgattaagatagcgactgttggtctcaaactggggctgaatctccttatttccccctttgtaagtgtctggaaaaatgctgttttactccggaccaactggcatcgactgactaccgcactcggagaaggtggcaaattacgctggcttgtcactggattcagccgactgaccagcggaggactgaaactcagcaaagttctggcgggcagcctcgttcgcggttttatgagcgctgcacgtgccgttctctggattgggcgagcgctgatgatgaatcccatcggtctcgttatcaccgctgtcgcggcagcagcttaccttatctaccgcaactggggggctgtcagtggttggtttaaacagcgctgggctgacattcaggaagcctttaacggcggcattgtgggaactggtaagttgctgattaactggtcgccggcaggcctgctctataaagcctttgcggctgcgctgaaatatttcggcgttgctctgccggcaaagttcaccgacttcggtggccatcttatcgacggtctgattaacggtatcaaaagcaaatgggggtcgctcaaatccagtgtaaccggaatgggtgacagcatcagtagctggtttaaacagcgctgggctgacattcaggaagcctttaacggcggcattgtgggaactggtaagttgctgattaactggtcgccggcaggcctgctctataaagcctttgcggctgcgctgaaatatttcggcgttactctgccggcaaagttcaccgacttcggtggccatcttatcgacggtctgattaacggtatcaaaaacaaatgggggtcgctcaaatccagtgtaaccggaatgggtgacagcatcagtagctggtttaaacagtgctgggctgacattcaggaagcctttaacggcggtatcgcgggaactggtaagctgctgattaactggtcgccggcaggtctgctctataaagcctttgcagctgcgctgaaatatcttggtgttgatctgccggcaaagtttaccgacttcggtggccatcttgtcgatggtctgattaacggtatcaaaaacaaatgggagtcgctcaaatccagtgtaaccggaatgggcgacagcatcagtggctggttcagcgaaaagctgggcattcattcgctgagccgcgtgtttatgggctttggtgacaatatcgcgcagggggccgccattggcctgcagcggaccactccgcttgcagctctggccgggcagcgaatggccagtgaactgctccccaaaatgcccgtgagcattcaggggccagaaatacgggataacacttcaggtgttcgcttcagtatgccgttgcccgatatcaatgggtttatgtcgtctgctaaaaatgcgatcggagccgtaatcaatagtttgtcttccatgcccgctattccgctctccacccgggcatcgattttaccagggcaacgtctggcaaatgagatgacaccggatgttccccgtatcccctcgcctgaaatcctggctgccggatattcaggccgtggtgcagctgcaaccggcggtggaacgtctggtggtatccaggtcagctttaatcctcagtttttcctcaatggcagggaaaccacagcgcctgcaggactgactggtgccctgaatatgagtctgcatgagctggaaaaaatgctggagcgtctgctggctcagaaacaacgtaaggagtaccgctga

SEQ ID NO: 103423 - DNA, 885 bp, Enterobacter aerogenes
atgtttgccgtactgggtgatattgagtttgagctgattacctactgggacggcttcgaggccacgttcggcgtcgattatgcggagcatgcccgcatcgggggtaagcctggcctgcagttcgtcggcgacaggctggacgaaatccagataactctggttttccatcagcattattgtgtacccgatgtggagctggcgagactgcgaacagccatgaaagcccatcaggcactggcgctggtcttcggcaacggtgactatcgcggctggttcgtgattaccgatgtgactgcaaccagcgagcagactgacagtaccggcaacgtgctggctgtcagtgccaccgtgtctctccgggaatacaccggtgacccgaaaaatcctctgcaaccaccggcaatacgcacgaagctcccgggtgtcggggcggtctccggtgccattccttcaccttccggggtggcgcagttcatccgcaacggcgtcaactatgcgaaacaggcgcagtctgtactccagaccactatcagcgccgttcgggtgacacagaaaatgaaggataaccccgttgtcgcactgacccgtgtgccggggctgatgagcggactgggtaatatctccggggctctggggaaaagtgttccggcgtttaacgcactctctgaatccatgcccgatgccatcagtctggccagaacagccagcgaagcagccacgtatgtacagcaggcacagtctgcgctgagtggtgtggacaaaagaaatattgcaggtgctctggataccgtttccgggcagcttaacgccgtcggcacagcattcaaccgcatgtctccgggattaagtgcaatggccgccagaatactgacgaggagtgtgtga

SEQ ID NO: 103424 - DNA, 213 bp, Enterobacter aerogenes
atgtttcttgaacatgttacccgtgacggagagcgctgggattcgctggcatggcagtactacggtgacccgctgggctatccccggattattgccgccaatccgcacgtggccatcacgccggtgctgccctccgggctgttgttactgatcccggtgattgaggctgaagaagcccgtacagaagaggatattgccccatggctgagataa

SEQ ID NO: 103425 - DNA, 1155 bp, Enterobacter aerogenes
atggctgagataaacagcactgcgcaagtcacatcagcgttaaccggcgtcagcgatgtgctgacaccggtgttcactctgtggtatctgcagaaaaacatcacctctgatatcgcgccttatgtcacccgtgtgacctggagcgataacatcaaaaatgagtccgataccattgaggtggagctggacgacaccgatggccgctggctggataagtggtatccgggcaagggtgacacgctgacgctgaaaatgggctatcagggcgagaagctgctgtcctgcggtacgttctctatagacgagatcgaagtgagttcgcccgcttccgttgtttctatccgtggggtggccacctcggttaacagtgccctgcggactaaaaccagtcgtggttttgagaacaccacgctggcagctgttgcggggcggattgccagaaagcaccgactgaaactggtgggcagcattgagtccatcagaatcgaccgggtgacccagtatgctgaaaccgacgtgggttttctgcgccggctggccagcgagtatggttatgcagtgaaagtggtcagtgaccagctgattttttctcatctggccacactgcgcagtcaggagccggtcaggcagttaaaaccgcaggatgtggcccgcttttccctgcgtgacaccatcaaccgggtctataaatctgcaaaggtaaaacaccagaaaagcagcagtaaaaaactgatcgtctacgaagctgatggtggtacccgtgaaagcgacaaaaagctcaaaggtggtaaggttaccagcgctgactcacttaaagttaacagccgcgtcagcgacccggacagtgcccggattaaagcggattcagcactggccagacataacgaataccagcagaacggctccctgacgctgacgggaacacctcaactgacagcaggcaacaaaattgaactggtgggttttgggcagttatccgggccatggctcataaccactgcccgccatgcgtttgaccgtaacagcggctacaccacagagctggaagtggcacgggggccagtcacaagagggaaaaaacaaaaaactcagaaactcacggtttatcacccggatggcagtacatcgacggtgattaaggagaagaaaaaatga

SEQ ID NO: 103426 - DNA, 597 bp, Enterobacter aerogenes
atgactggtgtcactcgtcaggtcggtacggtcagtgccgttgatgccgacagggttcaggcccgcgttcgtctgcctgaatgcgataacctgcgcacaaactggcttaacgtgctgcagcgcaatacccaggataacaaagattactggctccctgacgtgggggagcaggttgaggtgctgctcgatgccaacggcgaggatggtgttattctgggcgcggtgtattcagacgtcgataaaccaccgttcagtgacaaaaatatccggggaacccggtttgctgatggtgcagagtacagctacaaccggaagacgcacactctgaccatccggggcggcattgagcatattgtcattgagtgtggtgctgatgtggtattgaaaacacagaaagccacgattgacgcaccggaaaccgaacttaccggagatctgcgtgtcaggggtaagctgatttacgaaggaggcatggcgggttctggtggtgaaggtgttaccgcgaccatccatggcaatatcgagattaaagggaatgcccatgccacgggcagtatgttgtctgatggcgaaaactccagccaccactcccactga

SEQ ID NO: 103427 - DNA, 348 bp, Enterobacter aerogenes
atgaaaacaacctcagtattctggcaaccagccctgcaggctcccggcgaaattgtccgggggctggatgatatccggcaggcgattcaaattatcctgcggactccccgcggcagcgacccgcatcgcccggagttcggcagcaatctgcatctttatatcgactggcctgtagaccgggccattccgcatgtggtgcgcgaatccgtcgatgccatccggcgctgggagccccgctgccagcttatgtcagttaaacccgccgtcgacggcgaacatcttacgctccgggtgagctggaaaggctcagacggacagacccggactcaggagctgctatggcgctga

SEQ ID NO: 103428 - DNA, 1104 bp, Enterobacter aerogenes
atggcgctgacagaacccgattttattgaacgcgatgccgacacaattacggcagaaatgattgcgaagtatgaagcggataccggcaaaacgctgtacccggcacaggcagaacgtctgctgattgatctgtgggcctatcgcgaaatgctggtcagggttgcggtacaggaggcagcaaagcagaatctggtcgcctttgcccgtgagccgatgattgattacctcggtgaactggttggtgtataccgtcttgccgcgcagcctgccaccaccacgctccagttctccgtagatgaggcactggccattgatgtgctgatcccggcaggcacccgcgtcagcgcttccgacagcgttatttttgccaccgatacagatgtggtactgaaggccggattgctgctggtcaatgtcacgtccacctgtaccgaacccggtaccgctggtaacggctggcaacctgcgcaggtcagtcagttactcgatgagattgataacgtcgacctgctggtgagcaatctgacggccagttccggcggttcagaacaggaagacgatgacaggctccgggagcgtatcaggctggccccggagtcattcaccaatgccggaagccgtggcgcataccgctttcatgccatgcaggcccatcccaacattgtcgatgttgctgtgctttccccggttcccgggaccgtagatctgtatccgctgctcagtaccggtctgccggacggcggtgttctcacgctggtagagagtttctgctctgatgagaaagtcaggccactcactgatacagtgcgggctaaaacaccagtgaaggtggattacaccattgaagccaggattacgatctatcgtgatcaggatgccaggtctgtaaaagatgccgctaacagcgccatacagaactgggtggcatcacgtgccgccacgctggggcgcgatattgtccccagccagattatcagtgcattgtccgtttccggggtgtaccaggttgaactggtgacaccggcactgcgggtggtggcagaaaacgaatgggcaaactgtacggcaatcactcttaacatgactggagtgtctgatgactga

SEQ ID NO: 103429 - DNA, 579 bp, Enterobacter aerogenes; identical to SEQ ID NO: 7287

SEQ ID NO: 103430 - DNA, 150 bp, Enterobacter aerogenes
atgccatctgaacatgatgaacaacgggatgctactgatacgcagcttcccggcgaatatgacctttttgatttaatggcgcagattactgaagagaacctgcatgcccctgtggattctgggccgcctgtcggccgggaagcgttatag

SEQ ID NO: 103431 - DNA, 300 bp, Enterobacter aerogenes; identical to SEQ ID NO: 28343

SEQ ID NO: 103432 - DNA, 615 bp, Enterobacter aerogenes
atgagtaacactgcagttctggatgaaaacggtatcgccactgtagcgggcgagatcactgtatatcactatgacgaggaaacccgggaatacacctcatcctctgtggagtatctcgcccttggggtgggtactccggcacattcgtgcgccgatgcaccgccggaggcaatttcgggttacgtggtttgccggactgccacgctgaacgggtgggagcatgtgcctgatcaccgcggcgagacggtatacagcacggagaacggtaaccccgttctgattacccaaccgggtgattacccggcggacaccaccacaaaacagccagccacgccatgggatacctggaacggtgaggcgtgggtaaccgatactgaacggcagcgaaccgcagagctggagactgccagactgcaacgccagaaacgggtggatcaggcgatgaagtccatcgacctcatcaacctcaaactgcgggcaggtcgcagtctgaaaccagaagaaacggcaaaactgaacgccgtgctggattatatcgacgagctgaacgcactggatatcagcacggcacctgaaatcagctggccggaagcgccactggcacttgccagttga

SEQ ID NO: 103433 - DNA, 261 bp, Enterobacter aerogenes; identical to SEQ ID NO: 34032

SEQ ID NO: 103434 - DNA, 360 bp, Enterobacter aerogenes
atgaagtttaaacgagatattgctatctgcaatgctagccccaaaggtgatcttgacaggaattatgttattgctgtaatcggcgctattactgaagtcaaaaatcaaatggaagtgcttagagccttttctaaacttaaagatgcatcactaaaattgaaattcataggtgagccaagaagcactgaaaaagataagcaatactataacgaactattaaaatatgcggaagacaataatcttgcttctcaagtcatatttactggttttgtttcagatgtgagagagaagcttaatgatgtagatttagtctgcgttccgtcagatcgggaacccagttatatggtattcctgtattag

SEQ ID NO: 103435 - DNA, 210 bp, Enterobacter aerogenes
atgttgctctgtaataagaaacggttttccgctgaaaattcggtcaatatagaggttcacggctttcgcttcgaattcctcatgataaggcttaaagaacagtgtccttgcaagcagctcatggtaaagctgtatgagagtcagatcttcaaatcctcgataggtattgatatccaaccattttttaacttctttggtgtgttccgttga

SEQ ID NO: 103436 - DNA, 210 bp, Enterobacter aerogenes
atgagcaatcccactgatgatgaaatccttcaaatattgcgagagcacaactggtgcatgacgtatgtcgtagcctattggctgcgacaaaaatataaggacatcaatactccttacgtgcttcgcaggctgaagaaaatggaaatggcaggaagcgttaagcgtgtaaaaagtttttataagcgacagattcgctgggaggcggtatga

SEQ ID NO: 103437 - DNA, 201 bp, Enterobacter aerogenes
atgagcaaatacccaagagtcggcagtgttgccgccaaaagcaaaaatacctctgccaaatgcaagtgcggtgcagttgcgaagtttaaaaccacggttgaagtaaatgttttccgtggtgatgacgaagtggtctggtcttgtaacgagcataaaaaagactgttcatttttggtcgactggcaaggcggtgcagcatga

SEQ ID NO: 103438 - DNA, 219 bp, Enterobacter aerogenes
atgacgccagaaatagaaaacgttatgcgcaatcaggggcgccaatgcgttgatgaaatccgccgcgccctgaaggccaagccaaaaccgaaatggaacgaggtggtacctccgatcctcaaaaagcaccacgaaaaaattaagccaatgggcatcagccttacggcattcgtcagcagcattggccgcatgaatgggcggtatggagtggaatcatga

SEQ ID NO: 103439 - DNA, 660 bp, Enterobacter aerogenes
atgagcatgaaatggtatgacctagcaaagtccctcatgaaaacgaagggcataaaccaggaagagctggcagaacatctcgggatcaccaaaggtgccgttagtcattggctaaacgcaaggagagagcccagcctggaggacatagctaaaatccttcgcttcctcggcaagaataatttttctgtgggtgctggcggcatgataatcgatgaaaacatcaagggtgatgttgagtacgttgggccatataagcgcggcaacgagtatccagtgcttagtagtgttcaggctggatcgtggcgagaagctatagaaccttattccatcaaagatgttgatttgtggcttgagtccaatgcacatatccaaggggaagcgttctggctgcttgttgaaggcgattccatgacttcaccagtcgggcttagcattcccgagggtacctacgttttgtttgataccggtcgtgagccagtaaatggcagccttgtgatcgctaagctatcagaatcaaacgaagcgacattcaaaaagctgattattgacgggggccagaaatacctgaagggcctcaatccccaatggccactagtcccagttaatggaaactgccgcattatcggtgtagccgtagaaaccaagcttcgccttatctaa

SEQ ID NO: 103440 - DNA, 219 bp, Enterobacter aerogenes
atgaacaatctaagcaagatcagacgtcgagcagggcttacacagcgccagatagcgacggagcttaatctgacggccggcgctatctgccattacgaaaacgggaaacgggatctcagtattgagcaatgccgaaagatagttgctgcgctcaacaaatacggagcttgcgtcagcattgacgacgttttcccaccatcaaaagccagtgccgcctaa

SEQ ID NO: 103441 - DNA, 285 bp, Enterobacter aerogenes
atggagaattcaacagcacgaaacaaacaccaggccaggaatattgagtcatggctgcataaccaaatcgcaatgaaggggacgaccaatgtggccaatgccatgggtcttacaaagtcgagcatcagtaaatggaaggaaacctggattccgaaaatagcaatgttactggcggtcttggaatggggagtggtcgatgacgacatgtctcgactggcgaaagaagtggcaagcctgcttagaaaagagatggccccaaagtgctcgaaacactttgaggcctga

SEQ ID NO: 103442 - DNA, 504 bp, Enterobacter aerogenes
atgaaagacaagctgctgcttatcagaaaccagttgaagatggggcacaggctgtcattcgctgaagcaatgctactgcagagagctatcgacattcttgtgtatggggctggcaactctccggcaattccggatggttacgtgatggtgccggtcgagccgacgaaggagattctcgacgagttcgactcaattatcgactatggcgcagaagactctgtagacgcctggcacagactgcttgcagccgccccgcagtcacccggcagtgaacccgctaccgtgccgggtgaatggattccggtaagcgagcagatgccgccaagtcgtcatgaggttttggtcgggcgttggtggggagagaagccacgttggtgttgcaaatgggcaacgtatatccctggacaccctgatgcacagagtagcggctggttgatccccggcgggtcatggacgccaacccactggatgcagctgccggccggaccaaaggaggtgaagtga

SEQ ID NO: 103443 - DNA, 234 bp, Enterobacter aerogenes
atgccagtccgactattaacaaagaaacgtccgagtgatattgcaccaggcgatgttattgaagtatttgatgagtggtatagggtcaggtacatcacttatcacggaatgattagtttatacctgcagcctgagaatgagcctctttcaccgttcacagggaacgatgttctgattatctcggtcaatgatgatgtagtgacatggattgatgttgaggtaaaaggtgcctaa

SEQ ID NO: 103444 - DNA, 777 bp, Enterobacter aerogenes
atggcaaaaccggactgggaggccatcgaatcggcataccgggccggagtccttagtctccgtgatataggcgataaatacggcgttactgaaggggctatcaggaagagggctaaaaaatttgactgggtacgcaatagcggtacgcaggtacgcaaaaatggtacgcaaagtggtacgcaaaagagcaaggtgcgtaccagcgaaaagcctgccagcgctggccgtacgcaaaaaagtacgcaaccaaaagccgaacctccaccagatacgaaaccgatacgcggggtgcgtaccgatccgccgaccaacccattccaacccggcaaccagcaggcgttaaagcatggtggttacgcccgccgtcttctgcttaaagatgaggtcattgaagacgcgaaagcgttgacactcgaagacgaattatttcgccttcgggctaacaaccttgtcgccgcagagaatattggccggtggttgaccaagctggatgatgctgaaggggaccaggaaagaaaggtgttgatggaaaatatcagcgccgccgagaaggcgatgatgcgcaataccgttcgtattgagtccatagtcggcacgcttgcgacggtaggaaaaatatttgctgatacggactaccgcaaggctgctactgataaggtgtcgctggaggccgatcgtcttcgccgtgatgcaggtattgatgatggcaacggagagcgtgacctcaatgacttctactctgacatccaaaccgacgctgaatccggtactgcgtag

SEQ ID NO: 103445 - DNA, 501 bp, Enterobacter aerogenes
atgaaaagcgggctcacgattcgggaagacaattacagcagcgttctggatgcgctgaagcagttgtcaggtactgatgtgctggtgggcattcccgctggccctccacgtgaggattcgccactgagtaatgccgaaattggttacctgcagtctaccggggcgaccgtggagattgacggcgatatcgtcacgctcccgccacggccttttctcgatatgggtatagaggattctcgggataaaaccaccgcccggttaaaacttgccgcacaggccacgcttgagggtaatgccggtctggcggagcagcatcttgaggccgccggacagattgcccgagacgcctcaaaagcggttatcggtgacggtgaccgcctcacgcctctctcggagaaaacgctccagcgccggcgagcgcagggattacctggcgacaagccgctttatgcgcatggcttcctgttgcgggcgattaactacgtcgtgaggaaaaaataa

SEQ ID NO: 103446 - DNA, 387 bp, Enterobacter aerogenes
atgccgatgctcgatgtgacagagatcctgttagacccggattttgtcgatctgacgctggtatgtcaccggcaggtgcagacggttgatgaggataacttcccggttaacaccgcgcaggatatcccgttctctggcgtggtgactgtcgaccgttctctggaagcgaagcgcatggccgccggacagaacatcgacggggcgatactcatcgtgacgcaattccgcctgacgcagggccagccaggtttagacgctgacactgtgacgtacagggggcgtgaatatcgtgtgacctttgtcgacccgtatacggcgtacggtgccggtttcgttcaggcgcattgcgagctgatggaattcgacgggggaacgccaagtgagtaa

SEQ ID NO: 103447 - DNA, 543 bp, Enterobacter aerogenes
gtgagtaatgacagcactacggcgggttacctgacccccatcggtgactctccgccctacgatgaagatctggaacggctaatcagtcgctgggtacggggcgtaaccgggctggctgccacgctggtttacccgcgctggaccgacccgcagcaagccattcccaaaaacggcgccacctggtgcgcgttcggtattaccggcatccaggaggacttcaacccagcgtacgtgcagggtgaagagaacaccgagcagtggtcgcatgaaaccatcagcctgatcctctgtttttatggcccgcaggggctggcggcggccacgcgctttcgtgatggtctcctggtggctcagaacaacgacgaactgaaccgcgtcgggctgaccttcctgcagcatgggcggatcctcaacctgcccgaactcatcaataaccagtgggtgcgccgctacgatatcagcgttgacctgcgccgcaaaatcatccgccagtacggcattaaatcgctggtcgacgcgccagtgcaattctttggagattaa

SEQ ID NO: 103448 - DNA, 1146 bp, Enterobacter aerogenes
atggcacagggcttacctgtttccaatgtcgttaatgttgacgtgatcatgtcaccggtagcggcaacggggcgtaacttcggtgcgctcctcattctgggtacctctacggttatcccggtcactgagcgtattcgccagtattcagccattgaggatatcggcgatgattttggtgtcgattctcccgagtacgaggcggcgaccatcttcttttcacagtcaccaaaacccactctggtctatattggccgctgggcgaaaacgctggcggagggtgaagccggtactgtagaaaccctgctgcaggcggttaatgcctctctgcaatataccaactggtacggcctggcgattgccgatagcgccgatctggttgaagcggatgtgatttcggtggctgctgctattgaggcatccagtctgagccgtattctggcggttaccactgatgacgcgaatgtgctggtatccggtaataccgacaatatcggctacaagctgaaggcggcgggctactcccgcacattctggcagtacagtgccagcagcaaatatgccgctatctcagcctttggtcgtgcgttcactgtgaactttaccggcaacaacaccacgatcaccctgaagttcaagactgagccaggcgtgacgtacgagacgctgacgaccgcgcaggcatccgccattgatgccattaacggtaacgtctacgtctactacgccaacgatacggcgattatccagcagggcgtgatggcgaacggtgatttcttcgacgaacgccacgggctggactggctgcagaactacgttcagaccaatctctataacctgctgtacacctcgaccaccaaaattccgcagaccgatgccggcgttacccggttaatgaccaacgtcgaagcatcgctggatcaggcggtaaataacgggctgattgctccgggcgtctggaatggtggcccgattggccagattgaatccggcgataccctgaccaagggttactacgtctacgcagatgcggtagccaaccaggcacaatctgacagggaagcgcgtaagtcgccggtgattcaggcggccattaaaatggcaggggcgattcactatggcgacgtacagatcaacgtggttcgataa

SEQ ID NO: 103449 - DNA, 429 bp, Enterobacter aerogenes
atggaatttgaaatcaaaggtgtcaactaccgtaccgccaaactcgacgttttccagcaactgaaagtcagccgtaagcttctgcctgtgctggccggtctggttagcgagttctcgacgctgaaggctcaggcggctgcgggtaactcgggtgctgtgctggaaagcgtactgccgaaaattgccgatacgctggccgcgctgccggacgaggacgttaacgcggtgatttacccgtgtctgggtgtcgtgtcccgccagcacgaaaagggatgggcgaaagtcttcgatcagggcgtactgatgttcgacgatatcgatctgtttacgatgctgcagctggtggcgcgggtggtcgccgatagcctgggaaattttttgaaagaactccccgacaacgagaaggtggccccgtcgccgcaggcttaa

SEQ ID NO: 103450 - DNA, 600 bp, Enterobacter aerogenes
atggatattctttcaacccttttccagcagcggagccgccgtattggtctgatgatacccgatgtggtggtttcagagcgtcatagcgatgctctggaggtgacagagcatccagttgaaaggcctacaagcgcaggcacagggttcattgcagaccatgcgtatcggcgcccgtcagaagtcgttatggagataggctttgctggtggtggttccttgctggatttttatgatacagcaggcatcgggctgtctacgccccttaacaacatggggcctaaggaagtctatgctgagctgctcaaaatgcagcaggaaaggcagttgcttgatgtgaccaccgggaagcgtctttataccaatatggtgatccgctctctggatgtgacgaccgaacgtaccagcgaaaacgtactgatggcgacagttacactgagggaaataatcaccagccaaacgcaggcagtcagcgtggcagcgaaggaaaatatgaaagagggggtaaacacgtcagcggtgcaaaattcaggagtaaagacgccgactccgaaagatgagtcgctactaagccggtttgtcggcttcatctcgggaggttaa

SEQ ID NO: 103451 - DNA, 303 bp, Enterobacter aerogenes
atggctgtttcagaaatccctttgtcaccagaaaaccagcgattctccatatctgtggcaggtcaaagtctgcaaatggctgtcacctggcgtgctgctttctggtgtctggatattatggacagtaccggggctgacctgataaaggggatcccgcttatcaccggcgccgacctgctggcgcagtatcgctatctcgggcttggcttttcgctttatgtcaattgcgatgacccggcaaatgataatccaacccaaaccgacctcggcattaaaagccatctctacgcagtaacggagtga

SEQ ID NO: 103452 - DNA, 1029 bp, Enterobacter aerogenes
atgtctcagaactggatgcggcactttgagctgcagcttattgatgataagggtgatgggatttcgctgtcggattttaaggtgacgtttaatatccagaagatgcccgcgactatctttaacggattcgtcggtaacttcaaaatctacaatctgtcgccggagacacaaaaccggatcatgggtaaagagtttactcgtgtaagggctattgccgggtataacggcacagcagacagcagcggcaactatcctgataaaaatgtggggatcatctttaacggtgatattcgctttaccgttaccggaaaagataacgtcaccgatagttgggtgctcatccagtgtattgatggctgggaggggcatctcaacgccagcgtgaaaacgacagtatcggcaggctggaagcatgctgacctgtttgatttgggtatgcagtcccttagcccttatggcattacagagggaagcaggccggattttggtccaactgtattcccccgcggccgtactatttatcagaacactggacgcctgatgtacagccttgcagggcaatgcaaggctaactggtggtacgaaaacaaccaggtgcatattgttcctgatgataagtacatacaggaagcgattgtactgaacgccaatacgggcctgatcggtatgcctcagcagacgatgggcgccggggtaaatgtgcgctgtctgataaacccgaatattaaacttggtgggcttatcagactggatcaggcctctgtgtatcgtcaggctctcggaaatgaccaggttggccagtcaccaggtatcttaggcgaaagtaccacagacggtaacatctatgtcgatgggcttcccgggtcgcagctggcggcaatcaataccgacggtgattacattgtcggcagcattgactatactggcgatactcgcgggcaggcgtggtatatggacctgctgtgtctggcgaaaggggctcgggatttgctcaactcaaaaggtttggatgcggcgcaatactcatga

SEQ ID NO: 103453 - DNA, 345 bp, Enterobacter aerogenes
atgaagaaaatcattactgcttgtattttttccctcttcctttccgcccctgcttttgcggatacttcctgcggaccgtttgggatcaactggaaggcgcaggatggatttgcgcggataaacggcgctaagccagagtcgcagaagattacctttctaaaggtaaaaaatgattacaacaatgtgaaaatacagtggatgcttcctgacgcaagatctgggcgctggcttggaatggattttgtcgcccgaaacggcaagcctatcctcaacgtcgaagtgatccgcaagaacatggacgagcccagagagttctggacgtacgactgtcggaaggtgaagtaa

SEQ ID NO: 103454 - DNA, 213 bp, Enterobacter aerogenes
atgagcttaatcactaccgcttggtgttttaacgttaaatgcattgtcggcgggattttgtggggaaaatctttctccatgaacggggtaattaataaaaatatcccccgttctctcctgttcacatttcaggtcttcgcaagggataggctgatgatcgatttttacaccggtgagaaaattggacataacgcttacctaccctacctttaa

SEQ ID NO: 103455 - DNA, 567 bp, Enterobacter aerogenes
atgaacgcttacgactacaagaaagcagtttaccggatagcaaggcatgaggctggtcattggcttgcagcctacatcttgggatgggatccaaaaaaaattgaactaaaagttcccagctcggaaaatagtcattatggctatgcgttatgcgcctataaagtaaatttagagactataggtgatgtcagagattacgctcgtggcagagttaaggtgctctattgtggtgcatatgctgatggttatgatggctataattttgactatgaaagaatagggcatgagatggggcgcacaggtggtgcgtattctgatttttggaaagccgaagagatatatttcttttattataattgccttgagagtaaaggcgattgggagtacgaatttaatcctattgtgaacgacgttaaattgttagtcagaatgcatcatgacttccttgattctgttggaaattatgcaaaagataaagctttgaacatcggtgatgttatagagataactcctgatactctcaaaaccttgttcatagaaagtaagataagactcccttcttattag

SEQ ID NO: 103456 - DNA, 654 bp, Enterobacter aerogenes
atgcccgtagcactaaactcccagctcggcagtaaagagcaggcagacgcccagctggcgcaggcgatcatgtctgcaatgcgcgtctccatgcctggcatcattcagtcgtttgatccggacgccgtcaccgctgttgttcagccagccattaaaggcgcagagcaggacgaatccggcgccgaggtatcggtaaacctcccgctattggtagatgttcctgtcatcttccctcgcggtggtggctgcacgctgacttttcctgttaaggctggtgatgaatgccttgttatctttgcggaccgttgtattgatttctggtggcaaagcggaggtattcaggagccagtagacgagcgcatgcatgatttatccgatgccttctgcattgttggtccgcagtcgcaggcgaagaaaatcggcggcattagcactagcgcagtagagttgcgcagtgatgacggggaaacaaagttgagccttaatcctgccagcggagctatcaatggcacggcaccgggaggttttaacctgaacgggcttaaaattcttcctgacggccgcctgcagctggtggatggctcaatcgttgataagcatacgcatggtggcattgagcctggtggcagcagtacagcaccactcggaggatga

SEQ ID NO: 103457 - DNA, 867 bp, Enterobacter aerogenes
atggcgactaacgattttaaacccttcgctacgggtagcggggcaaacgtattatcacaggctgattatgaggcgctatccgctctcgcgaccgggtttctttccggcaaggcctcgtcagcgcaagtaaataaagccctacggcaatcttcgacaatggcagcggtccttgctcagttcatggcggatagtaccggtagcgatgtcctggataatgggaatattgccactttactaaatattctcaagtccgcgcttaacaatcaggcagaaggacgcctgctccgcattcaggtttttaccgccagcggggcgtgggtaaaaactgctggcactaaaaaagtcagaatcaaggcatggggtgcaggcgggggggggaaaggaacggacacagcagggacgggggcatcaagtggcgcaggcggggcttatgtggagggcttgtatgatgtaagtagcatcactggagcaaatattgttatcggtgctggtggcgctgctgttgtggcaggaaattccggaaacggtggcgatggtggtgatactaccattgttgatctgggaatttctgcgggcggcgggaaaggtggcaattcaactggtaactctgctggagggactcccggcgcgccatctgtagggactattttttcagtggtcgggcaaggtggacagggggcgatcggcgccttgggcggtgtgggtggagcgtctcacagcagttatggtggtcttccgcacgtcagtacatcaggtgatgatggtttctttcccggcggcggtggtgcaggtgcatcgtatgattcagtagccagggcgtcagggaaaggggctaatggctacgtcatcattgaggaattggcataa

SEQ ID NO: 103458 - DNA, 198 bp, Enterobacter aerogenes
atggcaggaaattatgcggtcattgaaaacggaatagtcatcaacataattatcgcagaaagtggctatgagtacgctggtgcaggccttgtagaatatcaagaaaacatcttttgccagccagggatgttttataacaaagatgatggtttattttatgatgacaaggaattctcaaaaataaataacattatctaa

SEQ ID NO: 103459 - DNA, 2142 bp, Enterobacter aerogenes
atgagtgaatatgataccggcaatcctgtgccgtctgcatcaatgcctgatgcatgggataacatgcaggctattgataagttcgttaatagcagcgatgaaaccattaccacacgcacgggcgagcaattagataccttgcatggcgttaatgttaaggcggacacccagttaacgcagcagcaggcagactttgaaacctcgcaagtagaaagggatgctgtggttgaggaaaccaggcagaacctgatccctttaagccgacagtacatgaccctggcggaagctcaggccgatatcgcgaatatcccagagggctctaccacgtattaccgtagcccggatgacagctcgcttgcagtggaggtaatcaataacgccggtacgctgcagccgacggggcgaaaaatgccgtctcaggaagctatagaccatgctatttcccttgtttttaatttaataagagataatagtttaaatggattctactttatggcaaaaaatggagttattgccaggcttaatggtgacggcacttttgagtgctattcagtaaacgtaagtgacattaaagttgacggaggaataattactacaggaacattgccgttctctgttcttgcaaataatgggtatcttttaacgcttgatgaatcggcaaagctgagtggagtagaggctgagtttattgaggcgacctttgctggaacatcactaagaaatagccattttgcttttgattggcagggagttaatggtttcttaatgactcttggtttcgatgggaagctgacaggtatagaagcggattttcagcaattaaaaatagacggggaagatgtaaaaaatcttatttcaaaatctggagaggactctattttctacccagatgcgccaggaattttggctggttacattcatacggcttgttacgggcagtcgcaaaatatcggcacgacaaatggagttattcactcatctccttttgatagccacagcttgatgctcaatggagggctgcgctcttatgggactggagggtatgacacttcagtaagtcaagccaactattatacatccctaaaatcaatgtatgaaattagcgtcaactctacatatggtgaaacctatatgtcagggcacgctatccgcgctcgctcattcctggacgcagcgtacccagatctggacgtgaaaaaaatatacacagtatccggccaggggggagcggctattgctgacctgataaaagggacggcggcgtacgcacggactctgacgcagtgggttgcgctaattaaccttgtccagtcgatgggtgagaactaccgctgcgcttcaatgatttggtctcagggtggcagcgatgacgggctggcaaccaacccagacacctgggaatccgccgtcaggcagatgcgttcagattttacggcagatattaaatctcagacgggtctgcatgtggacccaccctatatcaccaaccagattaataactatatgcgctatccggcgctgaacgggaaaccaaatattggcctgcggcaatataaaatggtaacggaggccgacaatgatttttatggttcctgtccgacgtacattcttgactttatcgacgtggctcactggacaaaagagagccaggtcaaagttggcgcgtataacgagaaagtcgagcgaaacctgttgctgacaggtggcacatggaaaccagtgcatccgattaaaataacgacctcgggtcgattcacaacggctaagtttaatctcccggagggtggctctcttcagttcaatacggaaatcgttaacgaagttccaactacattcggtttcagcgcggaacaatctgacggcaccgctattggcatcgaccgagtgcgactgatagccaacgacacggtagaggtacggtataccagcacgccgttgcctggcgcagtcctgatgtatgggcagaccggacaggttggcgaccctaatgcctctaatggttcaggtctgggtcggcaaaacggagttcgcggcaacctctgcgacaatgctggcgacaacgataaaattcaaattaatggtatcgactatccgctccataactggtgctggatgttcactgcagatatgggagcagaataa

SEQ ID NO: 103460 - DNA, 783 bp, Enterobacter aerogenes
atggctggtttatcgtttattggtgattttgttgcgagcagagtgttaaatattcagttgcagcatgttctttcttcccggatgaattatctggggcttttcggcaccgacctggctacatcgaaaatcaactcggcgcctggctcaacgcctaccgctgtggcagcatatcagccggaaaacatggtattcggcagtaattatctggcgtcgtcatcgtcgaccctgtcggctggatttaactctacagaacagccgcgacaggtggacgcaacattgttctgtgcatttaatgcaggcgaaacaggctgggtatcgggaacggattatactgccgggcttatcaacctttggggtgacgataccagaaatggcccgggcagaatgacgatcggcctgcataaaactgcggctggcgcatcgtatatcgttctgttgtgggggcagggtgggactaacccacctcttacttgctcaattccattcgactggacggccgcaactggaccgatacttgtggcggcatcgcgtgactcatcgggagggatgcggatggagatgcgcaataacggacaggcgctttattcatcagtgaatgcgaccccgatccctatccctaaaaccagcctgaactggagggggttcgtcggacagttgtcaacgggggttgttaccgggcagagggtttatgcagcagccatctgggatgctgcaatgaccgaagcccagttgagctcggagctcgatgtcatgcaggttaacctggccagtcacctggcttga

SEQ ID NO: 103461 - DNA, 504 bp, Enterobacter aerogenes
atgcgggaaatagttgtggtgccatacgatgaaaaatggccagaaatgtttaaagctgaacattttctgatacaagaattactgggagacgtggttaagaatgttcatcatatcggtagtacgtcagtgcctggactctcagcaaaacccgtaattgacatactgctggaagtttccgacataaatgagctggatacctatggttctgcaatgtcccatgccgggtatgttgctcgcggcgagaacgggattccggggcgtagatatttcattaagggaggtgatcagcgtagccaccaagtgcatgcatttactgtaggaaatatgcagatattaagacatcttgcctttcgtgattatcttagagaaaacagcgacattgcagagaagtatgctgaggtaaaacactcggctgcattactcagcaggaacgatgttcatcgctatagcgcgctcaaagcgaattttatagagcatcacctccaactcgcgctaactgcttga

SEQ ID NO: 103462 - DNA, 666 bp, Enterobacter aerogenes
atgaccgtcgctgatttcaaacgccccaaactggaactcccgaacggggcagacaaactgctgttgcactcttgctgtgctccatgttccggtgaggtgatggaggcgatccaggcttcgggaatcaactacaccatcttcttctacaacccaaatattcaccctcagaaagagtatttgattcgtaaagatgagaatattcgctttgctgaacaacacggcgtaccgtttatcgacgcagattacgacacggacaactggtttgagcgcgccaaaggcatggaatgggagcccgagcgtggcatccgctgtaccatgtgttttgacatgcgttttgagcgtactgcgctgtacgccgctgaaaatggtttcagcgtaatcagtagttcgctgggcatttcgcgctggaagaatatgcaacagattaacgactgcggacagcgagccgccgcgcattatccgggtatggtgtactgggattataactggcgcaagcagggcggttcgtcccgcatgattgaaatcagcaaacgcgagcagttctatcagcaggaatactgcggctgcgtttattcactgcgtgacagcaacctgcaccgtaaatcccaaggtcgtcctcttatcaaaattggtcagctttactacggtaaagaagagcaggactga

SEQ ID NO: 103463 - DNA, 504 bp, Enterobacter aerogenes
atgaatttgtatatgttttatgtaggcggaaacgccggtaaatcaaatattgaagtgcatgacattcagtttgttgcagccagcgctccagaggatgcatggcctgcgctgcgcgaagcatggtttggcgatagagataaaattcatattgatggttatagccgtgttacttgggccgacgggttttcggtctcgctttctccagagcctccccaaaccacgcaaagattattttttgtcaatgcgggcggttacaggccggatacacttgccgagctgcatgaatacgatctgttcgtcgccgaaaatgcccgccaggctaaagagaaagcgttgcagacgctactctgcgatgtcgatcaacagcataaggataatttaaaagaggttgacgactgtctgttgcttgaaaaggtcggagaattgtttattcatctgacgccctgtgaaacaggatgtcgcgatcttccggagtggcagggatttctacctattggagcctaa

SEQ ID NO: 103464 - DNA, 291 bp, Enterobacter aerogenes
atgaataatcattttggaaaaggcctgatgaagggtgtgaacatggctggtccctgttctgaagcgatgcctgcgaaattttgtaatgaatatatacgtggatttgtaataggctattgctatcagctggaacagaaaactggggagaaaagcgttgcagctcttgaagcgggaagactgacgaggcgatacaatcttgacagggagatcatggcagaattcttccaggaattcagatcggataaatttttacactatttcaacattggatattatgatggcttgaagtag

SEQ ID NO: 103465 - DNA, 432 bp, Enterobacter aerogenes
atgtcagtttccgctcgtaatcagctgcacggcaaagtttctgcgatacaccccggttccgtgaatgatgaaattgaaatctcccttaatgaagggggaaaactagtttctgtagtaaccagtaacagtcgaatcaggcttggcctggagcaaggaaaagaggttgttgcgctgattaaagccccatggattattcttgcttctgaggataacaatttaatgttttcagcccgtaaccagttttcaggccaggtcacctcacttgaaaaaggcgctgtaaacgcaaccgttcatattctgacagatgacggttcaaatcttactgcagtcattacgaacgaaagcatgaaggagatggatatcagcgaaggcaaaagaattatcgccctgattaaagcttcttccgtgctgcttgcggtgaaaaaaaactaa

SEQ ID NO: 103466 - DNA, 207 bp, Enterobacter aerogenes
atgccgatgaaacgctcatggtttcaccatcacgactgcacaacccagcaggccgatgaactgatggataagtaccgcaaacgtggggtaaaggtcgaacgtagtttaaaccaagattttacgacctggaccgtcagcgctcagctggtggaagacaagaatccaccgcgccctgattcccgctggcgcaaccggatgtggggttga

SEQ ID NO: 103467 - DNA, 222 bp, Enterobacter aerogenes
ttgcgtctgtatgtcgctcagggggatgaagtggagctggatatcgccgaagtggtggacataatcaggcaaggcgggaagtttttaatttcgagtgaggaaggaaaaataaccgggctcgaaaaggtaagaaaaaaccagtttttgctgactattgaagaatttaaagaactggctaatgatgctggttgcattgacgaaaccgagagtaagctgcgataa

SEQ ID NO: 103468 - DNA, 234 bp, Enterobacter aerogenes
ttgaaagttgaattaaccattgatcgcactaaagaacttccaaagggcgcgctgccagcactggagaaagagctgctgaagcgccttaaccatcagtatgagaattgcagcctgataatccgtcgtgccggatctgatgggttaagtgtatttggcggtgagaaagacgacaaaaagcaaatcgaaaagatccttcaggaaacctgggaaagcgcagacgactggttttactga

SEQ ID NO: 103469 - DNA, 279 bp, Enterobacter aerogenes
atggctacctgcccaacatgtaatagaactattaccaatttccattgccctgattgcgaagaaaacgagcgcggcaagacgcggcatcataacctcagcaacaatggttcatacggttcctacggttcttcacctaacaacacgtattacgtcggatctggaggtagcgggaagaaactaccagctacgcctggtgaaatagttttcaatgtcatcgctgcgattataatcatcagtgttggtctgtttgttacctaccaaataatgatttcggcgtaa

SEQ ID NO: 103470 - DNA, 1392 bp, Enterobacter aerogenes
atggaaaacactcaaataaataacgcagatttcagtccaaccaaaagattctttgtgagtatgttaacgcgtgatatagaattaaacgatgcaatacttgacttactagataactgtgtagatggagccttaagaattaataaatcctcaaaatcgccaaaaccatatgatggattttacgcaaaactcacaatcgatgaaaataactttactattgaagataattgcggagggattcctaaaagctttcgtgattatgcattcaaaatgggtcgtcctcataaggaagatgaagaaagcgaaggaactgttggtgtctacgggataggtatgaaacgtgcaattttcaaaatgggaagaaaatgcactatctattccaatcatcctgaaggagcctttaatattgaaatcactccacaatggattgatgatggtactgaatggctaatccctatgactgaaacaccattcaaaagtgccagtgaaaagggaacaacaattagcattagtgatttacaaaaaattgtagcacaaaaatttagtgagaaaagttatctaagtgacctttataatcaaattaaacactccatgtcttttatcattcagaaaggatttagaatcgaactcaacggtaaagttgttgagcataaccctatcaatattatgacagatgagtcgagtattgaaccttatatctacaaagcattaatagatgaagtaagtgttgatttagttgtagggttttataaaaacttagaagatgatagtgaagatgtgatggtaaaaagaaactctgatgatgcagggtggacaatcatatgtaatgaccgtgtcgttttatattgtgataaaacccacttaacaggctggggatttgctaatgtcccccgattccatccacaatttaatgcgatttctggtgtagtaagatttagcagtaagaaccctgaaaaattacctatcacgacgaccaaaaggggcgttgatctgagttcaactctttataatgacgtaagaaataagatgatggaaggcatgcttatttttacaagattcacgaaccaatggaagggggaatatttagaagaaggtaaatctttgctaaaaaatgcaagtatttacgaggctcaaagtctcttcgacaaagatcaagagtcagcccccatggataaaaaagataactggactaaccctaacagaaatccaaacgaatggcgttacactccatctttacctacaccacgcaaaaaaaacacatcagccaaaatagtttttaatcgagaaaaaacggatattaatttaatcgcaaattatttttttggccatgaagatgttagtgcatccgaagtgggcatgaaatgctttgatactattttatctgaggtgaaataa

SEQ ID NO: 103471 - DNA, 990 bp, Enterobacter aerogenes
atggctgggggattcattccatatcatcttagacataataagtctattgatagagaggtattcttagagggattatctttgttatctaagaaaatagacgtaaaggaatatacatacataggttttggggggccaatgcttgaagattttagaattatgcatagccgcacctcactttcaaaccttatttctcttgaggaagaagaaccagtacatataagacaaaagtataacttaccatacaattgcatagaatgtaaattaaagtcagctcatgactttatcattgaccataattttttaacacccagcatcatatggcttgattatgcttcagcaaaaaaaatccttggtgatcttgatgatattcaattattatgcaaaaaagttaattcatatgacattctaaaagtcacattccctatcaacccagcatcatattatcaacgaaaaattggtgagtctattagcgactataagaacaattttttgaaagctttaaaaacgatgttgagcaaagcttatctcgatttcgatttagagataagtgacaccgatttatctgataaaaaaatcacccaacttttaataaaaataatcacgaatgcttttaaaatttcattagaaagaggccttaccagtcgcagggaccaaatgaagtttcatcatttaaccatcaataaatacaatgatggctctcatacaatgcttacaatattcggagtgtttttgaaagatgaagaatatcaggagttgaatgaaacttgtaatttagaaacctggaacttttactcaaaaaactggcaagacattcaggaaatagccataccaacattaacgatcaaggagaaaattaatcttgatagcacattgccagataaagaaagctacctggcagctgcaaatgaatttgctttaagcaagcatgattcagagaattattttaaatattatcgcctataccccaactttcaacgggtaattgtctga

SEQ ID NO: 103472 - DNA, 1050 bp, Enterobacter aerogenes
atggcatcacatgcgcttaattttccaaatagtgtacacatacaggaagatatatcatcccttacggctaattatatccgagaaagaataggttcacatgtgaaaattgatggggttatcggtggcccaccttgccaagggtttagctatattggtaaaggggatcctaatgactcaaggaatgagctttatactcatttctttaggcttgtatcagaatttgagccatcattttttcttgctgaaaatgttccgggaattatgcaagaaaaatacatgcctctaagagagagtgcattttcattagtaagtgaaaaatataatattcttaatccaataaaagttaaagcttcagattatggggcgccaacgattaggacaagaatgtttttcattggggttaaaaaagattttggtaatttaccagttgacttatttaaacccaataatattaagtctgtgactgtaaaagaggcattgcagggcttgcctgaatctattgacaacagttggcagcgagaagaagatggatggagagaaataacaagaaataaccaagggcaattctactcccatctatggggtaaaattccggaaggagtaggagatattgagtcgatagagaaattagcatctaacattgtgtcgggctgccttggcactattcatagtcccaaagttattgagcgctataaaggtttagctttcgggcaagttgataaaatttcccggtctgccaggttggatcctaatggtttttgtccaaccttaagggctggtacagcgagagataaaggcagctaccaagctctgcggccaatccatccatatgctgatcgagtcattactccacgagaggcagcgagacttcaaggattcccagattggtttcgctttcattcaactaaatggcatagctttagacaaatagggaatagtgtatcaccaatagttgcagagttttttttagaaaggctgcacacctatctagtgaatgaaggtgtacagcatgttgtttcagacaattacccgttgaaagttggggtatag

SEQ ID NO: 103473 - DNA, 735 bp, Enterobacter aerogenes
atgaccagtaaattaaccaaagaacgcctcctggaaatcgctgaagatggattcctgaagcatggcgaaagcaaagagttggcccgcatggcgctggccgtaaaggccagcgagccggtgatactgtaccgggagcgcaatccctacaacggcttaaccacaggctggcaagagcttaccgaaaacgagttctcattcctcaaagagaataccggggaaaatgcagagttcctcacgctctatcgccacgcgcagccagcgccggtagtgcctgatgcatacgtgcgcgatgagcgcggaagaatgatgcttaatggcgtctgcgagccgaaaattggctttggtataggctggaacgcctgccgcgccgccatgctcgaccgacaacttgtcgaccatgtcgatgaggagtcgctaaccagcatcaatcccgcgccagctatgggttcgttgtcaaaaacaggtgaagtgctgcacaccaactctccggcgcaaggcggcaactcttcggtaattcctgatacatggattccggtaagcgagcagatgccaccaagtcgttatgaggttttggtcgggcgttggtggggagagaagccgcggtggtgttgcaaatgggcaacgtatattcctggccaccctgatgcgcagagtagcggctggttgatccccggcgggtcgtggacgcccacccactggatggagttgccagccgccccgcaggaggtgaggtga

SEQ ID NO: 103474 - DNA, 222 bp, Enterobacter aerogenes
atgactaagtatgaattactcgattcaaaaataatgagcaaaattgatgcgcaccctacgccattttccagtctgtacgtcagggatgtagcagaagaatgcgtccgtattgcaaaggatgagaataagccagaacctttccgcattctcgatcgccggcttcaggcgctacgtaaagcgggaaaaatccgcagtacatccaagggctgggtgagggcttaa

SEQ ID NO: 103475 - DNA, 261 bp, Enterobacter aerogenes
atgaatcacatcgaatttattgaaaagaatgtccgcgaggaacttcttcgccagggcttcacgcaagcagtggctcaggggggggcataccaggcggtcgatatgtacaagcggatgtcacaggcaagccgcaaagggggaatgtttgacgatgttatgcgatacgcaaagttatgggctgagaagcagaccagcgcggctgaacgccgggaagcaaagcggaaagtgcgaaagggcggcgaccaggctgggttgttctga

SEQ ID NO: 103476 - DNA, 537 bp, Enterobacter aerogenes
atgcaaacactatcctttcaacaaaataccggattcaacaccggcgctctgataaagcgaaatcaacagagagaggcagatcacgacgcaattcgttctgccgttcgcgcctgggctgcagctgagggccaggatgttgtgtcggcacatatcatcgatgagtggcgccagcagggtggcgaggagatcgcgttccctgatgatatcagccgtgcccgacagaagctttttcgctacctggacaaccctgccgattctgagcgctatcgcgagtacgttcgccttcttaccccggcaatcatggccgttcttccgctggagttccgacatcgtctgatgcctcaggacgatattttgtcgcgcctgtcttcggccatgaaggaatgcgctgaagcaaagcaggcggtgatgctgaacgcgccagagcaccagaaactgaaggaagtgagcgaggggattgcgtcgcttttcaggctaatgcctgagcagacaggagcgctgatgacgatcgtgagctcaatgctcggcgtgatgtaa

SEQ ID NO: 103477 - DNA, 204 bp, Enterobacter aerogenes
atgccctcaggcttccttgactcagacacctctggttcccaaagcacaccgccaagtcttgtgttgagtgaagaagagcttaagctcattactttttttcgtggattccctgactccgcaaagaaagaagcgctaattgaatttgaatctaagttcaataaatacaacgaacttttcaaagagttactggcttcacgcagttaa

SEQ ID NO: 103478 - DNA, 1125 bp, Enterobacter aerogenes
atgacttcaccgggtgctaattccaccgaagaaggaaccaccagcaatgtgcagatggaaacggctcagccggtcaaagacgaaaatgataatgcggtatcagcaggcaaaggcgctgatgagcctcctgcgcaaacaactgccgtgaacatgagcgaaatactggctgaacgctgcccggatctcacagccgcagtgctgaatagccaggtttccgagagtgctcgtagcgatgaaaaggaagaggctgaacaagcagcgccagcatggccggagtatttcgagcctggtcgatatgaaggcgtaccaaatgaggtctaccacgccgctaacggcatcagctccacgatggttaaagatgcgcgggtatcgctgatgtatttcgaggcgcgccacgtatccaaaaccatccagaaggtacgctcccctgttctggatatgggcaatctggtgcatgcactggcgctgcagcctgatcagctggaaaaagaattcagcatcgagccggaaatcccggaaggcgccttcaccacgactgcgacgatccgcgcgtttatcgacgaatacaacaacgggcttccgccgctgttgagttctgacgacatcaaggcgctgctggaggcgcacaacgccaccctgcccgctccggtaccgctgggcggcgacaaagatgcaattggcattgcgtatctggaattacctgacgagttcaagcgaatcgttggtgacgataaaaactttaccgcgtcagcaatgaaggcctgcatcaaagaatacaacgccaccctgccagcgcctgttaaaaccagcggcggccgtgatgccatgttggaacaactggcgattatcaatcctgacatggtcgctcaggaagcccagaaggcgcagccgctgaaagtatcaggcaccaaagcggatctgattcaggccgtgaaatcggttaaaccggatgccgtgtttgccgacgaactgctggatgcatggcgcgaaaacccggaaggaaaaatcttggttgtctgttcctttaaatcaaaccattcccattttgctgttctgatctctgtacttcgacagccagtcataatgagaaacttcattatcaattgctgcctatatttcatctga

SEQ ID NO: 103479 - DNA, 1632 bp, Enterobacter aerogenes
atgaacaacgattttagtaccgttatcgccgccatgtcggtagaggaaaaagtggcgctgctgaccggcagcggcctgtggcgcacggcatcgatgccgcagcacggtatccccgatatcgtgatgaccgatggtacctacggcgtgcgctatagcagcgcgcaaatagatggcaatgaaaagtggagcatggatgacttcatctcggtgattacccaaaccgccgaccaggccagcgccgacgagcctgtcgccaagggcggcagcgaagcgttgttcagcgcctcgctgccggccacctgttttccgaatggctccagtctggcctgtagctgggatgttgaactggtacgggagatgggcgaagcgctgggtcgcgaatgccaacagatgggggtgggtattctattggggccgggaattaacattcggcgcaccccgctggctggacgcggctatgaatactattcagaggacccggtcgttagtggggatatcgccgcggcgctgattaacggcttacaggccgaaggcgtcggcgccagccttaaacattttgccgccaataactccgagtatcggcgtaccgaaatggattcgattattgaggagcgggcgctgcgtgaaatctatctcgccggatttcaacgagcgatcgccaaatccaagccctggacggtgatgtcttcttataatcgtcttaatggcgttcaaacatcgcaggatccgttcttactgacccaggtattgcgtgatgaatgggggtatgacggtctggtgatgtccgactggtacggtattaaagatcgcccggcatcgctgcttgccggcaatgacctggcaatgccggaaacccgccgggacaaacaaaccctgctggcggcaatctcctgcggggaggtaccgatgccggtggtcgaccgggcgtgtctgcggatgctggaactggttgataaagtgcaacgacatcgccggccgcacacgcgtgctgactttgccgcacatcatgcgttatcgcagcgtttagcggcagaatccatcgtattactgaaaaatgaagacaacctgctgccgctgaagccacacaaaacgccgcgcatcgcggtgatcggtaaacccgctcaggagccggtcattcagggctcgggttgcgccactacggttccctatttactcgaccgtccgctggatgagattttcgatcttgccggggatgactttaaggtcacgtgggcgccgggcgcgccagacgacaatcaaagcgacgagcaggcgctggcgcaggcgcgtgacgtcgccggagccgccgatgtggcagtgatttttgtcagcacggcggtcggcgaagatggcgagaatggcgatcgccaggatctgaatattcttcccgcgcacgaacagctgatccgtgaggtcgcgggggtacagccaaacgtggttgtggtgttggccaacagcgatgcggtggtgatgccatggcttggcgaatgccgggcgctgctggaaaccttcttcgccggacaggggatggggcgcgccgtggctgaaattctcttcggtaagcgcaacccctgcggtaagctaaccgtcacggtgccaaatactctcgaagagacgcctgcctggctgtag

SEQ ID NO: 103480 - DNA, 324 bp, Enterobacter aerogenes
atgaaaattctacctgctacaatttcgctggcggcgaagccctgcctgccgcccgttgcagtctggcaaatgcttcttacacggctactggaaaaacactatggtctgaccctgaacgatacgccgttcagtgatgaaaccgttataaaggaacatatcgatgccggtatcactctcgctaatgccattaactttctagtggaaaagtacgaactggttcgtatcgatcgcagagggtttagctggcaagaacaaacgccatatctcacgattattgatatcatgagggcccgccgcgatctgggtttattaaatcgtaattag

SEQ ID NO: 103481 - DNA, 864 bp, Enterobacter aerogenes
atgaatcaatttgaaggttcacagtcactgcagcaatcgctttccggcctgccgcaatgggcatcagagcatattctgcatcagataaaccagcttattcactatgagccggtgataggcattatgggcaaaacaggagcgggaaagtcttcgttgtgcaatgccctgtttgccagtgaggtttcacctgtcagcgatgtggctgcctgtactcgcgaagcactgcgctttcgactgcaggtgggggaacgcgtgatgagcatcgtggatctgcctggtgtcggggaaagtcagacccgtgatgcagagtatgccgcattgtaccggcgacagcttccccggcttgacttggtgctgtggttgattaaggccgatgaccgggcgctggcggtggatgagcatttttaccgtcaggtgattggcgagcagtaccggcataagatgctgtttgtcatcagtcaggccgacaagattgagccagccagtggcagcgagatattatctacggagcagaagcgcaatatcagccgcaaaatctgcctgatacatgaactgttccagccggtaaacccggtttgtgcggtgtcagcacgtctgcaatgggggcttcgggtaatggctgaaaggatgatccgttgcctgccacgagaggccagcagtccggtagcggtacagctcagtgcgccgcttcgtaccgatgctgttaataaaaaagcctgtgaagattttggggaaacggtaggttcggtagtggacacaataagttccctgcccctgataccagccccggttcgggcaatcattcaggctgttcgcaataccgtggtgtcagtcgcccgtgccgtctggaatttcttcttctga

SEQ ID NO: 103482 - DNA, 1137 bp, Enterobacter aerogenes
atgaacgagaaaacggttattgaggaaagtcggtcatgtgaggaggaacgtatcgaaaaagaaaaaatcagactcagaaaggaacaggcagaaaagcgcacctggataaaaaacaagctaaagtggttgaataaagagccccgggcagcttttttccattttttttaccttgctttatattttgaaaaattcagaggggcaggggctttcccagaggttgaaaaccatgtaaacccattatcacaaagtgctctcggaggcccaccgcttaatctggcgattgatcaaactccaggtcagcaacctgaaaaaatggctacgcttggtgtaatcgcatcaacatttgattttagttctaaccagagcaaatctgagtcagataccccggagtcgccaaagagttccgtaaaatcagaagagaacagcttgcttctgtcgcattctgataagcaagaaaacatcgcaatagacttagaaaattttctcgggacatttaatgtttccacgttaaaaaaccaaccagccaatggcgtttcttttccagtttttgctaataaaatcaccggggtgcaagatattgccggatgtatcataaatacattatctgatttcgatacaaagaatattattaatttcttacgagaaaccagcaaggtgtggacaagggctcaggaggattttcagcaagctttctcgtggatggatattaaaaatgaagaacaatgtatttgggtgtggaataccatgaaaaataaaggtgtttcccctccgctaaatccacttaataattttcagcgctggtattttatctgtgcaacattcgacttatggaacgggtggacggatgaacaagttcaagaattaacgaaagatcataaaaaaataagccagcagcgccttgaattaatggattcaccttgtactcctcagaaacacaaagcagttttgatggatgaacttgaaaaagcctggaagatgaagctgggtcgcaaggcgataaaaaatcataatgcagaactcatacttccggccaaaataaaaaagaaactcaggaaactctccgttcattacaacatgtctgagtcagatatgatggcctcgcttattgaaagcgagtatgtacgaaacaatctatag

SEQ ID NO: 103483 - DNA, 210 bp, Enterobacter aerogenes
atgaccgttacaccttccctgctcgaagaccagtttatcgatatgatttttatcacccaactcaccgggttaacggataagtggttttacaaactcatcaaagatggtgagtttccaaaacccaccaaatttgggcgcagctcccgttggcggaaaagtgaagtagaagcctggcttcaggcacgtattgatgcatcccgcaaacagtag

SEQ ID NO: 103484 - DNA, 534 bp, Enterobacter aerogenes
atgaaaaacattccattgctcaaccattacaatgcctggcttaatgactttacccgcatcaatttgttacatggtttgtgtcaacaggaaatagagcactggcacaaacttgcgattacatcgtgccggtcatcggaaggtatggcatcggtaattgtcatcccacagtatctattacaggtcactcaaacatcccaggaggaagagtgtgctgttatcccccgactgaataaacgtactgactattctctgttacctggagtgttgctcagtgaatgttaccgccttgggaaaagcaggctggcggaacaattacagatgttattccggctgcatacgcaaccgggctttcgacaaacgctgacactactttgctggtgtgaactggttacagaccgggatttagatgaatggtattcgctgcacttaccgcttcctgacactctgaagcaatggatgtcagaaaaacaaaaatcttaccggggactgaaaacgctaactgaaaattatattcgtgccagcaggccaatgtga

SEQ ID NO: 103485 - DNA, 612 bp, Enterobacter aerogenes
atgtttgacaatatctggctcgatagacggcatgcaccattcaacaccacttacctacagcgtattctacgcgttataaataacgcgactgcagagcatgcacggacgatggctgttcgggtagacctgcgtcttcctgacaatatgctcattaaccgacagggcctgatatctcgttttattgaatcccttgatgcaaagattgcagcgcgctatagaagtaagttgaagcagggtaaacgaacatatccatgccaccttcgcgatgcctgggttcgggaggtgggtgaaattaatcagaaatcgcattaccacatggtgttgttcgtgaataacgatacattcaatgggctggggagttacaaagaagacgggacgggcctggcgtccttgatacgagaggcctggctgagtgctttacagcttagtcaccgcccagagcactggacgctagcccgctttcccgataacccactttattacctggatattaactcccctggttacagcgaagtttataatcaactgacgtttcgcttgagttacttcgctaaagagagaaccaaatcctacagccgtcaagagcgttcttttggctgtagtcagtattaa

SEQ ID NO: 103486 - DNA, 135 bp, Enterobacter aerogenes
atgaatggcattcatcaatttctggaattgcctacgaagcaattactctcttccatagatgcctctagaggtattaatactgactacagccaaaagaacgctcttgacggctgtaggatttggttctctctttag

SEQ ID NO: 103487 - DNA, 1203 bp, Enterobacter aerogenes
atgcttaatcaacaggcacaaacacaaccggttacagctaacaaaaccggtctctcgtttctactcattctcagcgccctgatggctgttacctctttatcaaccgacatctatcttccagctatgcccgtcatggcaaaggatttacagggtgacgcagagctgacaatcacagggttccttatcggcttttgcattgcacaactcatttggggaccaattagcgaccgttatgggcgtcgtctaccactgtttatcggtcttgttctattcatcatcggctcggtggggtgcgcgttatcaacggatatcgtgcaagttgtcttctggcgcgtttttcaggcgttaggtgcctgtaccgggccgatgctggcaagggcaatgatccgcgacctgtttagccgtactcgtgctgcacaaatgctttcgactctgatgataattatggccatcgcgccgattgccgggcccctgataggggggcagatgattaaagtcacctcgtggcatgccattttctggctgctggcgattatcggaatattaatgctgatgtctttattctggttacccgaaacattacctgctgaaaaacgctcgcaagcctccgtaaccagagcttttcacaactactatgccttgctcaccaacgccagatacatgcggtttactttgtgcctgacgttctactacgttgcagcctacgcctttatcaccggctctccgttcgtgtacatcacttacttcggtgttgacccgcagcattacggttggctgtttgcagtaaacattgttggactgatggcggtgagcatggtcaacagacgtctggttcaccgctattcactggaagcgttgctcaggaatgccgtattcatcgccactattgccgcaatagtgctggcggtcactaccggcctgggcataggtggaattaccgtaattgtggggaccgtattcgtcttcttctccatgaacggcatcatcgcggcaacgtcaacggcttgcgcacttgacgcagtgcctaatgttgcaggttcagcatcggcattaatgggggcgttgcaatacggcagcggcatcatctcttcgctgctgctggctctctttagcgacggcacgccatggacgatgggctggatcattgcggtatttacggctgccagcgccttaatggcactgactattccgataaaaaaatag

SEQ ID NO: 103488 - DNA, 1050 bp, Enterobacter aerogenes
atgaaactcacgcttatcggtgcaatactactcacggcaatggccggagtgacctcagtcaatgcagctgattacagacaaaacccttttacactggcctatgacggtgccattaccgagaacgtcaaaggaaaggtcaatattcatccggtgaagtacgatctgcatggcatccagattgctgcgaatgtctatacccctgctaactacgaccccgccaaaaaataccctgccgtggtggtcgcgcaccctaatggtggcgtaaaagagcaggtcgcgggtttgtatgcccagcgtctcgccgagcagggctacatcaccattaccgccgacgcggcttatcagggcgccagcggtgggatgcctcgcagcgtggataaacccgctaatcgcattgaggatatccacggtatggctgactacatcagccagtatcccggtgtagataccgcccgccttggtctgctgggtatttgcggaggcggcggttattcacttgttgcggccgagacggacaaacggttcaaatcgatcgccaccatcagcatgtttaattccggccttgtgcgccgcaacggctttcaggattcacagctggatactatccaactgcgtcttcagcaggcttctgatgcacgtgctcaggaagcagccggaggagaagtgctttactccggcgatgccaacctgactgatgaacagattgctaaattaccttttgccttgtatcgccagggctacgagtactactggaaaacccacgcccacccgaactccacgtttaaatacaccaccagcagtcttatggatttgatgagctttgacgtaacggaccatatcaatctcatcaataaaccgctgctgatgattgctggtacaaaagcggatacgctctatatgactgaagatgcgttcgcaaaagccaccggtacgaaggacaaagaactcttcctgatcgatggcgctacccatatcgagacgtattgggtgcctaaatacgttgaccaggcgatgcaaaagctggacgtcttctttactaaaaatatttaa

SEQ ID NO: 103489 - DNA, 1167 bp, Enterobacter aerogenes
atgaaaaaccagaatgccccaacaatgccagagcggcgcaagctattagtcgccggggccggtattgccgccgcctcgctgattccccacgtatcagcggcgagccaatcctttcaggtcgatttatccagacaacccagtcaacgccctgctgctcctggcaagcgtaaactcgggaagctggaagtttctgccgtcggtctgggcgtgcagaacatgagtcgcaaatacgacacgtccgttccctggcgtcccgagatgatcaatgttatccgtcaggcatttgatgaaggggtaacgttcttcgacgctgctgaagcctacggcccgtttgaagtcgaaaaaattctcggagaaggtgtcgccccgttcagggacaaaatcgttatcgccaccaagtttggctggaacattgaccaacagacagggaaacgtctgccggggcttaacagcaggccggagcatatcagacaggtcgtcgaaaacatgctcaaacgtctgcgtactgatcgtatcgatttactgtatcaacaccgggttgatccgcagatcccggtcgaagatgtcgccggtgtggtgaaagatttaatggatcaaggaaaagtcctgcactggggtctgtcagaaatgggcatcaatacgttgaggcgcgcccatgcggcattacccgttaccgccgtacaaagtgaatactccatgctctggcgcggccctgaaaagcaggtactttcagtgtgtgaagagctgggcatcgggttcgtgccatggagtccactcggcgtgcaatttttaacgggctggattgatgagaatacccggttcgctgccggtgatttccgcgcgacggaaacgcgcttctcgcctgaaaacctgccgcacaacttacagctggttgaactactgaaatcttgggcaataagaaaaaatgccgcaccggggcagattgcactggcatggctcctggcccgtaaaccgtggattgttcccattcctggcaccaccaataaagaccatatgctgcaaaacacagcggctaccggcgtgtcgctgacttccgccgagatgaccgagctcacccgctcactggacgccatcactatccagggtcaacgtctgccggatgccgtgcaggtttattccgatgttgaagcaccgatgaaaagttaa

SEQ ID NO: 103490 - DNA, 681 bp, Enterobacter aerogenes
atgcgcctgttgttagtcgaagatgaagaaaaaacgtcaacctatctcaaccgtgcgttgagtgagtccggatttacggtagatgtctctgcagacggagctgaaggtcttcattacgcgctggagttcgactacgacgcgataatactggatgtgatgctgccagggatggatggctaccgggtacttgagggtgtgcgagcagccaaacagacgccggtgctaatgctttcggctcgcggctcggtcgatgaacgcgttaaagggcttcgccttggcgcggatgattacctccccaagcccttctcgcttattgagctggtggcgcgtattcaggcactggtgcgtcgccgcgctacggatggcgcagacatcactcagttgcagattcacgatctgcatctcgacctgctggctcgccgggtatttcgcgccggaacgcggctggaactgaccgcgaaagagttttccctgctgagccttctggcccggcatcagggggagattctgtcaaagatgatgatagctgagcagatatgggacatgaactttgatagcgatgccaacgtggttgaagttgccattaaacgcctgcgagccaaggtggatgcaccgttcgacgtcaaactattacataccgttcgtggcatgggttatgtcctcgaagtcaggcctgaataa

SEQ ID NO: 103491 - DNA, 1473 bp, Enterobacter aerogenes
atgaaggggacaagcatgcctaagcgttccatctccgttcacctggcgctgatgtttgccttatccgcgctgctgattgtgtccgttatcggcattctgctcagaagctctttgcatgattctttgcagacgcagatgcacaacgaactgctattccgggaatcattaatgagcccgtggatcaccgcccgaacctcggcagatggctggtcgacgctggccaataaattcactgtgttaaccaattctgaaggtgagcgcgttcgctattggatagtgagcgataacccacgctttagcatggggggaacaccaccggtgggtgttgagtggtcttctttacaggaaggctttaataaagttcccggcgcatcggaaggtgcctgctcgctgtttctgttagtgaaaacgatccccgccaacggtgaaaggcctgagctgcgctacatagttgccatcgactccacgccgtatatgggcacactgaatgccttcacccggacgctgttaatcatagccgcgctgggcgtcgtgattgtcgccttgctgggatacatcgtatcaaggatcggtcttcgtcccgttggagcactcagtaaagaggcccagcatcttgcaccgggtgaccatggccagcgcctgaatacccgcgctttgccagaagaactgcaacaactggcgtcatcatttaatggcgtgttagaacgtcaggaaatcgcctggcgtcagctcgacagctttaacgccgatgttgcgcatgaactccgtaccccgctgaccaaccttatcggccagacgcaactgggtctctcacgccgacgttcgcatgatgaactggaagaattattgggttccaatctggaagaactcgaacgcatgacgtctatcgttaacgacatgctgttcctgtcccatgcccacgcgggtgaacatgcgtcccagttgacccaagtgtcactgcgagaagaaactttgaaaacagcggagtatgtggaaccttcttttgctgaaaaacagctttctctggatgtggaaggcgacgtcaccgcacatatcgaccggcggctgttccaccgttcactggctaatttactggaaaacagtgcaaggcattcgccgtccaatagcacagttacggtgcggttaagcgaaaaaggtcatcaagcttgtgttgaagtgtcaaacccgggcgatccaatagcaccagaacacctacaccggcttttcgagcggttctatcgcgttgacacctcccgggctaggagtgatacgcatcatgggctgggcctgtcgatcgtgcgtgccgtcgccattatgcaccggggagatgtctttgcccgtagcgagaacggtatcaatacctttgggctgacgtttgctaaacagcctgatgctacccgaaccatgaaactaatgtcagggcgtcctctctctaaacctgctgacaaaattgtcagagagtcgtcagtctga

SEQ ID NO: 103492 - DNA, 657 bp, Enterobacter aerogenes
gtgagaataggaaaggtatttagcgggtttctggcgatgatggtcatggggtttctgggacaacccgcgttctcatcagagaactcatccgccccgtcccgcacgctgattatctatttttcccagcccgaggagatgaaacctggtgccgttgatggcttttctggggccagcgtattacaaaaaaatacgccggagaccggcagcacgcagtttgtcgcacagctgattcagaagcagacccacggcgacctgtatcgcattgaaaccgccaccccctaccctcgccagcatgatgcactgttacgggttgccgaaaaggagcagcaaactaacgccaggccatcacttaaaacgccactccccgacctcagcaattacgacaccatttacgttggttatcccatctggtggtataccatgccaatggtgatatatagcctctttgagcaaaatgactttgccggtaaaacggtcattccttttaccacccacggcggcagccggttagccgactccctgcgacaaatagcccgcatgcagccacaggccagattgatcactcgtgcgctctcgatctcgcgcaatgatgtttcaggccctgacgtacccgcgcaggttgagcaatgggtaaaacaagttcagccgcagcgttaa

SEQ ID NO: 103493 - DNA, 651 bp, Enterobacter aerogenes
atgacgttacttctgctggtactgatggggtttcaccttcatggtgaaatcgtgcatgaatgggcggggattatttttacgctgctcattatgttgcatttataccttaaccgacgtcgactatggtcactgtcaccgaatattccgttaacgatgcaaagagttaacagagtcattaatgcagtgacgttcgttgtcatcctgaccgctattgtctctggcatgatgctgtcccgacatattcttctggagttgccgttccacaacccggcgaactgggtcagaaaagtacacatgacatcggtccactgggggatgctcattctggcgctgcatattgggttgcactggaaaatgctggcctcttttttctgccggatcctgaacatctccggtagctcacacgttgcaaatgtcattatgccgggcgttttttcactcatcgcactactgggtttgtacggattactgcaccaggactatctcgattatttactcataaaggtcgatttctcctttttcgattacgatgaatctgcccttcttttttatttccgctacctggccattattgttttgtttgccttaatgacgcgctttttgctttggttatttatatttagaaaatgcaaagcgatgtcaccccaatag

SEQ ID NO: 103494 - DNA, 480 bp, Enterobacter aerogenes
atgatcagacatttacgttacctcgggctgttactgcccctctttacattttcatcctgggcagcggagcaaaatcccgctgtccatatcgcccccacaggaagtcagaacgcggtgtacgggccagccgagaactttaccggtcgcgtccgggttgatcctctcttcaaaccggataacgacatcagtgtttccggggcttatgtcacgtttgaacccggagctcgttccgcctggcatacgcatccggcaggtcagcggctgattgtgacctcgggtgttgggctcacccagcaagaaggccagccggtgcaaattatccgcgccggtgacgtagtctcttgcccggcaggcgtcaaacactggcatggcgcggcccccggcagcgcgatgacgcatctggcgataaccgggattgtggatggcaaaagcgttaactggaaggagttagtgacagatgaacaataccatgcccattaa

SEQ ID NO: 103495 - DNA, 762 bp, Enterobacter aerogenes
atgaacaataccatgcccattaaagctttagcggcagcggtactgctaacctttggttctggtctcgcggcacatgctgcgcccgtcaataaaggagtctcagaaatgaaccacgaacaaaaggtttcagatacgctgtcagcaagccaacaggctatcccgttgattgcggcatcgatggccagcagtcagatggataagctgaatgcagccctgaatcagggtcttgacgcagggctcacgataaacgaaaccaaagagattctcgtccagctttatgcctatacgggcttcccccgtagtctgaatgcgcttagtgaactgatgaaggtcgtcgaagcacgtaaacagcgtggtatcaaagacgttgagggtaaagagccggttgccccaatccctatcggggatgagcttcgccgcgtcggtaccgcaaaccagacaaaaatctcaggcgctcccgtccagggcccgctgtttgattttgccccagtgataaaccaattcctgcaaacgcatctgttcggcgacattttcgcccgcgataacctcgactggcaaagccgcgagctggcaacggttggcgcactagcagccacgccgggcgttgaagcccagctgttatcacatacgcgagccagcatgcgggtcggcctgacggcagcgcagctgcgccagctggcacaggttctgcgtgaacatggcgaaagtgatgcagctacgcgagctgaaaaggcgctgcaacaggccctcgaaaacaattag

SEQ ID NO: 103496 - DNA, 585 bp, Enterobacter aerogenes
atggagtatgatcccaaccgcagaatgttaatcgccgcgtttgccgggctaacactcgcgaacgtctccctggcatcggcagccaacggaacagcaaacgtgcagggtaaaagccgtgttctggtggcgtacttttcccgcagcggaaatacacgggtgattgcgggcgtcattcaccgcagcctgaataccgatctgtttgaaatcgaaccggcaacgccttatccggaagactatttccagaccgttgatcaggcaaaaaatgagcatgagcggggagtaaaacccgcattaaaaaatagcgtcgcagatatctcacgctatgagagcgtgtatttaggttttcccatttgggggaccagcgtgccgcctgtcgtgcaaacatttctcagcagccacaatcttgcgggcaaactactcatccccttcattactcacggtggctacggtaaaggagagagcgacgacatccttgcccgtctcgccccaactgcgcgccgggaaaaaccgctggtcattgaatgcgaccaggaacgaagaactacagaaacggtaaccagttggttagagacgatacgcaactag

SEQ ID NO: 103497 - DNA, 846 bp, Enterobacter aerogenes
gtgccgatagtactaaagggtattggattatttctttttttatcaggttcagcctatgcgggattgactgaaagcactctggagaataaccaacagatatatgttaattcgttagggatgcgttttatcacaataccggcagggcaatttctgatgggttcatcggatgcagcggctgatagcagagaaaaacctcaacacttagtgacattctctgacgatcttttcatggggcaatttgaggttacacaagcagactggttggctgtgatgggggaaaatccttatgtacgcgatcgctccaatccctactatcttcttccaggtatggcagaccgtattacgcacccagatcatcccgcgaccgtatcctggcaggatgcaatagaatttatagagaaactcaatcaacgagaaggtacaaccggctatcgattaccgacagaagctgaatgggaatatgcagctcgggcaggtagtactacacgttattttttcggcgatgacgcttctgcgttagataattatgcctggcatggagaaaattttgttaccggtggcacacatcccgtcggtacgaaaaaaccaaacccctgggggttatatgatatttatggcaatgcctgggaatgggtcagcgattattacagtaccggctattatgctcaaagcccagaacacaatccgcaaggccccgacgatggtacggaacgtgtcgtgcgtggcggtagctggcatagtacagcgaatggctggcatagcgcatggcgaaaaccctaccctgccgattaccgtggaataagtattggattcagagtggtttacaccgacttaccaaaaccataa

SEQ ID NO: 103498 - DNA, 1056 bp, Enterobacter aerogenes
atgacgttaaatgtgaaaggttatgccgcttttggtgcgaaagaagatttagtgccacataactttgttcgtcgcgatccgcgcgataacgatgtggttatcgagattttatacagtggagtttgccactcagatatccataatgcttttaatgactgggggggtgcaaaatatccgatggttccgggtcatgaaatcattggccgtgttattcaggtcgggaaggccgttacaaaattcagcccaggcgactatgccggtgtgggctgtatggtagattcctgtcagcattgcaaaccctgtgttcaggggttagagcagtactgtgaagaggggaatacattaacctataacgacgttgacagacatgaccatatgccaacctatggcggctattctgacaagattgttgtcaccgaaaaatttgttatcaaagttcctgatactttggatttaaagggggcggcaccgctgctctgtgccggtatcacaacatggtcaccgctgcgtcactggaatgtaggccccggcagtaaagtggctgtggtcggtttaggtggcctggggcatatggcgattaaattagcgaaagcactgggtgcagaagttacattattcagtcgttcgccgaataaagaggccgatgcccgtcgtctgggggccgcgcatattgttatttcaaccgatgaaaagcagatgcagggtacgcacaaccagtttgatttgattatcgatacggtaccttatgttcatgatctgaacccatatattcccacactggcgttgagtggaacgctagtgcttgtagggtatctgggggatttgaacccaatgctaaatagtaccccgctgatcttagggcgaaaatctgtggccgggtcagtcattggtgggattgcagagacacaggagatgattgatttttgtgcggaacatcagatcacatcagatattgagttgatcaatattcaggatatcaatagcgcctggcagcgaatgctgaaaagtgatgttaaataccggttcgtgattgatgttgcatctctccagtcgtaa

SEQ ID NO: 103499 - DNA, 831 bp, Enterobacter aerogenes
atgaaagacgtcattgttgttatcggaagcgggtctattgctcaggctattgcgcgacgtgtcagcgtaggaaaacatattctcttggccgatataaaaactgagaacgctcaacaggccgaaaatactctttcacgggccggtttcgaagtaagtactaccacggtagatgtccgttctcgtcagtcgatccaggaacttgtgaaaactgcgtgtagcatgggcgaaatcatgggggttatccatactgcaggattgtcaccgtctcaggcgcaagcacaggatctcattcgcgttgatctctacggcagcgccgtgctgtttgaggaatttggtaaggttattgcgccaggtgggtcctgcgtcgtgattggctcgcagtccagccatcgcttagcagttgatgcgttgactcaggcacaagcagatgcattagcagcgttaccgccggaagagctgcttgaattgccgctgataaaagatattgaagacagcctatatgcttaccagatttccaaacgctgcaatgcgctgcgtgtgatgtcagaagcggtaaaatggggcaagcgtggtgcgcgaattaactgcatcagcgccggtatcgtctttacgccgctggcctatgacgagcttaacagcgcagagcgtggcgcgttttatcgcaatatgctggataaatctccggcaggtcggggcggtacgccggatgaaattggcgcgctggcagagtttctgtttgggcctaatggcacctatgtgaccggtagcgatctgcttatcgatggcggcgcaacggcatcttataaatatggcgaattacgcccgcaataa

SEQ ID NO: 103500 - DNA, 777 bp, Enterobacter aerogenes
atgtcggttcaaacattaaaaggtaaggtggcactggttacgggcggtggaactgggctcgctctgggtggcgcaaagtgtctggctgaagaaggcgcttttgtctatatcgtgggtcgccgtcagagtgtcctggatgaggcgattagacagattggcccgaacgctcgcgccatcgttgccgatgtttcccgcaaagaagagatggtgaatgtcgcctctattattcagcaggaaaaaagccagctggacatcattttctccaatgcaggctactgtatcggtaagaaactggaggaggtgagtgaagatttcttcgacgacatgttgaacgtcaatctgaaagggcagttattcaccgtacaggccatgctgcccattatgaatgcgggcggttcaatcattctgacgtcctccatgaccgcctttattggtctgccggaatacacgacttacgctgcgtccaaagctgcggttattggcatggctcgcgtctggaccacagagcttaagtcacgaaatattcgcgtaaatgttattagtccaggagctatcccgactgaaggttatgaaaccgtgcagggtatgaccccggagcagattgaagacttcgcggctaaatgtgccgctgaaatccctgttgggcgtgttggtcgtgctaatgagatcggagatggcgttgtgttcctggcctctgacgctagcagttttatcaacggcattaatctgactatcgacggtgggcagacacaggtttacgccggtaacctctcataa

SEQ ID NO: 103501 - DNA, 294 bp, Enterobacter aerogenes
atgctgaaacatattttcattggcaaaacgtatcagggtaagactgaagcagagctgtctgctgtagtcgacatcctccgcaatttgcccaccattgtcccctggcttaaagccttcagcgttgaaaagacgctcgactggtcagaaacccaggcagtagtgctgattgccgaatttgactcccgggaggattgggagcgttacatgcacgacccggaacacctggcgctcggagagaaaatcaaagacatcatcgatctctcctgtatgagcgtagtgcagacgatcgcttaa

SEQ ID NO: 103502 - DNA, 1062 bp, Enterobacter aerogenes
atgtacgtaaccaaagcttatgcggccacgtccgcaacatccccccttgcaccgttatcgataccgcgtcgtgatccgaatgagcacgatgtccaaattgatattctgttctgcggggtgtgccactctgatattcaccatgtgcgtgatgagttcggtagtgccatgccaaccgtctacccgattgttccgggtcatgaaattgtgggccgagttatctctgtgggcacggcggtgacaaaacacaaggctggcgatattgtcgctgtgggctgcctggtcgatgccgatccgacctgtccccactgtaaagcgaatcgcgaacagtattccccttccaaggtgttgacgtataactcaccggataatcacggtactgcaccggtgacctacggtggttacgccgaaagcattgtggtggatgagcattttgtccttcaggtacctaggaatctcgatctggcaggtgttgcaccgctagtatgtgcgggtatcactgcctattcccccatccgtcgctggggtgtaaaggccggtcagaaagtcggcatcgtaggtctgggcgggcttggccatatgggcgtgaaatttgcccgtgccctgggcgcacatgtggttcttttcaccacatcctcttccaaaaaagaagatgcacttcgcgttggcgctcacgaagtggtggtttcacgcaacacggaagagatgcaggtccacgccggtacctttgattttattctcgatacagtgtccgccccacacgatttgaatatttaccttaacctactgcatccggaaggcaatctgacgctggttggtgcttctgcagacaaaatcgatgtctcagcctacagccttgtttttggtggacgtagcctatccggctcactgattggcgggattgctgaaacacaggaaatgctcgatttctgcggtcagcacaacatcacatccgatgtggaaattatcgggattcaggagattaacgacgcttatgtacgcctggaaaaaggtgacgtcaaatatcgtttctctattgatatgtccaccctaaaaaatgcctga

SEQ ID NO: 103503 - DNA, 966 bp, Enterobacter aerogenes
atgctgacgaaagacatccgagcaatagacatactggcaaaagctgtggagcttggcagcctgcgccaggccgctctcgcaaaaggggtgacctcacaggccgccagccaggcgctggctcaacttgaagactctcttggagtacgtcttctgcaccggacaacgcgcagcctctctctgacagaggaaggtaggcaactgctggaagctacgcaaccagcactggctgtactggaccgcgccctcacgcgtgcacggcaggcaaaagatgagattgccggcccgttgcggattgttggaccccgctcagccttcacgccagttttatggccaatcattgacgaatactgccagcgcttccctgacgttcagcctgaagtgcagctcaatgacaacatgggggactgggtacttgatcgagtggacgtaggattccggtttggttctccgcctgctgagggggttatcgcacgcccgctgttccgtgcgcagctaatcatctgtgcatcaccggcatatctccgcgcacatggtgtaccccgttcgcttgaagagttggcgtaccaccgttgcagtgtcttccgccatccgggaactgacgcaattttcccctggtatgtgaacatggggggagaaatccagacacgagaatttcctccaactgtggcaacaaacagcacggacattgaagtcgaggccacgctgaccgggcaggtcattgcacagctatcatcgctatccgctgctgcgctgatacgagaaggccgtcttgtgcccctactgacagagcatgtggccagccacctccatctgtacgcatactacggtagccgcaaagcgcagccactgagagtcagaaaatttatcgagctcgccgttgaacggctaacggacaaccgggagcttaccctgactacagatgaactgctgacttattctgctgaaaggctgaataagtcaccatga

SEQ ID NO: 103504 - DNA, 792 bp, Enterobacter aerogenes
atgaaaatactcgttgcaggcgcgacaggaagtattggtcttcatgtcgtgaataccgctattgaaatgggccatcagcccgtggcgctggtcagaaataaacgcaaagtaaaattacttccgagtggaacggatgttttttacggcgatgtttcaatgcctgaaacactcactgaattaccgaaagatattgatgccatcatctttacgctcggttccgatggtcagggtcgtattggtgccagagctatcgattacggcggagtgcgtaatattttacgaattttcaaggatacgcctgttcgtatcagcttaatgaccacgattggcgtgactgaacggctcagcacctggaatcaacgcactgaggttcatgactggaaaagacgtgccgaacgtctggtcagggcgagtggtcacccctataccatcgtcaggcccggctggtttgattacaacaatgatgatgagcacagaatcgttatgcttcagggagatcgtcgccatgcaggaacaccggaagatggtgtgatatcccgggagcaaatcgcccgagtgctggttgatgctctgagcaacgatgcggcaaaaaataaaacgttcgagctggtggctgagcaaggcgaaacacagcaggatattaccccactgtttgcagacctgaagactgatgaaccagaaaaaaatgatggggttttagacatcgacaatatgcctctcagggaagaaccggagtgcattattaacgaactgaacctgtattcaaaaaaattaaccaatctacaaccctga

SEQ ID NO: 103505 - DNA, 252 bp, Enterobacter aerogenes
atgaaagcactacttatttctacattggtcatgggatttatttcagtaaatgccgcatctgccgctcaggaaattaaccatgcagatgggaaagaaaagatcggtgtagtctcagccagcaatgcctatacgcttgatgaattatcgaatgcgctctctcgtaaggctgatgagcaaggagcaacgtcattcaaaatcctgtcggcaacgggggataacaagctacatggggttgctgaaatctataagtaa

SEQ ID NO: 103506 - DNA, 390 bp, Enterobacter aerogenes
atgtttccgacaagaaatttcttgataaaaaggcctccaatttttgatgccgaaataaaatattatttggtgatcttatgtaaggttaataactttaaagtgttagtgtttttttcgcctttcggtatgtctatatcgcaatggtggcaatttgtattttttagagaagactctcgtaaatgtttgctgggaatcgaatccatatttaaaggcgataaccatcactggctcattagtctggataagatcttttgctgcaagtctaagtttcgtatctcttatgtacttcccaaggctaacttctttcacctgtacaaaaatacgctgaagatgccacttggagtatcctgcccgcgcagcaacatcttctattttcagcggtttatgtaa

SEQ ID NO: 103507 - DNA, 738 bp, Enterobacter aerogenes
atgctgagaggtaaaagagctgtaattaccggtggcggcgcgggatttggtcaggcgctgagcgtgtggctggcgcgagaaggcgtcgaggtggatttttgcgcgaggcgcgctgatgatattcaaaaaacttgcagtgtcatcacggctgagggcggaatggcgaaagggcatctctgtgatttaacccagcctgaatccctttctcagttttctgcacagttgttaacttcagacaagcccatagacattttaatcctcaatgctgctcagtggctttcaggaacgttagatgatcaaccagacacagaaattatcaataccgtcagttcaggactgacaggttctattctactgactcaggcattgctacctgggttaagacgttcacaaagcgcggatatcgtctcaattatatcttcatgtggggttcctaattttacagattcaattgcgcaccccgctttttttgccagtaaacacgggcttagcgggtttacaacaaaactctcgtaccagttgtccgaagaaaatatacgtgtaactgggttgtatcccccggatttcgagctgacagggttagatacttttgtcgatagccagaccaaaatgggggaacgtctgatgaatgggcgttcagtctgggaaacaattcgctttgtgctgactcagccgcgtagttgccatatcaggagcatctactttgaaggcccaactcgcgaaaaactgggagtctga

SEQ ID NO: 103508 - DNA, 1032 bp, Enterobacter aerogenes
atgaaaagtgaagaaaaaatgcacgatgagtgggagttcttgctcgaggaatattttttcaccaaacaactacgtgcagcaacggaatggagttataggaaagtagcactaacatttacgcgttttattggtggagctataacacctgctatggtgacgcaaagggatgtgttgctttggcgtcggcatctgttaaaggagaaaaacctttcggtacatacctggaacaataaggttgcccatctgcgggcaatatttaatttgggtattaaaaaagcgttggttcagcacggtgagaacccttttaatggaacggtagttcgatctgacactaagaaaaaacgaatattgacgaagtctcaattgacccgtctttacctcgtgatgcaacagtatgaacagcgggagaaggagagaaaaccagtgaaggggggaaagtgcgcactctatcctacctggttctggatgacggtattagacacatttcgatataccggtatgcgtaacaatcagatgatccacatccgcctgagagatgtgaacattgagcaaggttggatcgaacttcgacttgaaggtagcaaaacacatcgagagtggaaagtaccggtggttcgtcaattaaggaagcgaatagagctgctcatgatacgtgcaatcgagcgaggtgcgggtcagcatgacctgctttttgatgtcaaacggttcaccaatccacggaatactcattacatctatgacgagaaaaacgttctgcagtcatttcgtagcttctatcgtcggttgtccagggagagtggcttcgatatttcctcacaccgtttccgtcacacacttgccacggagttgatgaaatccccggacagaaatctaaaactggtgaaggatttgctggggcaccgtaacgtcagtaccacgatggagtatatcgaattggatatggaagtagcaggaagagcactagaacaggagcttgttttacatacggatatcaccgctacgagaagcttacaaagcttgacacaggcatga

SEQ ID NO: 103509 - DNA, 1701 bp, Enterobacter aerogenes
atgctgaaggctatcaaagaactgctggttggaacccgggttatgccggcaaatccaacggcaagcatttcagcctctcaatgtcctgtaggttattttatgccggcatccgcagagcagcttttgagcacggcctctcgtcagcagtgtttgcagcagctgtgggagaacagcgcactgcccaaagatctctatgaacatttctatctgcaacccttgaagcagcttgttacgctaatgcaggtacttccggccgcgtcccagggggagtatgccagggaaggagggctggtcgatgttaccctgcagacgacgacgtatgcggttcgactggccaaggggtacatgttgcccccaggggctgcgcctgaagaacaatccgcccagaatgtgcagtggaatgtcgtggtgttttatgcagctctatggcactacctgccgctgttgagccagctgcagggtgagttccaaagtggccgtgcctggttacctggtttgacggtaccgggtgaaccttaccgttttcgcttcagagccactccgttagccccgactctggccagcagtcagagcgcaatgattgcggcacgactgctgcctgaagagcttattgaatggttgtcaacactaccagcgtcgatacattcgttgatgacgatagcgtccaggcaaccgagcacattacctgcaattgacgatattactctggaggcggctaaactggctcgtggcgatggtttggccgtatcgcttttgccgatatccaaccccgacacattggcaataaccttaccgtcagtggcgccggcgacagaacatatcacctcttcagtacccgagactgatttgcaaagcgcagtcagcagtatccgtcccactctcgctcaggagcaactgccggcagagacattagatcagcccaacgaaaatgcaccgttagtcacggaagtgtttcttagttcggccctggatgcgccggtcaacgataagcctttggctgagatggtcctggcgccagaaacagaggttggtgtggaagaagatatgcaggctttgttgtcattaatggcggtagaggtgtcagtaccgacttgcctggataaccaagaagagggaaacgcccctcagaaagagagcctccttcctgaagaaatgcaggggtcggtacatgacataactactgtaattgaagatgactgtgttttaccaggcgtaatagaaccggaactattaaatagcacggaaacaacgactattttagacgttcaacatttatcaaaggctccagggttggaagaaaatagcgtggaaggtattttgaatgcagagaataatgttgggaacgcctttctacagtggttgagtcttgggataaaaaaaggtgatatatctgttaatactataggttccagggcacatattgttagtggtttcgtgtttctctgcgttccagatatttttcatctgtatatcaaagaaaataatttggagcgtagtggccgaaatgctatccaaaaagcatttgaaaaactgggaagacatcggatccgtaaggggcagcgattctttattggccatctttatgaaaagcctgagggggtgggcacatatcgccgtatcaatggttacctgattaaggcaaatagtttgtatggtgggacacgcgtgccagaggacagtcagttactcttgatcccgtag

SEQ ID NO: 103510 - DNA, 1449 bp, Enterobacter aerogenes
atgtcttattgtgatacacctgaacaggccgccatcattggttggtccggccatcgcctggtggtcagggcgtttgccggcaccggtaaaacgtctacattggtccgttttgcccaggcaaacccggattgcaggatgctttatcttgcctataaccgtgcagtcagggatgaggctgagcaaaaattcccgtttaacgttgaatgtaagacgtcgcatcagctggcctggcctaacttcgggcgccattatcagcggcggttgacagctaacctgcggatcactgacgttgctcgccaactcaatacccgctattggccgctggcacgcacatctatcacgacctttaacgctttcctctgcagtggggatggcgaattgggtttgcaacacttgcctgatgaagactcacgcagtggtttgtcgcccgataaaatcctggcagcggcgcaattgctctggcgtgagtctgcacgccaggatggtactttccctgtcacccatgacgtttacctcaagctgtatcagctctctcagcccgacctttccaaacgctggcagacgctcctgtttgacgaggggcaagacgcgaatccggtgacgcagtcactggtactggcgcagggttgtaatgtggtgttggttggcgaccggcatcaacaaatctatcgattccgtggcgcggaaaatgccctcgatgctcctgagttggccgatgcggaccaactttacctgacacacagtttccgttttggtcctgccgtggcccaggtggccaatatgctgcttgcgcggcaaggcgaaacgatgtcggtggtcggggaggggggaaacgacagggttgttgggtgcatacctgatgacgtgaagggtcagcctgttgccatattgagccgaacggtggctggggtcatcggcgctgcgctggatgccagcctggcagggaagaaggtctactgggttgggggtatcagcggctacaaaacggaagaactggaagatctgtactggttttcggcggacatgcctgagcgaatgcaatctccgcggctggcgcgagaataccgcaactttgaggaatttgagtcggttgccagagcaacccgggatgttgaaatgaaccaaggcctccggttactcgaacagtatttcccgctgccacaaaagctgcaggtgatgcgtgagcatgcagtgactgatgaatgccaggctcagataaccgtttcgacggcgcatcgaagcaaagggctggagtggtctgtggtggtgttgaatcatgattttgccgatatcacagatcccctgatggccgactgcgaacgtaccgatgaaaccaacctgctgtatgtcgctgtgacccgggcccggcaaacgctggtactgaatgaattgctccagatgttgatggacagcgagggtaatgatatcgccggaggcctggcatgctga

SEQ ID NO: 103511 - DNA, 834 bp, Enterobacter aerogenes
atggtaaccaacaataaaactgcacttggggaagtcattgccaaagcgatgacgatgaaaggaattccaaagcaaaaacacatcagccatacgagccacgtactggacatcacaacagctgcagcccagaaaaagatgagcggtgcctcaaactgggaggtatcccagctggttaaagtcattgattcaatcgatatgaggatgagtgacttctttgacatttataattatgcaataaatgaagtgcatgatgctatatggaatgatggcaagaacaacgttaaatgcaaaatatacctatctaatgtaaacgctattgatacaactgaatattctgccttaaaaattaatgatgagtgggttgtttttcatactaacgatataaaagatgatgttttttttgaatcaaaacgcaacattgaaatgattcagttatatcctcaaaaacaaaatgaagaaaaacaccgaatcgctattcttgatgatgacaaaaacatcgtcgatagcatcaaagaaatcattgtaaacaatgaatatcttgttgatgccttttatgatattaactcattagaggagagcctgaaaaataagccatatgatgcgtatattttggattgggttataggaacaaaaaccgtgttcagcacgattaaagagataagaaaaactgaaaataataatgccatgatactggttcttaccgggcaactgtcagggatcgtagatagcgaaatcgcaagtgctataaatgattatgatataacaggccctcacgagaaacctatcaaagccagtgtaataaaatcattagtggataaacactttcccaagtga

SEQ ID NO: 103512 - DNA, 987 bp, Enterobacter aerogenes
atgaatgataatttactgacttatacaggaagtctattgcttgatggaagatacatagtgtctccatatggagtgggtaaagatattccatgtggagaaatctctcccttgaatgactctattattcataataatgcaatcagtaaaatatcagttgactattccaccgtaaaaagccttacaatcatcaatgggttaggggtgacgctgggtgattcagttgttgggatatcagcactgcacgcaataaaaatattcaatccaagtatcgacatcaaaatcattcgtcctgaaaactgccctgactatgttaatgaagtatatacgttggcaaagcatataatagatgacatttcctatatgccgtttgacattaccagcgctaccgatgcagatctagtaatagatatcgggaaccaactatactggaaagattttaacacactggaaatgcatgacttcttcttaagaagtttaggcatagaacacaaacatgtatcagccagtttaaaaattaactcatggctcaatgaagcacctatcgaagatttaaatttgggtgagtatgttcttttctgcccatacgctagtacaaaaataagaagcatacccaagaaatatcataaaaaaataatatcttacctgggtgataaatttaaggttaaggtcttagggttcagtgatattagccatgacaattacacgaacattacctcactatctacaaacacaacttattttacatccatcattaaaaatgcaaagcacctttacacgtgtgattcagcagccttgcatattggcgcggggtttaaaacccccacaacttgtatattcacaaccgtgaaacctgaacttcgcagcttatactacgataactgcacctctatttatattggaaataataaaacagagggcatacacaacagtgaaaatatatttttactcgatttaatcagtaaggagtttgagggctattatgcgtaa

SEQ ID NO: 103513 - DNA, 504 bp, Enterobacter aerogenes
atgcgtaaattaatatctctagcattgtcttttttagttattctatttatttcgcccccctctttcgcaaataaaggagatatctacattgatggcgcaataactaacaaaaattacgaagatggatacatcttatcagcaaaagagttcaacacgctggaaaaaagccatataaagacgacaacttcctggactgttccgggacgcgttgtggattttgaaggcgtaaaattcaaagacttgctgaaacttgttggtgctcgtgggaaaacgttaagaatgagggcattaaatgattattgggtcgatatcccagtctcagacatagaacaattcgatattctgctggcaaacaaaatggatggtagccctctgaaagttagagactttgggccatacttcgtcatttacccgatggacaaattttacgataagcttaatagtcctacttttcaagcccgtcatatttggcaggtcagcggcataacggtattagaaaaatga

SEQ ID NO: 103514 - DNA, 1713 bp, Enterobacter aerogenes
atgaaactgaaaaggcttatcattcaatacttattagtgttcctggtgctgacaggtggatttgtgtggatgtatgaacaatacttctccacaagccataatatgaactcagcgggacctcaagagaactacgcatgggcaatcgcaaaattcacgatcagactagcaggatttaatgcaaaagttgagcgccagcttcggttaggtaacaatgataaagaggaattacaaacagaacttgaccttctattctcaagctcaaatgtgctgttgcataaaagtgtttcaaccagatatttatatgaagaggctggctatgccaatacggtagagcaaataaatgccaaccttgaaaatatcgacactgaactaaacaaaccgacacctgactattcgatcatacttaaaagcattgaattaataggtcaagaaaataaagatctagtggtaatatctgaccatgcagaggtcaggcaaagaaacataattcagcaggactatatcgacaaagctaactcaatgaagttcccaattgctacactgtacttcctatttttgttgatgctttttatttcatatcgacaagtaaagtctattaataatcaattagagtccgaaaagaaatcttttaacaacaaaaacgcattcctcggggtgttgggtcatgaattaaggacttcacttcaggcaataatttcgtcggttgaggtgattattcagaaaaaagattctatagcattcaaccactttgagcgattagagaatgcagccatgaaaatggaacgtcagatgaaagacctcgctgagttcgccaaagtcgataatggtaatgttgaaataaaaaaatcatcattcaacttacgaaagattgttcatgacactgtcgagcaaagcatttctatattgaacaagcaaaatgttagtgtaagcatagataacattccagatacatatatcaaaagcgatccatcaagggtcatgcaaatcatagagaatattgtcaccaatgcaataaaatatacagacaatggtctcgtgcaggtaagcgcaaacatccaagataaatcaactttggttctcaaaatcaaagacacaggtcaaggcattccgaaggacaaggttgatacaatattctatccgttcatccgagttgggaatgataataaagttcccggttttggaatgggtttggctattgttcatggtgttgttaaagccatgaacggaacaattgatgtaaaaagtgacatcggtaaaggaagtacttttacagtatcattacccattgaattttcaactcctgaagagattggcattacaactgagatcgcgaatgcgtttttctcagttcaagacatcagcattttaattatcgatgacaatgaaatggcatgcgaatcgctggtctctatacttcaaaatgagtttacagtagagtatacaacatcccctgaaagagctttggagaaattatctcgaaaatctttcgatcttgttttgagtgatctacaaatgcctattattacaggtgatgagctatatagaatggtcaaagaaaataaaggtccaaataaaaacacaccattcatattcatcagtgcatacaccaacgaaagccccattaaagatgttgaatttctaaccaagccagtgagattgaatgacattaaaaaagccataaagtcagtgctggcaaaggatttagactcataa

SEQ ID NO: 103515 - DNA, 669 bp, Enterobacter aerogenes
atgctgacgtttactgaagtacaaaaccaattcatcggcctctttggccaaacggcacgctaccatcaccggtacaaggtcttttctgactttgttcagtgcagcgcgatagcaatacacaaccgcttttgtccggacgacgcgctggagaagcagtacatgtcgctcatcaaagggtatgaacgtgaggatgtcgaacgcctggcgcacctacttgctctggtccgaatagcactggccgctgaaccttgtgattttttgggaatgtccttcatgaagttagagctcggtgataaacaccgtgggcagttttttaccccttggtgcgtagcgtccatgatggccaggctgcagttcactgagttggaacaactgttgctgactcagccgttcgtgacgatcagcgaaccggcatgtggggccggcggtatgatgatcgcggccgcagtcgagatgcaggctttggggtatccgccaccaaagcatatgtgggtctcgtgcgttgatatcgatgtagtagcgatgtcgatggcgtatatccagctgtcttcgcttggcattcctggagaagttgtgttgggtaacgcgctagcagatgaacggcgattggtgatgtataccccgatgcattggttggaaaaatggccacttcgcttacaaaattcgtaa

SEQ ID NO: 103516 - DNA, 924 bp, Enterobacter aerogenes
atgtcgaactggtgcaataaccgtttagtgatcactggccaatccgtttttgttgatgaactgcagcaatgggtcaatggccatgttgtccctgactaccgtcatgctgttcaacaaagctgccggctgttcctggccgggtgtgccggcatattgaagccggcgacaacaaaacccggtgtttacgtgccttacccggcactgttaacgcagccggggattgcatcgcctcagaatctggcctttgaacactggttcgggttgctgaaggcggatgtgccgttaacgggcgagaacattcgcctgatagagcgactctaccgccagtcgggtatcgatgcggttaaatgggaaagcatccccaacgtggcgaaggcgcgtatggaggatgtgctttctcgccagtatgcggactggttcggtctggtgggggttagccctgatatcgatgccggcatctgctgggaacgtttggggatgatgcctgaatatactgcaccgtgcgatatgctgatgctgatcccgacgcgtctggcgaccgaactgaatggctctggtggactgctgcgtgatgtgccgaccactgtcgagctctatggtcgacagtacggcgtcgaatggccggcaggccataatgtcggctgtgtacgggatggcattaacacgttgacagtgcactttgattccccatggtacccgccagccggcgaggttatcgggacagtgtcggagcagttcagctgccaggtggaacatacctggtatatgcctgatgcggaacgcagtggctacgatcgttacgaccgtggtgagcatgtcgacggtggacgaatagcggctgaggttgaggctggtgaggtgatccacctgacctacgccgataaggattctgtgccgttgtcaccgaatgcagccgccggctaa

SEQ ID NO: 103517 - DNA, 279 bp, Enterobacter aerogenes
atgacgattgaacaacgttactggcagaccattgccggcaggttactggccaaatattttggcctggcgttaaacgataccgatctgtgtgaagcggagtgcgtgaaggctttacaggaagcgggggtgcggccgtttgaggcgatcaacaacctggtggataaataccacctggttcgccttggcgccaatccctttacctcatcatcaccgtatctgcgccaggtggaagagctgggcgtgatcggtgaaacagaacaggagataaccggtgactaa

SEQ ID NO: 103518 - DNA, 1011 bp, Enterobacter aerogenes
atgaagaaaacatcaccatctcgccggccggcaaaagcccgtcgcgaacgaccagacctgtaccaacaggtcacggacagtatcatcggcgccattgagcgtggcaccttaccctggcgcaagccctggcggactgaccggaaccgggtttataccgggtctgtcatgccgcagaacggcacgacgggttaccactacagcggtgtgaatgtgctgctgttgtggatagctgcggaagaacgcggttttcactccaatcgctggctgacttataaacaggcggaggccgtcggtggccatgtacgtgccggcgagacggcaaccctggctgtggtattcaaaccctgggataagcaggtggaggatgctgatggccggcagctgtttgacgaagagggaaaaccgctgaaaacgcgaatacccatgctgaagccgctgtacctgtttaacgttgcccaatgcgacaacctccccgagatcgttgtcggcgttatgccggcaaccgagacggatgagggtgatgcgtcggttgatgcgaaaacgcaggctcaggttaacaccctcgttgaggcctgcggtgttcgggttgaacaggcctaccaggacagggcgttttactccccgctccgggaccagattgtcctgccacaggctcagcaatttcggactgaggcggattactggtcaacgttgttgcatgaactggtgcacagcaccggccatgctaaacggcttaaccgggaagggatcacgtcttcttcccggaggttcggcgacccggtgtacgcgtttgaggaactggtggcggagctgggcagtgcttttatgtgcgcgcagctcggcgtctttggcgacgtccagcacgacagctacctcgagcattggctcaaggtattgcgagaggacaagcgcgcgctgtttcgtgcggccaaacaggcccgtgaggcgtcagaatttttgctgaagcccctggcggacccggtgacaaccgatccagccgttgcggcatga

SEQ ID NO: 103519 - DNA, 603 bp, Enterobacter aerogenes
atgttgcattttaaccctgcagaactgcgcgccgtggtggctgaagtgcgcgccaatcagtgtgcgctggtgttggccaaggataatggcgtctatctgatgccggccgtgggcgaacgaaacgccaccggccgtatcaaacacctggcgtatgccgacgggtgtcatcctgacaaggatgaggcctggtatgaaacgtcccggcagcttgccggcggcgacgactttggcgaggagctggtgctgaacgacagttgtatcgaacgaatactgtcgcaaggccatgagctctggatccacctgttacccgaaacggtctatatgcacgttgccacggttaactgggtgtgtgtcgccgattatcgccgggtgaccgcgcgcatgctgcagctggccgaggtccattactcggtctgcgtcagccaggatgagtttaaacactggcgtgagcgggccatcaacctgctggccacggcctgtcataccgattgcaaacgggcaaaacccgccgatcgggctgattacctggctctgttcgaacggctgaaacagcgtgttgacacagtgaatccgaaaggggcactgcgttaccccgcgctctaa

SEQ ID NO: 103520 - DNA, 486 bp, Enterobacter aerogenes
atggggcttgatatcaactttttccgtcagcgtaaggctgactatccgatgttgccggtaaacggcgactggacacccgtcggtgactgggtgccgtgttcaccagcgtggctggaggactgcggtgattgtgcgcaggcgccgcgaatatacaaccacaaaacgtgtaaccactaccatccgccgctgctggttcacacctgtcattttcgcgggtttactgcgttgatgcattgggtggacaacagtgtcggggaggtcacaagcggtgagctgatggcgttcgaccgcaacgacgtccagatgctggatttgtgtctgtcgcggctgaatgaagcgaactgccatgaagagtttccttctgaatcgcgtgactacggcggtatttactggacgcaggtcgatttactgagggagtacgttaacagcgttcttgccggttttgatttcagtctggaccacctttacttccgggcttcgtggtaa

SEQ ID NO: 103521 - DNA, 573 bp, Enterobacter aerogenes
atgaacgtttattttgtcgcatcaccgtcccaggacgcatggattgatttcaccctggcggtgaccgaggtgttctggttgttgcctgaagaggcccggccagaaggtatcacggaagccggtcagctgtttgatggcatgatcttcgaaacggccggtttacgtgtatcaccggtagcagaggtaaatatcccgatgcaaccgatgccttacgtcgaagaacgtgtggggttctttcagcgccctgatttttttcaccgactggttctgatactgattcataacctgtgccctggctctgtacggatagagcggaacgactccagactttccaaaaatccaggatgggagttgccactactctggttgcgccaccaccttaaacgcccggaacttcttgctccgggtgaagtggatgaggcggcactggctgatgactccattctttaccatttggaagggtataacagtcataacgatgatcccgatgaattgctttgtcgctggcgcgttattgtcggcatggatgaagtgctggccgtgcgtctgaatcaggcgcattcggcggcatag

SEQ ID NO: 103522 - DNA, 375 bp, Enterobacter aerogenes
atgcataccccgttacccaacgtacttgacgtgaaaaccgcgcttgatgcgtttcatttcctttgcctggtggaaggcaagcttatgagtatccgggcttgccagcgtctgggactgggtcttgaacgtgaagaccccactgagctgaatgatgtggaaagtgccgttatcaatgcgggtgaggcctatggtggtttcctgctggtcatgcagtacggctatatatcgacactttccgctaacgggcaagcgctcatggcttgcctggatactctgagcaaagatattcacgcgtcatattgggcgcaggccgtggagcaaggcaagcgcgatgtcgaagccgacattgcgattggcgagctcgaggtttggtga

SEQ ID NO: 103523 - DNA, 339 bp, Enterobacter aerogenes
atgtctgtttttacttcttcagttgttcctgatttcttctcatccctgcaccgtgtcaaatcggctgtccggcgaataccttttcgcatggcgccgccgcgttttactgactggtacgtcaatgcagcaggtaattttgccgttcgcgcgcatgttatctgcagtgatgatggttcggtcagcgcgttactgacgctgcgcaaggggtggtacaaaggcgaatatacctacgcaagcacccacgttgtgctgtcttgcaagcataccgagcgcagaaaagcttaccgactcgccagtcaacatgctgagcatttggccagactgcgttaccgtttttag

SEQ ID NO: 103524 - DNA, 900 bp, Enterobacter aerogenes
atgtccagattcggtaaacagctgggaaaacaacttgtcacgctagctcgtcagggacgagggagctttaaaaccgttgctgaccgttccagaattgcagaccgtttttctgaacgtctggcaaagttgaatattcaaatcagggatgtaaaacacattaaaacgacccatatcgaaaagtacattcgtagccggcaggctgagaatatatcgcttcgcacattgcaaaacgagatggcagccgtgcgttcaatcatgtccgctgcggggcggaataaactagccgatcccaaccatgagaaattgagcaaccaggctttagggatttcaggtgctaaccgtgatggaacaaaagctcctatttcagatgagaagttaactgctgtcataaatcacgtcttaaaaaaagacgcaggggtagcattgggtgttcagttgtctcgctatgtaggtttgcgaacggaagaaactgttcagtcagcaaagtcattaaaaacatggcggcaggctttaattaatggcgacgagcgtgttcgggttgtttttggtacaaaaggaggtcggcctcgcgatacaactatttttaatcgtgagaaggttttatctattttagatgctgcaataaagcattgtgatgaccacaatggaaaattgattgataaaccttcattgcatacagcaatagaacgctatcgaaatattgttcgtgaagcaggaatgacagggaaagaagctccccatagtttgcgatacgcttattcacgcgatgcagtgactcatcatgttaaaaatggaatgagtcgtgtagaagcggaggcattggtatcgatggatttgggacatggggatggccgaggtcgttatattaagcaagtctatttcaaaggtgatgtggagtaa

SEQ ID NO: 103525 - DNA, 612 bp, Enterobacter aerogenes
atgtttagagggataatcaagaggtttagtaaggaggtgaattatgagactgaattcacttctgctgtgaaacgctctaggaattggaatcttgaagtgcctgatatcacattgagtaaaactccatttctgactgggagtaaagctgagtctgcactaaaagttatacagagtattgcttcaaagcatactccagaagaagtttcacagcaatgttttgggtatatgtatttagttcaggatgcattagaggaagctttgcaaacaccgctttattatactttaggttatgttgattatgaaaagagaccagttttttatacagacgagaaagagttgaaaagtaaattggggaatccgatgtcaggcgttggagcgataaatttacatgcatggctgacgacgccaaatatggaaattatcgaccttacgtttgccactacatatggaattgtgaataacatcccatcagtcattggccgctgttcattgcaacactactctgaatttaatgaaaacatggtatatcatcctcagttggtcggcgaggattatttgaagcagatcggtgccttcgttgattttagggcattaaatgtatttgtaatataa

SEQ ID NO: 103526 - DNA, 1263 bp, Enterobacter aerogenes
atgtttatgctggctgacgttaattcgatgtactgtgcctgcgaacaggtattccggccggacctgaaaggccgtccggtggccgtgctttcgaacaacgatggcgccctggtggcgatcaaccgggagggaaaaaagctcggtctgaaacgtggcatgccgttttttcaggctaaggaaatcattaaaaataaaaaagtaactgtattttcaagcaattattccttgtacggcgacatgtcggcgcgctgcatgacgattttagaatccctcgcgccggcgatgacgatctatagcatcgacgaggcatttcttcacgttgccggcatcgatgccatagagtcattcgaagattacgggcaccgagtacgtgatacggtgcttcagcaaaccgggctcacctgcgggatcggcattgcccagacaatgaccctggccaagcttgccaatcacgccgcaaaaacttggccggctaccggcggcgtcgttgatctgacaagccgggataggcaacgacgactgatggcgttgctaccggccagtgaaatttggggatgtgggcgccagttgaccaaaaagctggctgccatggggatcaccactgcactgcagctagccgacagcaaccaggcattgatacgcaagacctttggggttgtgctcgagcgcaccgtgcgtgaactgaactgtgtgccgtgtatctcgatcgatgcgctgccggcaaagcagcaggtcatcgtcagccggtcatttggccagcgcgtcatgcaactgcaggacatgcgccaggcggtgtgccaatacgcagagcgcgctgccgagaaactgcgccgagagaggcaatactgccggcacgtttcggtgtttgcgcgaaccagcccctttgcacctcacgagccgtattacgccaacagtaatagcgtacagctcatgctggctacacaagacacccgcgatatcgtagcggcggcagtgaaagccctcgaagccatctggcgcgacgggtttcggtatcagaaagcggggatcatgctgaacgatttctgtgacaaacccggccagatcgatctctttgacgaacatccaccgcgagccggtagtgaacagctgatgaaggttcttgatagcataaatcaatccggactggggaaagtttggtttgctggacaggggataagtaaagcctgggcaatgcggcgagaactgttgtcaccccgctacacaacacgattgagcgatatcccgaatgccagattgatataa

SEQ ID NO: 103527 - DNA, 234 bp, Enterobacter aerogenes
atgagtgaaggcggcatactgtcaggggatttgctgatcgtcgatcgggctgaaaaacccgtgcatggcagtatcgtgatcgccgcggtcgatggcgagtttaccgttaagcgattgctgctgacgcccagggtttgtctggcaccgatgaatcccgcctacagccctatttaccccgaaacgctggaaattttcggggtggtgatccacgccctgcactcatttggaaggtga

SEQ ID NO: 103528 - DNA, 687 bp, Enterobacter aerogenes
atgtgtggccgctttgcgcaatttcatagccgtgacgagtttctggctgcattgcagttggaaactcaggtgatcgctacagacgggtggattctccgatataacatagcccctggtactcaagttcaggtcattcatcacaataatgagcatgtacagctggcgccggttaattggggctatgcaccggcatggtggcacgaacagggaaaaccgccgctcatcaatgcccgagttgaaactgcggagcacagtcgaatgtttgctccgctctggaagtatggccgcgcggtggtgccggcatcgggctggtacgaatggaaaaagtcgccggacaatccgcggttgaagcagccctattttatccgtggcgctgatcgccagccgttgttctttgcggcgctgtacgcagcagatagcgacggcagcggcagctttgtcattatcacggccgccagtcatgccggcctggcggatattcatgatcgacgtcctctggcgctgccgccggccgccgcgcgtgactggctcaataccagcttagttccgccctctggccttatgcaggctgacgtgtacagcctgcaagcggaggatttttcctggctgccggtctcgccggctgtgggcgccgttcgtaatgacaatccctcacttatcctggccatcgatacaccaatggtctga

SEQ ID NO: 103529 - DNA, 237 bp, Enterobacter aerogenes
atgaacaaaatacaattaatcgcgtttacagtgatatttgcattcttggccatcgttttttttctcatgtttgtcgggcaagtgacgcaaaatgaggcatggacatccatgcctgtactagccttttcaataattagtgcggcagtcgccgtactgatgcttatcggctatgttttgtctgggcggagtcagaaaggcaatggtgtgcatcagccacctacggagtcaggcaaatag

SEQ ID NO: 103530 - DNA, 402 bp, Enterobacter aerogenes
atgacccaagccagagatcaacaggcctaccagcaaggtatacgggctgcccgtaagtggcgtcgtctgaaaaatgtgattatgaaatgggatcggctttgcgtatctaaggtacgggagtacaggcttcctgcttggataggccatgttccgattgtaatcgctctcatcggttcggtcacagctatgctgttcgggggacttctcgttgctggaagtatgctttttatttgggcgttcgcattcattcttcaaaacgctgggcaaaacctttcgggtgaagttacccatgaaaacaatagcctggaaacccccaaaaattcatcggactatgcatacgaaagtgctgtaatgaacaacgaatatgacggggctccgtataaatctcctagcgataactga

SEQ ID NO: 103531 - DNA, 597 bp, Enterobacter aerogenes
atgttaccacttaacctgacggtctcccagggcggacgcgcttatgccggttacggaggcaatgcagactttaccctggacaactcggttaaccggctcgcgtcgctgggcggaaccgcgctggggagcctggcggcgtacccggcatttgatgcgatgcgtcaggcactgccgatggtgcaggcggtgctgctgatggccgtctacatcatggtgccgcttatcctggcgttcgctgcctacgagtacaagacggtgattacggtgacgttcgtggtgtttgcgctgaatttcctgacattctggtgggaactggcgcgctggctggacagctggttactggaggcattgtacagttcggactcgcacagccgctggaatgtggccgggttccagaatagtgccgatgacctgattatgaacctagtgatgggctgtatgtttattgtgttgcccatcgtttggatgggagcgttgtcatgggctggtgtaaatgttggccatgctattgcttccgcagtgaatagcggtacagaaacagccaaaaacactggggggaaagttggtgatgctgtaacaaataaaattacccgatag

SEQ ID NO: 103532 - DNA, 624 bp, Enterobacter aerogenes
atgttcatttttggatacctcagagcctctacaaacgaccaggacgctcagcgtgctagcaaaattctcaaggagtttgcacaacaacacggacatcgtattgctggatggtacgcagaaaatgcttcaggcgcttcactgcaacgcccggttctgctccagcttttgcatgatgcggagcccggcgatgctattcttattgagcaagtagatcgcctgtcgagactggatgaagagggctggaggaaattaaaagaaatgatccagctaaaatcactatcagttataagtctggacctgccaacaagtcatatagctctgtcaaaaaacagcgttagcgatcagtttactaaaagcatgctcaaagctattaataatatgatgctcgatatgcttgctgcgatttcaagaaaagattatgaagacagaagaaggaggcaaaaagagggtatcgataaggccagaagtaccggcgcatatcctggacggcaacctgaccttaataaacatgagctgattaaaacattacgactgagcaatgggaagtcaataaatgaaactgcaaaactagcaaatgtatcgagaatgacagtaatacgagtatgtaaaaactcagagcgttaa

SEQ ID NO: 103533 - DNA, 168 bp, Enterobacter aerogenes
atggtgatggtcgcggtaggtatatcaaacaagtttactttcgtggtgaagttgattgattcaattcgtcaatgtattaaacgtaaaagttcccagtactcactggactgggaacttaaaacttttgactgtcataaagtattatgcgggatgtttaaaagtaattag

SEQ ID NO: 103534 - DNA, 900 bp, Enterobacter aerogenes
atgtccaaattcagtaagctgctaaccaagcaactggtcactctttcccgtcagggtggaggaagtttcaagactgtagctgaccgttcaaaaatctctgaacggctctcagatcgtctggcgatgcttaatattcaaattagagacgtaaaacacatgaagacgtctcatatcatcaagtatattgaaagcaggaaggccgaaaacttatcattcagaaccatacaaaacgagatgtccgcaatacgttctgtcttgatgtcggcaggtaaaactaaaatggccgatccaaatcatgagcagttaaataaccgagctctcggtatttcgggggcaagtagggatggaactaaaacaccaatatcaaatgataaattaaatgccgtaattacatttgcagaacgtaaagataaaggcgtggcattaggtattcaattggctcgctatcttgggcttcgtacagaagaaactattcagtcagctaaatccttaaaaacgtggcgcagtgaattgctgaaaggcaatgaacgtatacgtgttgttttcggaacaaaaggtggacgtgtccgggaaactaccgcatttaataaagagaaggtcctggctataattgaatcggcgattaaatactgtgaaagtaataatggtaaattaattgatcgtccttcgctacatacagcaattgatagatacagaaatattgcccgtgaagcaggaatgaccggtaaagatgcacctcacagtttgcgttatgcatattcacgtgatgccgtaaattttcatgtgaataatggaatgagtcgtgaggaagctgaggctttagtttcaatggacttagggcatggtgatggtcgcggtaggtatatcaaacaagtttactttcgtggtgaagttgattga

SEQ ID NO: 103535 - DNA, 702 bp, Enterobacter aerogenes
atgaaagaatggtatcacggtaccaatgtgtattttgaaaattggtctacctctaatacaacaacagtatttaaacgagaacttatccctcacagttttatttcacttagcgttgatgaggaacttcttaagggtgccggagttgggcgatgcaaagcgacaataaacgaagatgctcgcgttgtaaatctattggaagatttcacattttcaaaagccctgtgggaaaatattagaagacatccatttggctcaatccatgtaggaacgaaaagtcttgcggcatgggaaacgttttgttcaaccggacaaatcctccgcccttatatatctgaaagcaaagaatatgaggaatgggaaaaaaagttaaagcacatgccagaaaataatcagcttgataaaatcttcaaggtgatggtgcagcaaaactttgttcgtcattggatcgagtttttcatgctcgaggttcgtaagatgggggttgatggcatcatctgtaatgaacatactcaacatgggaatcatggcccacggacttcagagaacttatacttcttcaacctaaataaaatatccccacctgtttggattaaaaagcctgataatagtaagttagaagttgaacgtcagacttatgagcgtggtgatataaaatccctcatcaataaagtgcataaccacccttatccattcaattattga

SEQ ID NO: 103536 - DNA, 642 bp, Enterobacter aerogenes
atgaatattaaaaaatttgctccgctgatatgtattggtgcaatcgcgcttagtggttgtaatgacccaaagaaagcgtctgaaagtaactttaaagcagcggcacaacaatatctcgacaccgtatatccgacatgctatttcagggctaactttccatttaagacggacggatattccttcaataacacgtctgaaatactacacgcaatggctgcgaaaggtcttcttacagagaaggagttatcacgtaaacacgttgaggcgtcatggggatcaaaagcacatgatgtggttgtcagcagttatgacctgacagatgaaggcaagaaatattacaagcctgacgcatccaagaatatgcgtggagagaacatgggtgggttctgctttggtaaagcttctgtttcagaggtgattaactttactgagccctcagatgcaatgggacaaaagatatccagagtttctttctcctataaagtcagtgatatccctgattgggctaaatcgcctgagattaccagtctggatagacagctaaaaaaagatgtagattcagaatccgaaccgcttaaagtgacaaatgcatttctccttacaaacaaaggatgggtgcatgagagattatttgggaagtag

SEQ ID NO: 103537 - DNA, 426 bp, Enterobacter aerogenes
gtgttaaaaaatacgtcaatcgcgttactaacgctcactattctgagcggttgtgctcaggtcaatgattctctcaaaacgattaatgctacgttagcctcggctacgaacaccctcaaatcgcctctccagactaccgacaaaacggtcgctcaaatctgttctgaagcccaacgcaaccctacccgggcgaatcaggagttcggtggtttaggattatcggtgactggcgtagtcaggctacatgatagctatggcatcggagacgatttcttcatgctcaaatcaggaagtaatagcgtggctgtgtcaggttatcctgagatggtatccctgaatgatggccagcgccttcaggtaaaagggactataagtaacatcagtaaagattttggttgcctcatcagtatcaaaaatgcgacttag

SEQ ID NO: 103538 - DNA, 366 bp, Enterobacter aerogenes
atggacaaaaaccagcaagcatggcaacgcggtgtgcgtatggctagcctgtggaagaaacttaaagcatctgtcctccattttgataaccgttgcgtcacttgggtaaagcgaaaaaatcttcctgcatggcttggccattttccgatatttttatttggctttatagctctatgtggttgcatcgtatggggattattagccgttttcagcttagtcactatttgggcgctgatggtaattatcagtaatatcggaagccataattatcctgatcactctcatcatgaccgcgaaagtgacgggatgttcaccccctatgatccaaagccgtactcttatgacgagtacgataataaattataa

SEQ ID NO: 103539 - DNA, 1509 bp, Enterobacter aerogenes
atgaccactaacagttattttgaatattttctgacactcctgggatgggttattaataacggtctgtggaatgtcatgctgggcaccgggctgtttgctgccccgttggcattcaaggttgtcggaatctggctgaaagttcgtgaggaaggagaagacgagggaaataaggggatgctttcgcttccccgtatcgaaaacgcaatgtacggggcatttttcgtgatgctggcctgctgtgttccactggttaatgtcagcctgagcactatgcaatatgatacttcgcgggctaaaacgtgcgggacctggactcccaaagcacccgatgaaagcggttattcaggtgtagtatccagcctgaacgacgaaactgctgctgcgccaatatggtgggtacttgttcataaactttcaaagggtattacacaggcatccgtggccaccattccctgccgaccggatatgaggcaaattcgttttgacgtgcagcatactcacatagcaaataaagctctcgcgcaggagttgcaggactttaccaacgactgttattcactggctctgtatagctggaaacggaacgatcgtggtcagactacggataaaaccacgctgaatgatattgcctggatcggtagtagtacgttgttgagtgactactatccgaacctgcagtccaaaatgccacgcgccgattttccctggtcagacagccgtgacagtggccggcccaacacagggcaaggtggatatcctacctgcagccagtggtggagtacggctgatatcggtctgaaagcccgagttaaatcacaggcggatccagatatgtggctgcgtatttcagcggcgatgaaaatgatcggtgccggcagtactgattatgaagaagccgttatacgtcgcctggtgagtcccgaaagcttgactgtctcacaaggggggcatgtttatgccggctacggtgggaacgcggactttactctcgataataccgtgacaaggttagcaggtatcgggggtaatgcgcttggtagtctggtagcctaccctgcttttgatgcgatgcgccaggcgttaccgatggttcagggcgttctgttgatggcgatttacgttatgatcccactgattctggcattctctgcttatgagtttaagacagtgattacaataacttttgtggtctttgcactgaactttctaacgttttggtgggagcttgcccgctggctagacagctggcttttaactgctctgtacagttccgatacacatagcagatttaatatggcaggttttcagaatacctcagatgacctaattatgagtttggtgatggggactatgttcttggttcttccggctgtatgggtaggcgcattatcatgggcaggtatctccactgggggggtgcttgaaaaagcaattgctgctggtagccgtaaagctgaagaaactggggggcaggctgttgattccttgaagaaaagtgcagggttataa

SEQ ID NO: 103540 - DNA, 291 bp, Enterobacter aerogenes
atggtgatgtttggcgtgatgattgctgcgcttgttattgcagataccgcgatacgccatccaaccgaaagcgccgccctgaaagactggttttatgccagtcgttatgggtggctggcatggagaatagcgatttacgtcctgttgggatgggggatcaggaagatccgccacgctcccggtttcagggaggaataccgtaagcctctgaaccggatgacgattgtcagcatcgtattcattagtatttgcgagtacgcgatgttcagccaaatgggggccacttcatga

SEQ ID NO: 103541 - DNA, 1437 bp, Enterobacter aerogenes
atgaaaatcaatcgggtattaaatatggtcagcaccgcgttggtactggcaggtgtgatggtggctataccgcaggctcaggccgaactttcactcacgaccgtaaatgacagtgcgctcggttatggttcatcagttaatggcgcaatttcggacaagctcttttacaacctgggtggcggttcagtgatctcgcagccggcaacgcgcagcgatatgaaaaaaatgggtctctcggtgggtatgagcagtgatttgatgtgtgggaacttcgacctgcagaccaccatcggcaaccagctgaatggggtaagcagtggatttaaaaacctcatgggtgacgtcatttcaggcgcgaccggggccgtggccagcatgccggccatgcttattcagcgggcgaatccaggcttgtatgacatgctgacaaacggtgtgcttcaggcaaatgttgcgttcgataaggcacagcttaactgtcagaacatgtcaaagagactggccgatatggctgataccagcggctggactcagcaggcacaaatggaagagtacaagtctcaggtcaatagtggggacaccgacgccgtacgggctgacaactccgggcggcaggctacaggaaaggagggcatgacctggatcggaggtcagaaaaaagggggcgctggccagtcggcaatacgtattacccacgacctgacgtctgccggttataacatgatgaatggactggatgttaccagtacgggagcagtcagcagcagcagctgtaacggcggagcctgctctaaatttggcagtgccgaagcagcagctgaagaaacggttaaagtgctcggcgatcagtccctgcggacgtgtaatgatgcaagccaatgtaccagcggggacagtgatgaccagccagggttaacgcaggcaggaaccggattcgcgcctttgcttgaagaagcaaccaaagttaacaccgaacagttggtaaaactggtcaatggcactgtgcagcccaatgccaccgagctggccaagctgaaaacgggtggtctgccgattacagctggggttattaaatcacttcaacgagatccggataatgctgccctcacggcgcgccttgccagtgagctggccatgtcagacacagtcgaaactgcgttgctgatgcgccgtatgatcgtcaccgggatgtctgagcccaatgcggccagtcttccgaaagcgattgatgccggcacattacgtatcgcggcgctggatcgggaaattgccgcactcaaaacggaaatggatctgaaacgtgaacttgcacgcaactctgtcctgaccattatcgaccgcgacaatcaacgtgttgaaacaaacccgcaagtccagactgaagacaataccgatgttcggtttaacaatatggccaacccggacagtggagagtaa

SEQ ID NO: 103542 - DNA, 993 bp, Enterobacter aerogenes
atgaagcgattaccttcccggtttcgccgcacgttgtgtgcagcaggggttgcgacagttcttaccacggcatcgttgccagttgccacagcggctctgaatacagcccagatagtagccagtgctatcagtaccgactgcatcagttggcgtgtgagtggtatatgttactggttgttctgcaccacattcggctgttcagtcagaacgtcggtaaaagtgactcacttcatccctgaagccgtggtttcaacatatgtttccaacggtggcaacccgtggactgaaatgtcttttgtcagccagacgtcgggtgggcttgaaagtgccattaccagtggcctttccggtataactgccggcggcgcaaatccagctgatgtaaaagtaccgggccagcgtcattcatcaatccgattcaaatatgccgatgcaattggccatcctgcgacatccattattggcggcagtattccggggtactcctgtgacactgcagccacacccctgatgccttatttcctcagtacgctggactcactagcatggcgaagtggcctgccagagtcactctatccggaagctttggttcccggacaacgtgagataggcagtcaggccgcagcaaacatgtggggcaatctttacccccgctcagggtttgtcagccagaccgatgatgacaaagcctctgcgatagtggcccaacgggtagcagacattattacccgaacaggccaacctcatgtgtatcaggtgcttaaaggctcacacagtgctggctattggccaccgggcgaagtcactgaaaacaccggtactgcaaatcataaatggcaacgtctttctcccagcatgacaagcagctgtgccgtattcccagacggcagccacacgatcgccagtgatggtaatgaaacttttgctctctggcagccctacagctgttgtaaacgcatgggacaaactttcctgagcagcactgacttttaa

SEQ ID NO: 103543 - DNA, 402 bp, Enterobacter aerogenes
atgaaactgagatacctcatcttcctgccggcgctgttgccggcgaccgtactggccggcactgtcatttataccgacagccggcacatgcctcaaaacttacctgacaacgcgacggttgttctcctggatggcccggataagctacaggaggagatgtttggtcagttgcctgccgatccccggcaggcagaagcgcaagccaggcaggcaatggcttcacctgactggcagcagaaacaacagcagctcgtaacgtcttatcatcaggttgtccatgcgtgggaactgggcatcagaaaatttcctgccattgtgtttgacgatcgtgacgtcgtttatggcactactgatattgcccaggctgaaatgctgcgtcagcaggcgggggggcagcaatga

SEQ ID NO: 103544 - DNA, 1050 bp, Enterobacter aerogenes
atgtatctgaccgcattctgcatatgtattatgtatgaacagggaataacatatgcgttcattacgacaaactttaccagtagagaggggattttgcaacaacatagctatcctgcaatcgaagcctacgtatcacaggcccgcctgaaaacatacattgctctgacaaacaatgcctcacttggggaatgtataggggcttatgtctggaacaaacgtgtgggagccgctctgttcccacttttacagtgtcttgaagtgacattgagaaacggagtcaataatgcggcttcagcccattttggtacccctgcctggtttgattctttaacgaagcttgccggacacgattactatcatgcattcatagcccaatacccgcatctagtaaatgatttctacaggaaaggtgtaagcacaggcagtcgtaaaaacaaaaaaatttggacatctcgtcacgaaagcatgctgtatcaggcaaaagataagttgagtaaggcaggtaagcctcttcatgctgatgcaatcgtcgcagaactgatgctaggtttctgggttggtatgtttgagaaaaactatcatgacctaaacaatgcgaatagattatggcctcaccttgaacctgtggtttttcccaatttactaccgtctgaacgtcgccatggtgaagcgcataaaaaattaataccgattaaggcgttgagaaaccgggttgctcaccatgagccaatctggaagcatgctactgtcggcaatagtgttactgcaatcaagatgcttacgcagatcattgatgacattgtgtttatcattaatggtatcagccgtgagcgggcggagatgttgcatgaatctggtattgagggtgcggcccgtgcaatttgtcgtaaagaatcgcttgatttttacctcgccggcagggtctctaaggagatttcattaagacgtctgaaacgtaatgtactccgacacattgatggcaaaagtcttttccccttctcttacaacaacgctggtaaggaaaccgttatcctcaatttgaatatgtaa

SEQ ID NO: 103545 - DNA, 1053 bp, Enterobacter aerogenes
atggtagccgaaaccatccagccactgaattataccgtggaagcgatcaagcatatcaatttcatggaacgcggattacgcgacaacgccccctatactgcctatgtgatgcggcaagtagttgaaatgttgcacaacagcgttaaatttattctccccaattgttgcgacatcattgaacctgacgagtacaggcagtcacatctggacctggcaagactgccgtatccggttgttgcttttgaaattccctgggtgaaagagaccccggagaaggacattccaggtttctcaacctcgctttcaactaaacgtatagccttatgttgggaaagtgatcctgatttcgagccgatacctgggtgcaattcgatcctgagtaaatctccggaaggcggcgtgtttatacttccggtgtcctggtcagatgttagccgtcagtggattatgggaacgggggggattttctttccccatgagaatttactgcagaagaaatccaattttgaggatcaactccctgcctccaggatagcgatggaagcgcttcgtgatgcaggttcgttgttacccaatagcgcacagttccgcgcagaacctttcttggcatgccctgaatttaaagatgaactgagcatgcaggcaggaggtattgagcgtttatatgcgcaaattcttatggacacacgtgatgaattacaggcattcatccaggcgtgcagcgtgctcaattgtgagaatgtggagcctgtgacgttgagtcataagccgtcgaaaaaattcgttaacgggcggcgcgttaaacctgttgataaaagccagttgcctgcttatacctacaaagtgctccagctctcagacgagaagacgcctttttcagcgaccggagcaggaacaaaaggtgggagtaagcgaatgcatctccgtagagggcatatcagacggcggaatgagaaactccactgggttcgcccgacacttgttaatgcgaacagtgcgaaaggtcttgttgaaaaggattatgcggtttctgttaaacctcagaaaatttag

SEQ ID NO: 103546 - DNA, 390 bp, Enterobacter aerogenes
atgatgacgctgaagtacccgacaccaaaagcatcgacaccggaaaacctgaaatccgggaccattttcaccctgcctccgcagggtgaaccctgcatatcaacactgactcaggaaaatcttcgccggcttcgggaaaacatcacaagccgtctacgcggacacgttacgttaacctgtaatcctcaccgggtgggcttgagttgctgcgtggcattaactctggagggaaagttggggcacactgtgaatattctggtcacagtcagcggccaggagagttggccaacagaagaggaatacgaacatccgcgttggtatatctcggtgaccgactcatctgacatgttatatctcgtactctggcttaacagcatcaccgtacactga

SEQ ID NO: 103547 - DNA, 2853 bp, Enterobacter aerogenes
atgttctctttgttcaggaaaacagtaccggagaaagccggtaagaaacccgcttccgtaacacctgatgtggcctctgcctgcggacgtgatgcgctgaaacgtccggggaaaatgacccgccaggatgaacaacgtctgtatcattcaaatccttcgattattgattatctgccctgggtggaatttcttgatgatgaacagtgcctcctacttgaggacggcatttcagtaggcgctgtttatgatgtcacgccgattgcgaccgaaggtcgtaccagcgaccgtctggatcaaatccgcgatacggttgaggatgcactgcaggacagctttgatgaatatgatgaaaatccctgggtagtgcagttctactgtcaggacgaagatgatgcagaagcgtatctcgatcatttgcgcagctacgttaaaccccacgcacagaacagcgactttactgctgcctggcttggtgagatggaaaagcacattcgtggcatttcccgccctgagggacttttcacagactctctgattaccggtcaggcatggcgtggccaacagcgacgaactcgtatggtcatataccgctggctgggtaaatctgcaggcagggatcctatgcctcccgtcgccatgctgaatcaggcgtgtgaccgtgttgtcagtgcactgggtggtgccggtattcgctgtcaccgtcaaaacggcctgcaggtacacagctggctgctgaggatgtttaacccatcaccggattgggttgataaaaaaacgctgtatcgtcaggccgcttatgcagatccccgtgatacaccggctgatgtcatgcctgttattaatgattttgccgaaacgctgtggtttaccccgcccgtatccgatcctgaaaatggtgtgtggtggcttgatggtaaacctcactgcgcgctgccggttgaaaaactgcgtacccctcctgaacccggcgcgataaccggtgagcagtcacgtggtgagaaaaaaatcaatgccctgatggatatgttcccggaagggacgatgttatgtatgaccatcgtcgtgcaacctcaggatcgcctggaagagcaattcaatcgtctttccaagaatgcggtaggtgagaataccgagtccggtcgtgttcgtcaggatgtgagaacggttaaggaatatctgggaaacaggcacaaaatgtaccgggctggcatcacgttcatgctgcgcggcgatgatatggaaaatctcaaacgtaagcgccttgacctgaccacggtcttactgggtgccggcctgcagccggttcgctctgagtttgaagtcggaccactcaacacctggatcagagcactaccgatgtgttttaaccctgatacggataaaaaacactggtatacacgtctgacatgggttcagcacctcgccggactgctgccggtcacaggacgcgaaaccggcacgggccatcctggctttagcttctttaaccggggcggggatacgctgacttttgatcccctcaacaagctggatcgcacccagaatgcgcacttgcttctattcggcccgacaggagccggtaagtcggcaacgttgtgcgccagtctttcgcaactcatggcggtgcatcggccccgtctgtttatcgctgaagcgggtaattctttcggactgctggctgattacttcaccagtctgggtctgtcagtgaacaaaattagcgtcaagccgggaagtggcgtcagcctgcctccgtttgcggacgcgcataaacttgttgaggaaggtctgtcttctcatgcggttgatgaaagtgacctgcctgatctggatgaagacgacgatgaacaggaagacaagcgcgatattttgggcgaaatggagatttcagcccgaatgatgataaccggcggagatccgaaagaagaagcggagctcaaacgtgccgaccgcgcgatgattcgtgaagcgctgctgatggctgcacacaccacttataaagaaaagcggcagatgctgccctctgatttacagaatgcactgaatgtaattgcttccgatgaaggtaatgctgacagccggaatgtacgtaatgcgcaacgtaaggctaaagcggctgaaatggcggaatcactgggtatgttcactcaggctggcagctttgaagctgaactgtttaaccgtgaaggggaactgtggccagaagctgatgttacgttggttgacctggggcatcttgcccgggagggctacgaagcgcagatggcactgaccatggtctccatgaccaatatgatcaataacatcgctgagcgtgaccagtatcttggccgagacatcgtatttaccgtcgatgaagcgcacattgttacggtgaatccactgttgtcaccgtatatgactaaagttgtaaaaatgtggcgtaagctcggcgcctggctctggctggccactcaaaacctgaaggacttccctgacattgctgaaaaaatgctcaatatggcggagtggtggatctgcctcacgatgccaccggaggaggtcaaagacatctcccggttccgggctctgactcaggaacaggagtctgtgctgctatcagccagtaaattatcaggttgctacactgaaggtgtggttctggccaagcgaattgaagcgctgttcagagcggttcctcccagcctgtatctggcactgggtatgacagaaaaagaagagaaagcagagcggcgtaatctgatgcgcgaacataactgtagcgagcttgatgcggcggtactcatagcccaaaaacttgaccgtttacgcggtctgaacgatcacaattttaaggagaatgctgcggcatga

SEQ ID NO: 103548 - DNA, 432 bp, Enterobacter aerogenes
atgattcagaacctttatcgtaaaagcacattaatcaccgcagtcttgttgagcgccgtggcacttagcggctgctccacatcaaaagaggaaatgctcccggctggtgataacactatgcttgaattatggaacggtgcagacggtatcggctccgcgtcccgtcattctgcagaagcaagagacactttgcgccggccgctgaccgtaactgagcgtcaggcaagtgcgcttgatgatcgtagctacagccgcacagaagaaagcgagatttctcagcagttcccgcggctacctaatccggacatggtgatgtatctctaccctcatctgattgacggtaatacgccggtaccgggttacagcacagttttccctttcttcagccagactcagtatgccatgccgggtgaacgcacggaggctatgtaa

SEQ ID NO: 103549 - DNA, 963 bp, Enterobacter aerogenes
atgtaccagttaacgcctaccgatcagaaagaaattaaccctcgcgacgctgccagcggtaaagcacagccggagtttcctacttcgttcatgagcgacaacgccctgacacgccagaaagcctcatatgagcagaaggttaaggggcacagcaacgaaaaaggtgctgaagaggaagctgagccagtctacacacttccagagaactccacgctcgtcggaagtcgggcaatgacagcgttgctgggccgcgtaccgatcaatggttccgtgaccgatccttatccgttcaaggtccttatcggtaaagacaaccttactgccaacggcatagagctgcctgacgtagaaggcgcggttgtgtccggtacggctactggcgactggacactctcctgcgttcgcggacaagtgaacagcatcacatttgtcttctctgacgggaccgtacgcactttgccaaaaccaagtgatgttaacagcggcggcgggcagagccagaacaataaccagtctaaggacggtagcagtacaaccggcggcattggctggatttctgataataacggtattccttgtattggcggagaccgtaaatcgaatgcgtcaacgtatctgccgaccatttttgcgctgtctgccgcaggtgcagccggtgatgccctcaatcagaaccaacagaccacccagacaaacggctatggcggcgtcacctcttcactgaccggcgatgccggacaggcagcccttggaaaagcgatctccggtggtatgtctgaaactactgactgggttaaacagcgctatggccagacatttgatgcgatctacgttcctccgggcgcacagattgcagtacatatcacacgccaactggcgattgactacgaagacgaaggccgcaaagtgcgttatgacttcaccatgcctggtggcgtcagtgacaacggcggtctggactaa

SEQ ID NO: 103550 - DNA, 345 bp, Enterobacter aerogenes
atgaaaaaaatatttactggtgtaatgctgggtctaatcgttgcctctacaggcgcatatgctgacgtcaataatccacacgcaaaggtaacggatttacatacagcgaaggatagcaacggtatcagctacgttgatggtctggttcagaacacttcagatcatgtgctgacaatgatggcagttaaagtaaacctgctgaaaaatggggttgttgtagccgataccattggaatggctcaaaacatccagccagagcagagttggaaacttcacgcagcctatccggataccgataaaccggatacgtttcaagtcacagaagttatgaccttgccacactaa

SEQ ID NO: 103551 - DNA, 759 bp, Enterobacter aerogenes
gtggctgaaccgcagcgtatccctcctaaacaaccgttgccggaacgtaagcacggtatcttttacaatcttctgtggggctggccatgggctctggtggggatcattctaagctcactgcttctgagtttgctgattgagtatatcggtattgcctttttctggccggatgccggtgcctcacacagcgaggccgtgatgaatactgagctgggatggctttctactgaatttacccgaagcttgctgctgtctgaaccgtcagtgacagtcgcgcgctggataacgaacgcctatcagtggcttttcgttgatagtggcatgattggctgggttaaggaccagtatacggcccaggtccattcgaacaacgggcttgcccgagaaattaacagctggagtggctggttagccggatacctgcatgagtatctgctggctaccgtctggattactgttatcacactggtacgtttcaccattctcgtgctgtctgttccactgttttgtatggtcatattggtggcggttgttgaggggttgggacgtcgcgatttgaggcgtttcggagctgggtatgagagctcatttatttatcatcgtgcaaaaaaactggtgaagccggcaatcgttgttcccgccatgttatatctttcgtggccaactgctgtttatcctaatctgctgctgcttccggcggcgatcctgctggggatagcaattaccgtaactacggcaagtttcaaaaaatatctttaa

SEQ ID NO: 103552 - DNA, 2103 bp, Enterobacter aerogenes
atgagtaatcgctacgtgattgaggcgcttttgcgccctgccgttgagctcaatactgcagttgtgtccggggctgcggcgctggtctgtgttaaagctccatgggccgtagcactcgcgccttctgtgagctatgtgactgctgctggttttggtgttcttgcggcggtcagagcccgtgagggaatgacggtcattcgttatcgcaagaacctgacccgtctcccgcgctatgtcatgagcactcgtcaaatcccgctaagtaatcgccgtttgtttctcggtaggggctttcgctggacccagaaacatacgcagcggctgcaggatacgttgcgtcctgaagtagcaaagtacctgcagacgggaaaatgctatcaggccgccaggtggctggagatgcgcactgagcataacctgccgtggctggggaaaatactcagcacggattcccctctcaaccctgtccggcctttaccgccggttggcggtaatcccgtcctgcatggcgtagaacccaatgaagtggatgtgagtctcgcgctgggagagcgtgtcggtcataccgtggtctacggaacaactcgcgtgggtaagacccgtctggccgagctgcttgtgacacaggacattcgccggggagaaatcaccatcgtctttgatccgaagggtgacgctgacctgatgaaacgggtatgggcagaggcgcaccgggcgggacgtggagatgaactttatattttccatctcggctggccggaaatttccgcacgttataacgcagtagggcgttttggtcgcgtatcggaggttgccagtcgcgtatcagggcagctttccggtgaaggtaacagcgcagcgttccgtgagttcgcgtggcggtttgttaatattattgcacgagcgctggtgaaccttggcgagcggccagactatacgttgatcatgcgatatgtgaataatattgccgacctgtacatccgctattcagagaaagtcataaacgaaaagctgccatctcttaaaaagcagattgaaaataatcagaacgttctgggtgaagaggacgttccaagaagtatgcaaggccagcccgatgccctgcgtatctgggctatagaagtcgctctgagctccgaacaaggtaagcaactgtacgatccgattcttgatggtctgcgcagcgccgtgcgttatgaccgtacgtactttgataaaatcgtggcatcgttgctgccactgcttgaaaaactgacgacgggtaaaacagctgaactgcttgcgcctgactatctggacatgaacgattcccgtccaatcgtagactgggagcaggttattcgtaaaaaagcggttgtctacattggccttgatgcgctgagtgacagtgaggtcgccagcgcggtcggtaactctatgtttgctgatctggtgagtgtcgccggccatatctacaaacacgggatttcctcaggattgcctggagccagtcaggttaaaaacccgatcaacctgcattgcgatgagttcaacgaactgatgggtgacgagtttattcctctgattaacaaaggcggtggtgccggtatgcaggtgacagcctacacgcagacctcttctgacatcgaggcacgtattggtagtacggctaaaacagcgcaggttcagggtaacttcaacaacctgattatgctgcgtgtcagggaaaaccgtactgctgagctgttaaccacgcaactgccccaggtggaaatctataccaaaactctggtttccggccatcaggacacagctgaaacagaaaccgggcaggactttacctccaatacgcaggatcgcgtcggtacagtgaaagttcccttacttgagcctgcggacgtagtcactttgccgaaaggtcaggcattcgcgctgcttgagggcgggcaactctggaaaatacgcatgccgttgcctgcaggagatgctgacgatgtaatgatgcccgaaagcattgccaaaatcgcagaagaaatgcgccggaattatcagggcggggactcctggtggagcgacatgccggtgattgcgccggctgcttcaggtggaggtgatcgtggctga

SEQ ID NO: 103553 - DNA, 507 bp, Enterobacter aerogenes
atgaaaaattttttatattcgtttgcaaatttagttaatttgtcagcagtactcatgtcacaagtgattttaaggttatttcgtattgtgatcctgtggcccgcttttattacaggtctgattgttctctttatcgcatcgttatatttatggaaaggccctgactttctgacagctaaatatgccagcgacgcggattcttatcgttctgttctcgccggtcatattcgattggttacctatgaaataccgcagctcagtcctctgacaaaggaggattttaatgccatctctggaacgcgcaccgaaaaggtgctgacgttcaaagaggcggctgagagtgatttatcgtttttaaagactttctggcttgcgttaatcattctgggaggaatcgcgcaagcactcggactctccggacgcggacaaaaggaagtagcttacattcagtatgatgcaggggctggtaaccgaaacccccttctgacaggggaaaaccatgagtaa

SEQ ID NO: 103554 - DNA, 516 bp, Enterobacter aerogenes
atgaaacctggatatttagccttacttttcagttgcctgttcccactggccggacatgccgaactgaatgtgatcgcagaccttggcggtgatgacgcttcttcattttttgaaggggttaataagcagcccggaatggccgagtcttcacctgtttcgccgccggtacgtcaggggctggatgccatgctacccgttaatacgcccgaaatgacccccgggaacataggtgatcgtcggctgaatttgccagggattggagccctgtttctggttggtagcgatgaactctcaaagcactggcttgaggcaaatgccgacaggctcagggcaaaacacgcagccggcatgattgttaatgtcagcagtaaagaagaggtgcagatgatgcgggagattgttccgggcgttgctctggcaccggcatccggctctgagctctcccgacgtctgaaacttgaacactatccagtactgattacggacaacggtctttcacagctggtcagcccgtaa

SEQ ID NO: 103555 - DNA, 669 bp, Enterobacter aerogenes
atgctcgcgctgctagttggaggcgctgcatctgcagcgcctgctctggcagcaaaaacggatattcctgagggctatattcgggtcgcggctgctcatggcatcccgccagaggctctttactctgtgtcgctgaccgagacctcaatggctccaggcgcgattgcttcggtcatgagtaaaaaagggaagaaggcaggtttaccaccggtgatgcgaccatggccatggaccattaatgtcgcaggtaaaggctatcgctacagcagccgtcttgaagcatgggaggcgcttcaggttttcatgaaaagttatcccctcaagcacatcgatgtcgggttggttcaggtcaacctcggctggaatggccatcattttgcctcaacgtgggacgcctttgatccatataccaatctgaatgctgcagcaaccattctgcacgagtgctgggaacgtaaccccggtagttggctgaatgctgcaggatgctatcaccatccggcaggcggactggccgctgaccgctacaaggggatcgtgaaacgccatcttgccagactcaatgctacttctctcccggtatccgtgtcccagccagtcgctgcctctcaggctgtggctgtactgacccctgagcctggttttgtctggactgaaccaggcaaataa

SEQ ID NO: 103556 - DNA, 708 bp, Enterobacter aerogenes
atgatgaagctgaagccaatattactggctgcactgatgctgagtccgttcgtgcatgcagcgaacagcaattcttcggttgagcaatcagacactactcagacccggacacagtctctacagcaacaggctggtcaatggggggttagttcagaagattatcagcgctatcagcagttaatgaagggacctcgcggcatccagtcgcctggactcgatccgctttcaacactgggtattgaagcccgtacagaggccgaacgccgtcagtttgcagagaaatgggtaaagcaggagtttgcccgcacgcaaaaagagctggagttccagaaggaaatcaataaggcatggcagcgcctttatcctgacttgttgcctgtaaatatgggcaacgcagcaggtattgcgcatgacactggcggtcggctggctctgtttgtcaaatccaaagattgcccgacctgtgacgcccgcctttcggctgtgctgaccgacaatcgaccggtcgatatctacctcgttgacagccagggaaacgacgcatttctgcgtaagtgggccgtagatcatcatattcctgccgacaaggttcgtagccggcaaatcactctcaaccatgatggcggccgctggatgcgctttggtaacggcatgatgccagtgctgcttcagcaggggactgacggatggcgtatcgcagcattctga

SEQ ID NO: 103557 - DNA, 753 bp, Enterobacter aerogenes
atgagtgaacaaaaaccgtcttcaattccggatatcccgcttagtggcaaacagaagccgtcattaaaagtaaaggctgctgtgtatggtgcggtagcaattctcatcttactggttgttgcagcagtggcgttttccaaaaaggtaaccagcctgcaggatgaagttataagcaaatttgatcagcgagtcaccactcttgaagaacagaacaaaaacgctgatttctccgcaagcctgaccgcgctgcgtactgatgttaactcgctgcagacgggactgtcagatacccgtaagagcgtacaggacattcaaaagcagcttgatgcatccagcgtgaacgtgcgtgaccaggctgctttgcgtgatgccctgtctcgtttgcaggaggtgcagagtactcaggaaagcaagctcaatgcacttacggacaagctgagcagtctgagtcagcgccctgcagtaccggttgttaaccctgcgtctgccgcaaaaaagccgcttcccgctaaacacagagctgtatcacgtccggtacgcattgcacgtaaagcaccgtttgttctgacgggtgtggaacagcggggatctgaagcgtgggcagctattgccccgcatggttatagcagtctgtctcaggtcacgttgattggtgagggtgaaaccgtatctggctggactcttgtctctgccggcggctcgcgtgcaacctttcgcgtcaatgggcagatcaccttactcaatgtggagtag

SEQ ID NO: 103558 - DNA, 630 bp, Enterobacter aerogenes
atgaaatttcatacccgccatcgtgttttagccgctactttgccaatgatttttctggctggctgcacttctacacaaaaattacagcaacgtgatatcgctgatccaacgccttccgttaccgtcactcgcaacgttcagccagtggcagcagatgaatatgcccgtacgccagaagtggtccgctatgaccgatacctgttggtcagtaccgacccgcagtctgcacaacgcgatccactgtcacaaattattgacatacgtattccgtcgtctctgcatccgaccgtagcggatgcacttcgctatgcgctgaaacaatccggctattcgctgtgtgcaacaggtcctgccaatggtgtgttatatcggcaagcgttgccagcagtgcagtaccagttggggcctatgcgactcagaacggctctgcaggtgatggcaggcccggcatggcagctggaagtcgatgatgtacagcgggttgtttgccacaacctgcgtgatggttatcaactgccgcctaatcagatcgcaccttcccgatattcagcacccatggtcacccaaccggccagtaccactaatgcgatttcacctgcgccggtcaaaggggagtttctgaaaaaatga

SEQ ID NO: 103559 - DNA, 432 bp, Enterobacter aerogenes
ttgggaactcgttatgaaaccgatgtggttgcctgggccaatgaacaggcagcccttttacgttccggtaagcttagtcaactggacattgcaaatattgccgaggagattgaagacgtgggcaaaagtgagaaacgcgaactggcaagccggatggcggtattactggctcatctccttaaatggcaatttcaggcaggcagacgtggatccagctggcagaggactatacgtgaacagcgtaagtccatcctgctcagagtgcgaaaaaccccgagcctgaaaagctgtctcacggatagtgagtggatagaagaagtctggtctgatgcagttgcagcagcagctgaggaaaccggtcttgatggcttcccggatgaatgtatctggaacagcgaacagattctgtccgctgagttttatcccgactga

SEQ ID NO: 103560 - DNA, 546 bp, Enterobacter aerogenes
atggcttcacgtggtgttaataaagtcattctggtcggtaatcttggtcaggatcctgaagtgcgttatatgccgaatggcggcgctgtaaccaacctgacgctggctacatctgaaagctggcgtgataagcaatctggtgaaatcaaagagatcactgaatggcacagggttgtcttatttggaaaactggctgaaataggtggcgagtatcttcgcaaagggtcccaagtctacattgaagggcagctaaaaacccgaaagtggcaggctcaggatggtcaggaacgctatacgacagaagttgttgtaaacgtgagtggcactttgcagatgcttggcaatcgccaacaaaccactgacaatcatgcccccggccaacctacgggaaagcaaggtcaacatcagcctcaaccagcgggtaatcctcctcaatccagtcagagtggagggacagccgccggggcaccaatggatttttccgatgacatacccttcattgggttaggttacggaataaccagacatgccgtatattcagtctaa

SEQ ID NO: 103561 - DNA, 201 bp, Enterobacter aerogenes
atgaacactcaaggtattctggcagcagaatcaggatttaacctggaacttcaaattctcaaaagtggccggggtttttatatcggcacagccaatgagatgggcccagtatcacgcgaatctgaggagtacttccgaactcaggctaaagccactaaggcgcttgaaaacggcacctggactcaacgtttttggagttaa

SEQ ID NO: 103562 - DNA, 468 bp, Enterobacter aerogenes
atgtctgcaaataattcatctgcatctaacaaacctgaatacttcaatctgaccattaagggcattgggtatctcagtaatattcgtcaggttaatcatcagaatgggtctttcctcagctgcgttattaatgctctgagtgggcccactgatagtccgacttacgttcgctttgacgtcgcagttgctggaaaagaagcgaccagtctgattggacgctgccagaaagctgtcgatgaagataaaaaagtgttggtaggtttcaacctgagcaatccttcaacggatatctttactctcaacaaaggcgatcacgcaggtgaacagcgggtcagcctcaaagctcgtctgataaaggtggactggataaaaatcggtcaggatatggtctttaaggctgaaaaatctgactcggtaccgcctcctaatggttcagcacagcgtgattacgctgaaaattctttctga

SEQ ID NO: 103563 - DNA, 2010 bp, Enterobacter aerogenes
atgcagctttatctttgtgaaaaaccgtctcaggccaaagatattgcccgtgtacttggtatcagtcagcgcgggcagggattcatcagtggaggcaacgttacggtttcatgggctataggccatctacttgaacaggctggacctgatgcatacggtgaacagtacggtaatccctggaaagcggaggttcttccgataatccccgaaagctggcagatggttgtaaaaagccagactaaggctcagttttcagtgataagtaaccttcttaaaactgcttctgaggttattatcgccaccgatgcagatcgagaaggtgaagtgattgctcgtgagctgcttgaatattgccgttataaaggaaccgtccgccgtttgtggctctcagcactggatgaaacaagcgtcagaaatgcccttgccaatattctgcccggtgagaagactgaaaaattatatgatgctggtaaggggcgaagccgtgctgactggctgataggcatgaatctgacccgtttgtatactgtgaaagcccgcgatgcagggatatcagaagtgctttccatcgggagagttcaaacacctacgcttgccattgtggttaatcgtgacaatgcgattgctaattttgtctcagtcccctggtggcaggtgaatgccgtaattgaaaaagacggtgttcgcttcagagcccaatggcaaccggcggctcaatattgtgacgaagaaaagcattgtattaatcatcaggcggcgcgggctgttattcagctctgtcagcaacagaaaagtgccagcgtgcttgagatcaatcagaaacgtgtgaaaacacccgcaccactttgctttgatctcggcacattgcaggtcgcttgctcacgtaagttcggcttaggcgcaaatgaagttctgagtattgctcagtcactctacgagacgcacaaagccacgacttatccacgtactgattgtggttttcttcccgagtctatgttgaaagagatccctgaggttctgtctgctgtcggaaaatcagatccttcagtggcttcaagtctggatatgctggataaacaatttgtctcgcgtgtctggaatgataagaaaatcacagctcaccatgcgattatccctacccgtcaggttttcgacctgtctaaactcagcgctaatgagatgaaggtttatgggttgattcgtcagcattatctggctcagtttttacctctacaggaatctgacaccactgaagcttcattcaatatcggcggccagctattccgcacccgtggaaaagtaaatgtagttactggttggatgcgattatttgaagctgaaagcaatgatgatgccgatgacgttgaaaacgaggatatgtcactgccatcactcgttaaaaacgatatttgtgttgtcagtggttctgaattgaaagacatgaaaacgaagcctcccaagcctttcactgagggaacgcttattgctgcaatgaagaatgcagcgagttttgttacagatcctaaactaaaaaaagtgcttcgtgataatgcaggactgggcactgaggcgactcgcgcaggcgctcttgaaaccctgttttctcgccactatctggagaaaaaaggaaagaatatccagtcaactcaaatggcaaaagaacttatagcagcattgccagaaacgctgacaagcccggggatgaccgctctttgggaacaggctcttgacgatattgcacagggcaaaatgtcactcaatgagtttatgcagaagcagcgtcaatggaccatgcatcttgtagataagggtaaaagtgacgttgttaacatcacagtgcccgttggccctccgtgccctatttgcaatggcctgaccaggaagagaaatggcaaaaaaggtgatttctggggatgtattaaatacccagactgcaaaggggtcattaacagcaatagtaagaagaaatcagtgtataaaaaagcatcaacttcaagaaaaacagtataa

SEQ ID NO: 103564 - DNA, 555 bp, Enterobacter aerogenes
atgaaaaaactagtgtttatgattatccccttaacggtattgagtggctgtgcaggtactgactgggcgtctattaatcagaaagtcagtgacagcgcctcaagcctgaataatacgatcaaaggggccattggttcgggaacatccggggggatgcctttaatggcaaaggcgcagcgtgggggaggaaacacaactgataagactttcaatataccggttgatgttgatacagcagctgcacgcttaaaacgacattataagtttatctcctctggggaattagaaaatctccgtaatgccaacgtcaatggtggttggacagctgcagcggttgatgactcacatccagtatgggatgcccagcccggcagttattacaaaatgggttcggactggaatgataatgatcatctggagatcgaagttgaaaagaatgggacaggtagcaggctgtatgttgtatatcgctccccgtcagataaacgcctctccggcactggcgtacaaaacctaatgaaagacatccgcgcagtggctgtaggccagcgctga

SEQ ID NO: 103565 - DNA, 756 bp, Enterobacter aerogenes
atggctgaacaaagaaacatttctaaggttaggactaatgagtcctacaaagaacaaagcgcaggggcactgcagtcttcactctctgttgagctgcattccatctatgcggtgcggttatgggaaggccggccacggtcgagctcggggagaggacaaaataaaacggttaaacacgccataatgagcatgcctcaggcgattaaaaaagcgggcgttatctattttgattcactctctgataacccatacgcagatgaggcaatgctaaaaatagaagagtccctcaacgaggcgggagaccggattcagagctatgtgagtgatcttgagaaaattattaaatcagtaccctccaccgtttcattcactgacgttatctcttcatcaccattgaacatcggagtgtttagccgatcaccgttaggataccgctgcgtctggttattggtcggatatgaccagatggcactaaaggcatttcaggctgcacattacggcctgatctctcgcaatcaacgtgatgactacttacgccatggcgctcacctgattagaaaaatttatggaattttaaggccgtacagtaccgtcgccgttacgagaagagacttgtctcaacaaacgaaggcggggaccagtgcgatagaacagctgggacacccaaatcctgatgttttatcaggtaaaaagcgttcgacattttcacctcccttgaaaactggaaaaaatcgcgaaaaggccaaaaagtcatga

SEQ ID NO: 103566 - DNA, 504 bp, Enterobacter aerogenes
atgataaaaaaaatcgtagtcattttaagtgcatcacttttgctttctggatgtggtctgaatgacccaatctataccccgacaggcaaaggctggaagaaagaagagttcctgggtcataaaatttatagcggatacatattcactgattgctcgatatacaatcgcgaaaccagactgacatactttgcaaacaacaagataatgtacatcccagctcttggtcagtttagtgtctacgacaagacatcctcatttggaacgccaatagattcgcctcaaatgaatatcactatggaaagcacaggaaactacgtgttttctggtgataaaggagcgtttcactttcaaattacaggcgacagcttagggaatttgactgagtttacagttgcgcacagaccaagtaacagatttatgatttaccaatgtggtaggaaaaacggcattgatgcaagaatagtttccgaattattcatgcagtacactgatgaaacgtcctag

SEQ ID NO: 103567 - DNA, 1242 bp, Enterobacter aerogenes
atgacattgccagctgacagccttattgctcatgcactggaaaaaatgcacaccagactagcggctaagcctcgtcatgaagacggtaaagtacgtagtggtttgctttttaccgggaatatacatgacgctatgcctcgcaggctgttactggatacacgcctctctccactggacaaaatgggctggatgatgatccgcctttatgcgcaaaccaatgaaggtgccatcttccccacttacgacgagctacagttacaactagcttctccgggacgcgggaaagcttctcgtgaaactgtcagccgtgttttactgatgctccgcataaccggctggattagcttgtgtcagcgtgttcgggataatcatggccgtgtcagaggcaatatctatgcgcagcatgatgaaccgcttacctttcgtgatgctgagttactcgacccccgctacctcgatactgtagctgaagcatgtctgagcaaaaacaagactatcagtgaaacggcaatgctagtactgaatgaaattaaattagatccgaccatgcggcactatcgcagccatatctccatgcttgaaactcgtatggggtatgcccagagtgcccgccagatggcaggccgtcaggaggttatgatagggtccgctctactgagttcggattccgaaccaggtaaaaatcaaggaaatataaaggcaaataaactgagttcggaatccgaacccagtaaaaaacaaggccagaaaacactgagttcggaatccgaactaccagtaaaatcaagtggttcagacagagttcggaaaccgaaccattacgtacgtagtttcacacaaagtgtgaataaaaaaacgtacgtagaacctgttttgccgacagcactgatgaaaatcgtcagtcaggatgagcagtccatgctgacaagtcagctcagtgctttacctgatgaacactcatcccagatcctcacagcctttgaagacatgatgtcaaaaaaacagctgagtaaccctgtgggctggatgttcacgatgctgaaaaaagccagagaaggcgctttgaagccactggcccagggtactcagaaaacacaaaattcagtgccaattccttctgttcgccctgaacaaaaacgatttgtgcctaaacctcgtgatatacaaccagcttcacaggagactgtgcttcgcctggtcagcgagctacgcaccaaactgagtaaaccgaaacacggctag

SEQ ID NO: 103568 - DNA, 252 bp, Enterobacter aerogenes
atgaagaagatgaaaaccgtcggctattccattcgcgctttaccggggactcctgagcaatgctgtaagaaggccgtacagcaagtgaagaggttccatcagggcgctcataatttcacacggattgaagacagaggctgtggctatttcaaaatcaatctggggccgttctggaggctgctgagtcgtaacgccggacgttcgtgggaccttatcagccatgagcgatataactcagctattcgcaaataa

SEQ ID NO: 103569 - DNA, 606 bp, Enterobacter aerogenes
atgaataatttttctcaggcagctaacggccttctgatgcaattggttatggatattaaatctggctacctgcgccgttgtgaatcactggggctggaaagagaagaaatgcagatgctacagagcctgtcacttgaagaacttcactatctggctaactcaggtgttgcggtaattaatgtcagcattaaccacggcaatctcagcagcatgctgatgcgagcacggatggaattgatgcggatgcaacgtatcgaccgagcgcttgcgctcggaggttccattgagctcatgcaggtgttcttcggtctgggtagtacggatgtggctgcccgacgtcgtgtcaccgggattgacgttcgtcccggcagaggcaacagcctgagtgacgatgataacgctgaaatctggcggctatggcaaaaatctgccgttgaagatgccaacagtgctgatgggcttgatgtcatgatgctcgctgcggaacagctggacgttagcctgacttcagtctggcatgcagttaagggctggcacaatggtaaggggaggcgttcttcgcaggttcagaacggtgcaaaaaactcaatcaggaggacagcatga

SEQ ID NO: 103570 - DNA, 1629 bp, Enterobacter aerogenes
atgagccggaaaaatataaacacaggtgcggccatgctccagcctggccgcaggtcggctaatcccgctgttgccattcctgtcatggatatgccaatggttttgactctcgaccagtggggacctaatcctgacaacccaagaaaatctaaaaacccacgctatgaagatattaaagagtcaatccgggcacgtggtctggacaccgttccgaaagtcactcgtgatcctgacggtggtgagaaatatattgtcagcgatggtggtaacacgcgacatcaggttttgacagagttatggcaggaaaccggcgatgaaaaattctatcgtacttatgttctggtaaaaccatggccgggtcggttgcagtgtctcataggtcacttagttgaaggggacgttaaaggtgagatctccttcatagagaaagcaatcggcgtacacaatgcacgagttattcatgagcagcaattaggaaagtcggtatcgttgcgtgatctatctgaaatgttgactcgttcgggattacctgtccattactctaccatcagcagaatggaagatgcgctgaaattcctcaacccttggatgcctgagttgttagcttcagggttaggccgtccgcaaataaacctgctgcttgcccttcgtcaggacgctcaacggatttgggatgaatatatacttctttctgaagatacaggtaaatcctttgatgaggttttcggcgaatgctgtaaaaaattcaatgaccctgaattatggtctcccgacatgttcagggacgagtttattggcgacctgctgaatgcgctcccacatcctgatctgaactacgaccgctgggtaatggagctagatcctaaagagagaaatcgccggatgatcttcggtgagaacaagtcagacaactctgaactcacagctcctgatgccagttcagtggttaataaacctttaaccgatacagcacctttagccgatgctgcatcgttggtcgcggtatccccagttgccagtgagtcccccgaggaagctgagccactgactttaagtgatgatgccgcatctcctcctgcagtcgagaaaaagacagagttacagcctgatttatacggtgggtcgcctgttatatccggggatgttgttcctgaaaatacccagtcagaggaagatttcgtggcccttctctcaccggaacttgatgaagagaaaccatcaacagatcctgcatcagtctgggctattcccccatttgaagacaacattgaacatattcaaaatcaggtctttatgatcgcctgggagatagctgagttcctggggtgtgatgatgaaattcttccggaccgcgaaaccgatctctccgctggctattgtgcctcttctgaaaactgcagcgagcctgcgttgttcctactttccctggcaggccatagctctgaccaacgaaccgcaattcgtctggatactttactcattggccatgccgcagagcaggatgtccctgttctggatgatgtaaatgcactaaaggttttgcgtttaatccgtctgatgcgtcgtttacgtgagttgcagcgaggtatttcatcagcttcagatattgaggatggtactcatgaataa

SEQ ID NO: 103571 - DNA, 1365 bp, Enterobacter aerogenes
atgaaatcagtagaagctatcccacgctcgatagaagctgaacaagcagtactcggtggtctgatgctggacaacgaccgttgggacgaagtcgttttagtcctggctccggaggatttttctattggctcgcacagagccatttatcgtgaaatggcagaactggccatcgagagttttccgctggatcttatcaccgtctccgaaagactagaaaaaaaggggctactgacgggagccggtgggtttgcatatctggcagagatgagtaaaaacacaccctcagcggcgaacataatggcttacagtgccgttgttcgtgagaaaagtcgtcttcgtaatctgatggcgattggtaacaatattgtatccgacgtgaatgctcccaatgctgacgcagcaacagttatggagtctgctgaaagcaagattttccagttagcccaacagggaatggaacaaggcacctccgaaatggggatgcaggattccctgagcgaattggtcagtaagttggaagccctcatccaacaaggagggatgcctggcacgcctatgggattcagtgaactggattcaatgacttccggcctacaagccggtgatctgatcctactggctgcgcgaccttcaatgggtaaaacctcttttgctctggccgcttgcctggcagcagccagagaaaaacccgatgaaagtgtgttcatcttcagccttgaaatgcctcgttatcagctgatgatgcgtatggtttccatggtcgggcggatcgagcttgaacatcttcgcagtgcgaagttaaacgatgaggactggggacgaatctttaacggggttcaagacctgatgcctctggataaactcattattgatgatacgagttatcagactcccgctacgctccgggctcgagcccgccgttatgtcagaaaatatggctcaccttccctcattatggtcgattacctccagctgatgacggctcccggaatggaaaatcggactcaggaaattgctgaaatatcgcgctctctgaaagcgcttggaaaagagctaggctgcccgattgtggctctttcacagcttaaccgccaggttgagcaacgtgctgataagcgaccaaataatggcgatttacgcgattcaggtgcgctggaacaggatgcagatctcattatgtttatctatcgcgacgagttctacaacgtggattcagaagatgccggcgttgctgaaatcatcatcggcaagcagcgtcaggggcctacaggtacggttaaagttcagtttgatggcaggtttacacttttttcagattttgagacaggtagtttcggacatgattacagagggggacagttatga

SEQ ID NO: 103572 - DNA, 873 bp, Enterobacter aerogenes
atgacgatagttcccgtaatctccccaaaaggcggagaaggtaaatctacttttgctgcaaacattgctggtttttcagctgatgctggtcttaaaacactactgcttgatgccgactggtcccagcctacagccagtagtatctatacgctgaccgaagaagcaccctatggtatttcagaactgctgatgcagaccgtcagcgaccccgcattgaccatttcaagatcttctatccctaatctggatgtaatctactctaacgaccctgacgaactgcttcctactgcgatgttacatgctgcagacgggcgtatacggcttaaaaacattcttcagcatcctttctttaccagttatgacctcataataattgattccaaaggtgctacgggcgtcatgacggaactctccatactggcttccagtgggaatgttctcggcgtagtcaaaccgatccttccagacgttcgcgaatttattcgtggatctcttcatatgctcactcgcctcagaacctatgaaaactacggtataacgctcccgggtatttccatactggtgaactgcttcgagaacactttacttgaccgtgaagctatggccagcctttctcatatcattagtgaaaagcagtatgatcgctctgtattaggggagcgtgagatattcaacctgctcgaaacccggattgaagcgctggaaatttttaaactcggccatgtacgagctcagccggtacaccgactggaatacaaaacgaatcgcgtaggcccagcggcagcaaccatcattcacagccttgcctgtgagcttttcccacaatggaaatcgcagtttgatgatgtgctggctcgggaggttcgtgcatga

SEQ ID NO: 103573 - DNA, 753 bp, Enterobacter aerogenes
atgcgagtagataatgaagttcttaacgtgctgagcgcggctgagtgtaatggcccgcaactcttccttaccggtcagcttgatcgcaacttatacaccagaacaaacaaggtactggaggcggctggaggaaaatggaaccgcaaagccaaagcgcacatttttgataccgatgcctcagatcgcatcgagcaaattattcttacgggcgacgtcgtagttccgaaggatgattttgagttctttcctaccccacctgacgttgtaaggcatgttattcacttagctgatatccgggatgggatgcgcgttctggaaccaagcgccggtcagggagcaattgctaatgcagttcatagcgcagcagcagatgtgatgatcgatatgtatgaattgatgccagcgaacaacgatattcttcacggtctcaatctccgactttcaggtattggtaaaccgactgacttccttactgtcaatccggatccggtttatgaccgcgtggttatgaatccacctttcggccgacaggcggacatcaagcacgtttctcatgcactgaaattccttaagccgggcggcctgctggtatcggtaatggcttcatctgtgacgtttcgcagcaacaagctgacaactgattttcgccagctcatcgaggagcgcggtggtcacatcgaagaactgcctgaaggtgcctttaaatcatctggaacgatggtgaataccgtcatcgtggtcattccaggctga

SEQ ID NO: 103574 - DNA, 240 bp, Enterobacter aerogenes
atgttcagactgattcttcccggtagctattacgtcgacactcacggcaccccctgcaagataacccgcatcacctccgaaacagtccactaccagcgaaacggtcataactgcatagccagcatgatgcgattccagacggacttcgaatgggtggacggtgcggagttaaagcagatatgggatgacctcgaaacgtcggcacatttgaagaagctgcgcgcccagcgtgcggcatga

SEQ ID NO: 103575 - DNA, 168 bp, Enterobacter aerogenes
atgataggccgttcttacgatccatctatattcccagatgatttatcagtacgtcgcagacaaagagcaatgcctccaagagatgagttgatgaagcgtaatagcttccagtcggttaacgagaataagtttctggatgctttgctgaagaagatgagggggatgtga

SEQ ID NO: 103576 - DNA, 381 bp, Enterobacter aerogenes
atggcgcattcaatcaccgttagactaaacaagccggcaagagaatttcaggccggagaaaacgtcggctttaatattcgcgcaggtgttcaatattacgatcgccagtcaaagtccagggagtggactaactatagcgctgttgtattcgctaagcctggtgcacaggctgactactaccgcagcgttcttgttgaaggtggcattgttgaagtcactggcgaaagtatcaaggtagatgtttatcagggtcagaatgggcaatccattacccttgagttactgaacgcaaagattggttttaccgcttctggtcatcctgcacctggaaacgcaaactcagcacctgcaccacaatttgacgattcgatccccttctaa

SEQ ID NO: 103577 - DNA, 516 bp, Enterobacter aerogenes
atgctgacgcatagtaggcttaccgagttgcttgattacgatgctgaaacagggatttttacacacataaagaaaagaagtggagtaaggtttggttcaatggcgggctctgccatgtctgttggatatatcttcatatcggttgatgggaaaagatattacgcacatagacttgcttacttctttatggaaaaagaatggcctgatgaagttgatcacataaatggaattaaatctgataacaggtggtgcaacttacggaatgccagcaggcagcagaactcggtaaataccggtatatattcaagcaataaatctggttgccgaggcgtttcgaaaacatcagttggaacatggagagtggaagttaaaaggaatggccaatatcactacctaggatgcttcaagacaaaggaagaggcgtcaagaattagaaatgaatttgccactagattagacggcgagtttttcaataacagcattcgtaaagatgaacttgaaggagcaatcgcttaa

SEQ ID NO: 103578 - DNA, 609 bp, Enterobacter aerogenes
atgagcagtgaattctacaagcgcctggctcatattcaggcgcatcttaacgctccaaagaatcagtataactcgttcggtaagtataaataccgtagctgcgaagacattcttgagggtgttaagccgcttctgggtggcttgttcctgtctatcagtgatgagatagtcctgattggtgatcggtattacgtgaaggctacagctaccatcacggacggcgataataagcactcagcaaccgctatggctcgtgaagaggaaagcaagaagggaatggatgccgcacaggtaactggtgctacaagctcatacgctcgcaaatattgccttaatggattgtttggcattgatgattccaaagacgctgatacagatgagcataaacatcagcaaaattctgcgccagcaaagcaatcaaagccatcccctacccctgcgcaggttctaaaggcgttcactgatgcggctgcacagaaggcgtctgtagatgagcttaaacaggctttcgccaaggcgtggaaaatgcttgagggcactgatgaacagcagaccgctaaaggggtatacgatataaggctagaggaattaagtcatgctgacgcatag

SEQ ID NO: 103579 - DNA, 162 bp, Enterobacter aerogenes
atgagtgcgatggaaagatgggatgatgacgctttcattatggcagtgagcgacgctattccagggcaggaaatgacgcatgaactagctgcgcaggaagcaattgcagattttaaaacagaacggcaagcgagtctcatgaggggtatttatgagcagtga

SEQ ID NO: 103580 - DNA, 219 bp, Enterobacter aerogenes
atgagtaaagataatggcggaccagccttccctgttcctgcaacagaatatcacggtatggatgaaggaatgacattgcgtgattacttcgcagcaaaggtaataaatggaattctttcagacccaaatgcagggttgcttgaagatgatttatcgcgttatgcgggcatcgcatacaaagcagccgatgcgatgattaaggagcgcaataaattatga

SEQ ID NO: 103581 - DNA, 375 bp, Enterobacter aerogenes
atggttgctgattaccgccagcgcatagcggaattgcgggagtggaatgccggtctggctcaggagtcattcgagcgtcagcagtgtatttctgaaattgaacctattcgcgctgcagccgagaggttggtccgttgcaaaggtcgttatcacagcgagcagaactatcgcgcactggcggcactgtttggcgtgacaactccagacctgccgcctctggatggcgagtcccgcaccgtcaccgtgaagcagttcgatgaatttcagatttgccactacggcgctacggaggactacgcgaaaggatatatcgactgtcagaacaactttttcaaatggctgactgccgatggcatcaagtgggaggctgagtga

SEQ ID NO: 103582 - DNA, 213 bp, Enterobacter aerogenes
atggctatcactgaaggattctgcgcggacctctactgcgactgtgatggttgtcagtcagggaaaatctatccgcaggggcaggctgattttattggccggaatatgaccgacatttctcagcaggcgcgcaaagctggctggcgcataagcaaagaccgccagcgctgctatgcgccggggcacaaaatttcacggggagccgaccaatga

SEQ ID NO: 103583 - DNA, 675 bp, Enterobacter aerogenes
atgaccaaatcaaccataaccagagaagaaagcattcaggccatatttgacttaaaggttggctattcgcttgggctcgctgatattgagattctcaagcgagtggcccgtatggcgctggccgcaatggactgcgagccggtggcgtggcttctatcgggcggtggcgctaaaaacgtggtgtgctttgatagtggcaatgcgtatgccgacccactgcgggaagtgacgccgctctatgccgaccctcgaccagcacctacatctgccgagccattcgcatacatcattcaggataaatacgaaagagaacgtggcgtagagggtcatctcagtcgtagccatgtatcgaaatatgttagccaggaagatataagcgagcatgagataacttgtaccccgctctatcgccacgcgcagcagccggtagtgccggggggggttcgccaggcgcttagccaaatggacgatgaaattcttgctgagcttaaagacgatgaatcccgtcaagaagggataagaaaatgcatagctgcattgggttatcaccatagacgtgctggagagtgttcacccggctacgctggctcaagccttgaggaggataccctgacggggattgacttcctcagaggagcaaaccgcgccgccatgctcaacggaggtaagtcatga

SEQ ID NO: 103584 - DNA, 270 bp, Enterobacter aerogenes
atgaaagacaagctgctgcttatcagaaaccagttgaagatggggcacaggctgtcattcgctgaagcaatgctactgcagagagctatcgacattcttgtgtatggggctggcaactctccggtaattcctgatggttacgtgatggtgccgaaggagccgacgaaggagattctcgacgagttcgactcaattatcgactatggcgcagaagactcagtagacgcctggcacagactgctcgcagccgccccgcaggaggtgaaatga

SEQ ID NO: 103585 - DNA, 252 bp, Enterobacter aerogenes
atgatgtcgagggttagtacggtaggggaaatcgtcaggtctgacatggagcattctggagcgatcagaaagcgatactggcaatcatcatctcttccgtttcgtgaaaagcgtaagcacaggccgcaaccttgccatttcagacgagataaggtgcttcaaaaaatcatgcgcagggaaatggaagccatggtaaatcgccttagtcaaatcgatgcgtcaaagattcttgaggaggttggcgatgcctaa

SEQ ID NO: 103586 - DNA, 441 bp, Enterobacter aerogenes
atgaagaaattaacctttgagatacgctctccagttcaccaacaaaacgctattcaagccatacaacaaattttccctgacccaaccaagccaatcatcgtaaccatccaggaacgtaatcgaagcatcgaccagaacagaaaactatgggcttgccttggtgatgtttcgcgccaggttgaatggcatgggcgccagcttgatgctgagagttggaagtgcattttcactgcggcgttaaagcaacaggatgttgttcctaaccttgccggaaacggattcgtggtgataggtcaatcgacaagcaagatgcgcgtaggtgagtttgctgagctactggagcttattcaggcattcggtgccgagaggaatgttaagtggtctgatgaagccaggttggctcttgaatggaaggcgcgatttggagatagagcggcatga

SEQ ID NO: 103587 - DNA, 171 bp, Enterobacter aerogenes
atgaatcgacgaagtccaacacagatagttttagatagtctcatcttcacacccaccaagcgcagtaaatccagaaagaaagccatcccaacgcaaagccaggtcaagacgtttgattacgttcacggcctgttgcagtcaaaatggaacagaatgaggaaaacccgatga

SEQ ID NO: 103588 - DNA, 174 bp, Enterobacter aerogenes
atgcttagtccagaacaaatagctcagtatcacgctgagagtaatttccgtgccggctactgcatgcaatgcaagacaaagctaactatcgctgaggtgcatgtatgcgacaggtgcgcaatagagctttatccagaccctaacggatttatgacggaggaagatgatggctaa

SEQ ID NO: 103589 - DNA, 834 bp, Enterobacter aerogenes
atgaacttggaaaatgcagtcaaatttcactttgccaagtctacgcagataaacgatgcgccacgcacaacatcctcagacgcattaaccggtactgatgtgatggcagccatggggatgacacaaagtcgcgccacgttgggttacagcgcgtttctagggaagatggaaatcagcagcaatgaccgtgagaaagctattgaactgctgaccaaatatgcacttgaacattgcgataaggttgccgccttacgtaagctcggaagtgatattaagccaaaagtaatgcaaattctcgcaacatatgcattcgctgactactcccgaagcgcggcaagctcgcgaacctgtgattgctgtaatggtgaaaagtttattgaagtagaggtattcgccaacaaggttcacactccgagaattgaaaaggagttcgtgaaaatgtctaagcgcatgggcgtagaagacatccatccatcagcatatgaagtccaccgcagcattcgcgaagtagagcgtgttttatgccataagtgtaaaggtaagggggtgcttaccaatgcatgccagtgcaatggaaaaggtgttgtggtagacaaagagaaaactattctacagggcggagttcctgcatataaaacgtgcgggcgctgcaatggtcgtggttatgctcgattgcttcctgatagtgttcgtcagtatatctgcgcaacggtgattgatgttcctgaaactacatggcgaaggtcatacaaggatttctttgaaagtctggttggtgagtgcattaagcaggaggaatatgcaaaccagatgctaagcaaagtcactaagtga

SEQ ID NO: 103590 - DNA, 144 bp, Enterobacter aerogenes
atgggcggagttctctcccttaatgactgggctcttatcgtaggtattctttgtactgtcggcacattcggcatcaattggtactacaagcgcaaagagcgcgaggacagattgaatggcaatgtcaccggcgctcagaaatag

SEQ ID NO: 103591 - DNA, 495 bp, Enterobacter aerogenes
atggcaatgtcaccggcgctcagaaatagcattgttgcagccctcggtaccggtgctattggtatcgcgaccgtcatggtttctggcaagtcaggcctggaaggtagagagcattacccatacaaagatattgttggcattgtcaccgtttgtgatgggcatacaggaagcgatattgtctggggtaaatattactcagacaaagaatgtgatgcgttgacgcgtaaagatatgacgcgaattgctgcgcaagttgatccgcatatcaaagtgccgaccactgaaacacagcgagctgcaatatatagcttcgcttacaacgtcggctccacagcaaccatcaactcaaccctgttgaagaaactcaactctaaagattactccgggtcatgctcagagcttaagagatgggtatatgcaggtggaaagaaatggaaaggcctgatgaaccgacgcgacgttgagtacgaggtttgcacctggagccataaatga

SEQ ID NO: 103592 - DNA, 471 bp, Enterobacter aerogenes
atgggaagcttctttactgcagtagacgatccgaaaaatcagcgtgtgcttctgtaccgagccgatgaagctgtaggcgatgcaatttatctcgacactgacccaactggaacggcaatcccttttcctgatgtattgagcaaagtcgatatgggctcagcaacgaacaaagccggtttcattctgccgtacaaagatggagttaagttggcatttgcaactgaccttccagcgacaaagtccatcacccaaggaactccggaaaacgtctctgttgttgttgaaggtggcaacacgccttacacctacgcatggactaagaatgggcagccactttctgtggttgaagcaacaattcacttcactgctgatgctgcagatgctggtacctacgtggtaacggtaactgacggcctcggcctggtaatcgtgtctacgtcgatggttctcactgtcacgccggcaccgtaa

SEQ ID NO: 103593 - DNA, 1062 bp, Enterobacter aerogenes
atggcagcaccaaagggcaaccgattctgggaggcccgcagtagtcatgggcgcaatcctaaattcgaatcgcctgatgcgctgtgggctgcttgttgcgaatacttcgagtgggttgaagagcatccgccaaccgaaatgggctctctggtcgttcatgatgctcgctctattggtccatcaactggactgactggctgggatttcctggcatctgctgaagaactgatgttcgctcgcgagctaaaccgcgacatgggtatcagctacttcctcaacccgtcagactaccgtaaggctggtcgtgatctgactgccggcgacatctttggtcgcgttcctgaagatgcgtatcacaacggtaccatccagcgtcaggttgcaggattcgacgatgtaatgcgttcgccaaaactgccaactgtcgttggttccactgttaccggcgtcaccgttactggcgctcagaagtttaagcctcaggctttcactactgacaccgacggcaataacgaaaacgttgataaccgcgtggcaacagttgttgtttcctcaactaccggtctgaagcgtggagacaaaatcagctttgctggcgtgaaatacctttctcagatggctaagaacgtgcttaccgatgacgctactttctccatcactcgcgtcatcgacggtactcacatcgagatcactcccaagccggtagcgcttgatgacacctcgctgactgctgaagagaaggcatatgctaacgtcaacacttcgctggctgcatctgccccggtaacgctgcttaacgtagcaactactaccgcgaacatcggttgggctgacgattccattcgtctgctttctcagccaattccggtaacgcatgaactgtttgctggtatgaaaacccagacattcagcattccaggcgtaggcattaacggtatcttcgcaacacagggtgatatcaacactctgactggcctgtgccgtatcgctgtgtggtattcggcttgcgccgttcgccctgaggcgattgtcgttggcctgcccaatcagactgcgccgtaa

SEQ ID NO: 103594 - DNA, 237 bp, Enterobacter aerogenes
atgacacagatggtttttcgccatggcggtaccaaaaaatggaaaggcgttggctacgacttcgaaattatttcagaggacgacctgcaggaatatctcgatgctggctggtttgcacatcccgatgacctattaaatgaccatgtagagccagagccagagccagagccagaagagaaaccacggaagaagacaggtcgcaaacctaaggcggcaacagatgaatctaacgactaa

SEQ ID NO: 103595 - DNA, 501 bp, Enterobacter aerogenes
atgaatctaacgactaaaggcgatctcgttctcgctgccttacgcaaacttggagttgcttccaatgccactctaacagatgtcgaaccgcagtcgatggaagacggggttaacgaccttgagatgatgatggctgagtggcttggcggagatgattctccgggaataagcgttggttacatttttgctgatgcagaagttgctcctgaccctggcgatgaacacggactgtcaaataacgcactcaatgcagtagtcaccaaccttgcatgccgtatcgcaccagattatgcgatggaagcatcgggaaaactcatcaccacagctcgatacggcaaagagcaacttgttaagctaacggcaatgtcgcgtgctcgggatgctaaatgtaagtccggttatccaaaccgtatgccaattggcagcgggaaccgactagccacatacaacggatggaactatttccaccgtaaaggaccatgcaataacgggagcgaataa

SEQ ID NO: 103596 - DNA, 285 bp, Enterobacter aerogenes
atggttaaatatattttattaggcggattccttttggctctttccggatgcaccacagcagataagacgtttggtcctgacggaaaggaagcttatcaactaacctgttctggaatagctcaggattgggggaattgccaggttaaggcaggtgagttatgcggctcgcgtggatataacattgtaagtgtcaacggtgagcagggtgctgcattcactgcaaacccgcaaatggcatttggcagctctaccatttacagaaacatgcttatttcctgcaagtaa

SEQ ID NO: 103597 - DNA, 1908 bp, Enterobacter aerogenes
atgacagataccaattttctggtctctatgccttcagcaccattttcatcgccaagagcattcaaagcggtatccaatgggaaaatatatataggtcttcctgatacagaccctgtaaatccagttaaccaggtaccggtatatgttgttaatgaagatggctcagaggttcaggtagcccagccaataattattaatgcaggtggattccctgtatacaacgggcagattgttaagttcgtcgtcaagcagccatatagcatggccgtctatgacatgtacgctgcacagcaatactattggcctgacctaacgctggtagaccctgccaatctaatagcaatgcttgcagccacaacaggcgccagcatgataggcggacttagctttatctcacctgagatgtatggggcgaaaggtgatggcgttaccgatgatactgcctctatccaggcggcgattgaagcagccaaggcaaataagacattccgtgtatcaggaatgggaaagtacagaatcttttcaccgattaaattggataatttaggagaaggattccgcttagacctgcaagaagtcatcgccgatccgtctttccccgccacatctgactggaaaacaacgaatggcatgtttgagtacggcggaggaagtaacggctcaatggttggcgttgaaaccagaattggattcgctagcggaaacaacgtggccactctgttcaagttgaaaggctatggagctggaggaagttatttcttttccggtagagtccaggattgtgtaggtgttttcgactgcaccaactcaactcaggcaaactcaaactctaaccttgttgagggattatactggcttcgaggcacatatggcatccgccttcgccgtaacggttcgtttgtggtagagggaaccaaaatacgcgttggatttatgaccggccttaaatatggcggcatccagatgttcaatggtgctcagtatttcagcattaactcaactggcattgatttttgtggacgcaacctcactcagttaacagtaaacgcacttcctcctgtaactgttcgcgaaactatgctcacaaacaatgccacgggaaatagtttcgaagttctcgacgtttatcagcagttttcaggagtatacagcatcctcgttattgagccgtcaagctcagaaggaggtagcaccaactttgcgaccggtcagactgtaacagttggaggagcttcctacacaattagcgcggtaaccacgtcggtcaccggtcaagcatattttgactttatccatggattccagggagcggcatttagtcgaggatatgctcagtttgactatctgtctcgcgcagttggcggaaactttaacggaacaacactctatttttacaacagcttccaggaagtaacaaactctgtaaataacatatggctgcgtcaacagggaacatctgtaaagatggtcgacagatggtcagggaaaagcttactagattttgatactggtggtaacggcactctcacacttcccggtggtttatccacaaatggaacggtatcacttggcgggtcaatgtacgtcgggtctcaacgtgtatttggcacagaggtaaacacgacattaactcagaacgtagcgaaaaccgtcatgacgatggcatggaaaggagacggaaccgtaaccactaccaaggagatgtataggctgactgttgctggaccaaatggaattactggagtaggcggacagtgcatgattgctgtcgatccaaatggtgcagttgtaattggcgccagtggggtgggcggcataacaatcacaacggttggttttgcagttcaggctaccgagacaacacaggccacaatgaacgccactttcatgtttgagagaaaactctaa

SEQ ID NO: 103598 - DNA, 366 bp, Enterobacter aerogenes
atgaacaatcactcagaatccggtaccaagccggagaatcccgccatccagcagtggggactgaagcgcgatataacaccgtgttttggcgcacgtctggttcaggagggcaaccgtctgcattatctggctgaccgtgcaggattcagcggggcgttcaccgacgatgttgcaatgcgcctcgatcaggcatttccgcttatgatgaaacaacttgagctgatgctgaccagcggcgagcttaacccccgccatgcacattgcgtcacgctgtaccacaacggcctcacatgcgaagccgatacactcggctcctgtggctatgtctacattgctatctatcctgagcagactgagccgcagtaa

SEQ ID NO: 103599 - DNA, 222 bp, Enterobacter aerogenes
atgcctgaactaccagagggaccgttttcgcgccagcaggcagaggcggttgcggctcaatattccaacattgctatagaggacgaccagggtacgcatttccgtctggttatccgtcatgagcgttgcatggtctggcgagcctggaactttgagcgggatgccggttactggctgaaccggtatatcactcgttatggcatccgcaaatttcctgcataa

SEQ ID NO: 103600 - DNA, 876 bp, Enterobacter aerogenes
atgcaaaaatctgacagccatcaggcctttgagcaaccgctggctttactgccatacacgcttcgcaacctcatccttgaacgtcttcgtagcctgacgcagtacgaacctgtgatagggattatgggcaaaacaggggctggtaagtcgtcactctgtaatgctctctttcagggagaggtaacacctgtcagtaatgttgactcttgcacccgtgatgttctgcgctttcggctccgcaatggcgatcacagcctaatgattattgatttgccaggggtgggtgaaagcgatcaaagagataaagaatacgccgccctctatcgtcacatccttcccgaagtggatttggtactctgggttatcaaagccgatgatcgcgctctgtcggtggatgagcatttttatcgaaagattatattggcctaccagcatagggtcatatttgtagtgaatcaggccgacaaggccgaaccctgccatcagtggaataccaccagcaataccccctctcatagccagcagtcgacaattgaggccaagcggagcgctgtacaacagatcttcctgccgcaccatccagtctgtgttgtatcggcccgaactggttgggggctggatgcgatggtagagacgatgatgcgcagcctgcctgaccgggccgcgagcccactgacaacacaactgcatggaaggctctgcaccgagccggtaaaaaagcaggcacgcgagcgctttggtcatgccgtggatgaaatgattggcaatgtggagtcatcatcttttctgccagcgcctgtaagggctgtgattcgaaccgttcgggaagccgtggtgtccgttgcccgtgccgtctgggattggattttcttctga

SEQ ID NO: 103601 - DNA, 4059 bp, Enterobacter aerogenes; identical to SEQ ID NO: 82755

SEQ ID NO: 103602 - DNA, 408 bp, Enterobacter aerogenes; identical to SEQ ID NO: 82756

SEQ ID NO: 103603 - DNA, 972 bp, Enterobacter aerogenes; identical to SEQ ID NO: 82757

SEQ ID NO: 103604 - DNA, 1737 bp, Enterobacter aerogenes; identical to SEQ ID NO: 82758

SEQ ID NO: 103605 - DNA, 1419 bp, Enterobacter aerogenes; identical to SEQ ID NO: 82759

SEQ ID NO: 103606 - DNA, 1065 bp, Enterobacter aerogenes
ttgctaaacaaaaaagtactttctcagatacagaatgtggctggtagcggcaatatgtctcccgcagagatggctgagttgttagatacgcattctgaagacatagagcatttggttgcgttgaaaatgttcgagtatttggatgaggctaaaggggaggtattaaaggaccattacgaaaatttagatgcatttagaggaagactatttacaacatgggagtcccctttaaagcggctggatgcattaatttatggctgtactgaaatcagtaatgaggtaaacagtgagtatcgcaccggttctggagaaaggtccgcaaaactgaacataaccacccgactgcacgcacgtgctgtccaggtttcctgcgagatatctcatcttctaaagggtggctttgcagacggtgcaatggcccgttggagaacgctccatgaaaccacggccatattgatatttattgcagaaggcgacgaagacctggcgaaaagattcacggattttcagagcatacagaggcgaaaagctgctaatcgctataataaatatagtgaagagttgggttttacttctttctccccagaagatttaagtcgggttgatctcgaaagaaatgacatcgttggtaagtatgaagcgggtttcggcaatgaattaggttgggccgcaaaagctttaggaaaagaacccagtgccagaactaaggttcgctttagtgatattgaggaatttgtcgagctggactttttgcgaccgcactacggctttgccaaccagtatattcatgcaggaattgacagcattggcttcaagctcggcacatcgctttcaaataaagatctcttgctatgcggaccatctaatgaagggctgttagagccgattcagtgcaccagcttgtccttaatacaggccactcaggcgataatctcagtttcaccaaacgatcaacgtttgctatatagctccgtgctctggttgtggcatgagaagttgaaagaagaagttgttgccgcatctgatgccctaatgaagaaaggcgaagctgataattttgaataa

SEQ ID NO: 103607 - DNA, 627 bp, Enterobacter aerogenes
atgaaaacttatataggctcacatggggatcacgttctggagtatcaggtcaagattattagattgcttagttgcttgactgaccgttaccccagactaacagcggtacgtgtggatatccattatcccaagatagtcgataacggtgacaatatctgctgcttccctaacctggaaccaggggtgatatcccggatacgtgaatccctcaaggctaagctggaggctgatcgtattcgtaagaagcgggaaggcaagcgcatttatcgttgccctttatttattatgtgggctaaagagtattccgaatcgggtaaatgccattaccacatttgtctgctgttcaacaaagacgcttactaccacctcggaaattacaatcaggacgataatctgagagggatgatcaccggagcctggtatagcgctctgggactgaaacaggatgatcacctaggtctggtccattttcctgataactgtaagtacgcgctggacacaaatagtgctgacttccagcaaaactaccaggcgctgttaacccgactggactacctcaccaaagtcgaaagcaaagtttttggtgagggggaccgtaacttcggctgcagccaaatcgatctgtaa

SEQ ID NO: 103608 - DNA, 573 bp, Enterobacter aerogenes
atgcgttcttttttatactgcaccatatgccctggcgagcagcaagagtttgtggcagagcatcacacttttatagagatatgcaaggcctttcatattccacacgaacaagttgtgattgagcaggtagacactgaggaggcagttacaaaacaacgtctgcttaggcaattaattaactatgaaatgaaccgacaggacacgcttgtcattcttgatttaagttgccttgggagaacagtggcagacttacaggaaactttatttttttgccttcaaaaagacattttcatctatagctaccatcctgattcaaggatagagccatctgctgaaagttgcgtgtcctttttgattgctcgtcaaaatacgattgacatacataatctgaaatcaaccaaaagcagatatcggcatgttaaaaaaccattagggagaaaggagggaagtaaatacagaaatgatatcacaaagcttaaatcagccggatacagtcaggcagagacagctaagaaattgggtatcagcttatctactgttaaacggcactggaataacggaattatcggttag

SEQ ID NO: 103609 - DNA, 678 bp, Enterobacter aerogenes; identical to SEQ ID NO: 82754

SEQ ID NO: 103610 - DNA, 216 bp, Enterobacter aerogenes; identical to SEQ ID NO: 82753

SEQ ID NO: 103611 - DNA, 762 bp, Enterobacter aerogenes
atgctggatgtttttcactcagagtttgaagagaaaagaaacacattagagacctatcttgaacgctcgggctttctttacagacattctatcatcaagaatctgtcacttctggatggtaccaatgaaagccaagagtttgagttgctgctggcgaaaaaatacaatcgtgatgatatacaatgctgggaatctcttcgcgctaagtggactgccgttcctattatgttgggttcgcaaagccttaaacattttttcacattgaattttaaggccgcgggtatattccaacgctatggagaggatatgtggaatatcaacgagataattgcagttaagtctttcctgttggctagttcaatcttggggagatgccttgggattgcaagctatggcccgttgctaccttcggagcttgcatcagaaaaggataagatggctaagaaaaaacagtcagcaagaaagggcggaatatctaaagcagaatcatatctcccgataaaagaagagacgataagattactccatcaaaatgttcccatggatggtaggtggaaaaataaaacagttgcagtaaaggcaatagagtctgctttagtcctctttatacagaacttaaaatctcaggacaaaagtctggatcttaatgaagaaaatataatcacagtggtcaagcgctgggaacgcagtgatgaaagagttaaggctgcatttgaggatacggtgaaacagaaggcaccaaggaaggccgattcggcttaa

SEQ ID NO: 103612 - DNA, 891 bp, Enterobacter aerogenes
atgatacgtgaatatgcagtggatcctgatgccgtctatagaaatctagatagtttacagcgtttttttgcagattttcgtgctgaaaatgggcgagttattgtaggcattcctagaaattggataagagagcaacaaaataagatacgaggactcgggcttagcgatatagcacggagaaaatgctttgatgatatagaaaaattagctaaaacatcagtaataggtggcatcaccatacctacgaatattgagccctggattttgcaagctagatatgcgatgaataaatataatatcaatgcaattatcagcacaaacaacaatatagctgaaaaagaatatgattatcttaatttattagagaaccaacctgataattggataattgatcaaacacaaagcgtgcaaagaaatgcacaatctatatctcagtctattgccacatccttatctatagctagtatagctctttatgtagacccttattttcatccatcagatgagaggtatcgcgccccacttcttgctatgataaatttactaagaaatggtcgaaacccttgttctaaattgtatatacatacaacaactcaagatgataaaaatagatctgctattgaatcaggacttgaaacccatgtaaaacctctcttacaaaatggcttctgtattgaattatggatttggccttctcaacaacttcatgatagattcatacttactaaaaatgtcggatactcctttggccatggtcttgatgaaaatatttatagagatgctattcatgtaaatatcaatagaatttcagaatcagctagatctgaagaatatagaaaatactcaaccgaagcatgtagaattggaaaccctattgtaattacaggataa

SEQ ID NO: 103613 - DNA, 1449 bp, Enterobacter aerogenes
atgaaaataacatctctaacaattaatggtttcaaaggaatttcacatcgaactgagattcctttagctccaataacccttttttttggtgctaacagcactgggaaaagtactattttacacgcactattataccttcacgaaatcatagttaatcgtaactttaatccgcattattgtagtattactggcgaggatctttggcttggtgggttccagaatctggttaatggaaaaaacctcgaaaaaacaataacattaggtgcaactcttgattttagagataataaagatgatatatgggataactatctctcagatacagaagtctggttgcttgaagacaatttgcagtattggccggacactaccgtagacacagtttctattgaaattgagcttgcttgggatgaatttcaaaaaagagtattcgtgagtcgctttgaatgttcaagtgaggataaaacatatcttaaatttgaaacacaagcaggaaaaccctcagtagcaattagtcaatttaatcctttatcgaactggaaccttgatgggccattcgaaactaataatatcttctcctctggcaactgggagacaatatatataaaagggaatgatgcgctaccatcaataacagagagaattgatttatcttcagtacctattgagtggaatgatcttttacctgattatcccttagttgtgcgtttatttttcgaagcggctctttcacaagctgcacttgcccctctgaaaatcttagcaaacaagctaacaaatatacttcacattgggccacttagaatcgtccccacaagaaattcacttttttataataatcctgaaccatcaaattggtataatggctcggcgggatgggatacttttgctttcggttccaataatcttaagaacaaagtaaataacatattcaaaaataatgattttttagattcaggttatgaatttaatgtagacattttaggtgaaaaccctttacagcaaagaaggattcttcttactgaattaagctcaaacacaatacttcatcccactaacgtaggtgtaggtgtgtcgcaattatttccattcatcacagctacatgtttagataaaaattacattctttcgtgcgaacagcccgagctacatatccatccaaaatggcagcttagtttagctgatataatgataactgcttgcaatgataatgatgatcgaatgttcttgattgaaacacacagtgaacacttgatgttaagacttttaaaaagagtaacagaagattattcttctgaaagtaataatctatatagtaagataagtattattaatatttacaagcataatgaagaactttattaccagaaacaactcgtcacaaaagacggagagtttgaactagattggccgcaaggtttctttgaagaacgctacggtgagaattaa

SEQ ID NO: 103614 - DNA, 1194 bp, Enterobacter aerogenes
atgagttttccgatgtcaatgataggtgatgtatgtgaaattattagaggagtaacctttggcagggctgaaggtgaaagcgagtatttcagcggaggtattcctataatacgagctgggagcatacaaaaacaacttgaattagacagagacctgatatgggtttctaatcaaaaagttagagacattcagaaaataagaaagaatgatatattaatgtgcatgtcttccggtagtagtgagttagtaggtaaaacagctatatccgaattagactgggacggaagttttggtgctttttgcgcattgcttcgtccaataactagccgatgtgtgccaaaatacctttattatgttttgaactcttctgtatttagagaatggactttaaattcatcaggttcaaatataaaaaatattagagtatccgaattaagtgactttttgattcctttaccatcacttgaagtacagactcgaattgctaatattcttgaaaaaatagatgaagttcggaataaacgtattagaactataaaaatggttgatgattttcttcaatcagtgtttatagaacaattcggtgatccaagtaccaataaaaaaaactttcctattggtacaattcgagatttagttgatgcggttaattatggaacttcagccaaagcatctggaaagaagggtgatttccctatcttaagaatgggaaacattacttatcaaggtggatgggatttttctgatttaaaatatattgaattaactaaagcagaggaagaaaaatatttagtctacaaaggagacttgttatttaacagaacaaatagtaaggaattggtaggtaaaacagctgtttatgataacaacaaaccaatggcttttgctgggtatttaattcggttgcgaacaaattctttagggaataactattttatttccggctatcttaattctagccacggtaaaaaaacattaacaaacatgtgcaaaagcattgtgggaatggcaaatattaatgctcaggaattgcaagatattaaaataatgatccctcctatagggcttcagaataactacgaaaaaatagtaaaagcagctagaaaaaaaatagctaagctccaaaaaagtgaaagatatttagatgcaatttttaaatctctttctcaaaaagcgttttcagggcagctttaa

SEQ ID NO: 103615 - DNA, 1623 bp, Enterobacter aerogenes
atgatcacaagagaactaaaaagtagcattgataacttatgggaagatttttgggttggcggtatcactaatcccctgaccgtgatcgaacaaatcacctatctgatgtactctcggatgctcgacagccttgagctgagggacgaaaagcgtaaacaactgacaaaaatcgatttcaaaccacgctttgcccctgaacaacaagagtttcgtttcagccagtacagcaatttaggtgccgatgaaatgatggaagtggtacgtgacggcgtattccagcattttcggacactaggcaacagtgattcactgttaggcaactttatgaaagatgcccgcctggagatagttaaaccgtcactattgaccaaagcagttgaaatgatcaagaacttgccattggatcgaggagataccaagggtgatttgtatgaatacctgcttagcaaactcacaaccgcaggtattaacggccagttccgtacaccccgccacatcatccgcgccgtcgtagagatgatggagcctaatcctgctcgcaatgaaactgtctgtgatcctgcttgtggtactggtggttttctggcaaccagctatgaatatctgctcgagaaatatagctccttggggtcaattcatagtgatttaggtgtcaatgaacgtggtgagctggaagagcagaaaatatttaccggcgatcttttaacagcatatcgtgtccatgttgatcagaatatgttccacggatatgactttgacactacaatgctgcgcatcgcagcaatgaatctgattatgcatggtgtagaaaagccggatattcattatcaggacactatgagccgaagctttagtgataatttcccacaggggagtaaaaatgccttcaacttaattttggcaaacccaccgtttacgggctcactggatgaagaggatatcgatccttcattattatcaattgttaaaacaaagaaaacagagctactcttcatagcacgtattattcagatgttaaaagttggcgggcgtagtgccattattgttccgcaaggtgttctttttggtgcaagtaaagctcaccaatcactgcgtgaattacttgtagaagacaaccaacttgaagcggtaattaatcttccttccggtgtgtttagaccctatgcaggtgtagcaactgctataattatttttaccaagggtggtatgactgatcatgtatggttctatgatctgaaaaatgatggatatagtctcgacgacaaaagaagccccataaaaagcaatgaattaccacatttagttgcaagctggaagcattatcgaacgcttaaaggtttacctgtagacaattttataggtgaaaaattaaagacattcttaacaaaagaaacggttgatgaaatcaatggtaaaacaaattaccacgaccggactaccaatgcatttatcgtggcaaaaaatgaaatcgcttcaaataaatatgacctttcgataaatcgttataaagaaattatctatgacctcgaagagctcgaacatcctaagatccttatcagaagacttaaagaactcgaaaatgaaataatttcagacttatctgagctggagaatatgctatga

SEQ ID NO: 103616 - DNA, 3429 bp, Enterobacter aerogenes
atggggcagtcacgcaattttgaaatgttacgcagtaaatggcctgatttagcaagccttgcgaccgcagcagaacagtacgtccattccgatccagaaagttgcttagttaagctacgtaactatgacgagcaaattgttcgctggatctaccgacaggaacacctacctgaagggttcaaagctagcttgtatgatctgatgaatgcttctgtatttaccagcatcatgcctgaagcaattgtgatgaaaatggatgctctgcgcattcatggcaatcgtgcagctcatggaagcaccattaaagctcaggatgcatactggttgttaaaagaagcatttctattagggctatggctttacgttcgttacgctcaggggaatgttgatgactgccaaccttttgctttacctccattgtctgatgccctaaatacttcagttaatcttacggaacagcaaaaacgtttagatacagctatcaaagatcttgatagtgctcgtgaacgggaaattgcacttcagcgcgcattgcaaaaagagcaggaaaaaacagaaatacttgaacaacgcctgcatgaagtaaaagagcgtaaccagcaagttgctgacattctatcattagatgaagctgagactcgccgccatctgattgactcacgcctcattgctgcaggctgggatgtagctaccgacgtagccaatactgaacaggtgtctcaggagcatcctgttaaggaacaaccaacgacatcaggtaacggatttgcagattatgtactatgggatgatagccacaaaccgattgccgtaattgaagcaaaaaaaactaaagtcagtccagataaaggccggacacaagccagactatatgctgattggctggagaaggaatacggccaacgacctgttattttttataccaatggttacgatatttatctgtgggatgaccatgaaacccagggctacccgccacgtaaagtattcggtttctacagtaaagaaagcctgcaatatctgattcaacaacgcgagactcgcttaccattgaatgaagttcctcacgccagagacagcaaaggtgagcttatcgctggccgcttgtaccagcaagagaccctggcgagggtaagtgaacgttttactcaaaaatatcgtcagtctctcattgtacaagctaccggcacgggaaaaactcgagttgctatcgctttaagcaaactaatgattgatgcccgctgggtgaagcgtgtgttattcctttgcgaccgtagagaactacgtaagcaggcagggaacgcgtttaaacaatacatcagtgaccctatgtatgtagttggcgtatcaccaaagaaagatatgcttaatgcccgtatctatattgcgacctatccagggatgatgaacatcatggatcgctttgatgttggttatttcgatctcattattgctgatgaatcacaccgttccatctataacgtatacggtgatttgttcaaatactttgatgctttacaggtaggtctgacagctacccctattgatatggtcagcaaaaccactttcgggctgtttggctgtgaaggacgcattcctacggcgaactatagcctggaagatgcaatcgcagacagcaatctggtgccctatgaagttgtcactcacactacacagtttttacgtgagggaatcaggtgggataacttaagcaatgcacagatacgtgaactagaagaacagaatattgatcccaatacactggagtttgatagcaaagccatcgatgatcggatctataaccgagacactaaccggttaattatacgtaatctgatggaaaatggccttaaagataaagacggccagcttcccggcaaatcgattatattcgctagagggcacgaccatgccatcttgttgagagatctatttgatgaaatgtatccgcagtttgcgggccgcttttgtcaggttattgataatcaggaaaccaggtcagagcagctaatcgaagattttaaggggttggatgaaagcaccaataaagaacttatcatcgctatttctgttgatatgttggataccggcatcgatgtaccagaaatcgtcaacttggtttttgcaaaacccgttaaatcgaaagtgaagttctggcaaatgataggccgtggaacgcgtttagctaaaggtctgtatggcgttgatgagaatggaaaatccttggataaagagaaattccgcatctttgatcactggggtaacttcgagtatcacgaactaaatacagaggaagctgaggttacagccagcaagcccttagcacagaaacgtttcgaggcatggattgagctaggtcgggcagcattacgaaagtttgataaacaagcagttaatcgagtagccgcacagctattggtacaaattaatgctcttgatgaaaattccatagccgtgcaggaaagatggcagcaaaaagcacaatgtagcgatgaaaggcttctgcaacaatttgccccacagacccaacaggtattactcgattttattgcgccactaatgcaatgggtagatgtacgcggccaaagtgacgccatgcgtttcgatatggatatgctagctgcacaaactgcacgctacaccaacgtagaagagctggatgggctatggcctgccgtagttgaaaaactagaacgactcccccctcatttggtgcaggtacagcaacagggagagcgcattaataatttgcgagaactttcttggtggaaacaagctagttttgatgatttcgaagacatgcgcgttcatctgcgtggcatcatgcatctgatggaaaaagaagtcaaaccgccatttggaacgcttacggtagatataactgaggatgtaactcagatagaaacctccataaggaaaacacaagtccgaactgtagatttcagactttggcgtcaacaggttcaaggagctctagaaccattattccagcaaaatcccgtgctcaagaaaattcgccatggtgaaccagtgacacctgaagagctagatgaattggcaaaacttgtgctgattcaaaaccccaacgtcgatattcgcgatctgaaaagcttctttcctcaagcaactgccagtctggataagctgttgcgaacgattatcggtatggatgggcaagctgttaccgaacgcttcgctatgtttgcttctgaaaatcaccttaacagccagcagattcgtttcctggagatgctcaaaaaccatatccgtgattacggtactatagagatgaaacagctcttcgaacagccatttacccagatacatggtgagggtgtcaccggaatcttcccggatatgcagcagatcgtaacattgcaaaaaatcgtagaagagttgggtgtagtcattccgtcaccggcgctataa

SEQ ID NO: 103617 - DNA, 228 bp, Enterobacter aerogenes
atgcaatttatggtgagtccggaaagcctgacagtctcacagaccgggcatgtgtatgccggctatggcggtaacgccgattttaccctggataatgccgcggcgcgcgtggcctctgttgctggcgcttctctcggcagtctggccacgtttccggcgttcgatgcgatgcggcaggcactgccgatggtgcaggccatgctgctgatgatacccaggttgacataa

SEQ ID NO: 103618 - DNA, 369 bp, Enterobacter aerogenes
atgtctttcatctcttctgcggttttagccgaacaccttcttaccaaacttcagcagtctgctgacgcagctgcacggagattaaaatatttcatatatctgtttcgcgacagcggctggtatgtcaacggctcgggcaattatgccgtccgggcgcatatgaccgttatcaaagacgaaggctttaaagtcttcctaatcgtacgtacaggcagtcaccacgccgagtatgcttatcaccgtttgccagtttcctttcaggagggaataacaggtcgtcgcaaagcataccgccatgcctgtcgccaggcacagcatctggcacacctgcgctaccgttttcttcctggaagtttttttcatggctga

SEQ ID NO: 103619 - DNA, 366 bp, Enterobacter aerogenes
atgtacgctgacgtttacacactcaaaacacctctggatacattcagctggctttgcctgcttgagagcgaacttctgagcatcagggcatttcagcgtctcgaccttcatacggaccgggatgaaccgaatgaactgacgtatctggaagatgccattattaacgccggcacagcctatggctggtttgtctgttttctcagggacggtgacattccaccgctgcctgccactgccagagaacttctctgcacccttgacggtctcggtaaagaaattaaccggcctttctgggagcaggctgtgacccgcgggcaggatgaggcctgtggtgacaaagttatcacggccctcgaaatgatgtaa

SEQ ID NO: 103620 - DNA, 648 bp, Enterobacter aerogenes
atgaaaaacctgtcttcttcgccggctttcatgtcggttgtctacaccatcgagcatgtcagcacggttccgttgcatcactggcatgctttcgtactggccgtaacagacactttctggcaactgccggtgcgactgcgtccggggaatacgtatctgccgtcgcttaatcgcgcggctgatctgtttccggttgctgatgtcatggcgttttgtggcgacacaggcggcagtgcctggccggtcaacatgaccattgagcgggagcgcaacaacaatacgttgcgtatccaggagctggattttcagcatcagccctgcgatttctttgcgcgtattgtgatggtcctgctgcacaacctgtgtccgggcagctttcggatacattcttctgaagaaggccgcagctgggcgttaccgttaagctggattgagcgacatctcggcctgcctgagcagccgacgctgacctcgcctcagccggtactgaaaacgccggtgcgtggaggcgcatttgactccctgctgctgcagctgctctccggtggtgagcgggtactgagcaacgacgactggaatgcgtttacggaggctgaatttcagctgtatgaactgaagcgggtcgcggaaaaaactgacgcgctgtaa

SEQ ID NO: 103621 - DNA, 603 bp, Enterobacter aerogenes
atgctttttttcgacaataaagacctgacgaacgtcctgatgaccgcccgcatgcagggaggtcagcttcacctggcaaaggatgaaggtgtttatcttatgccggctaccggagcctggcagggcaacgatccggtgccgcgtattgcgtatgccgcagggtgtcaccctcagaaaaatgaggactggtacgacacggcgcgccggcttgccggcggcgatgatttcattgaatcactgtcgataagcgacgcggtagccacctctgtactgtccggcaggaaggacctgaggatcctgattaccgacacacagatacaggtgctcaccgcagcgactgaccgggtgaacgtcgcggagtaccgccagaaggccgatcagcttttgacgagtgcggtctgtcacttcagtgcctgtgtcgggcctgatgaactctgccgctggcgtgaaaatgccgtgcgtctgctgacgcaggcggccttcatcagctgtaagcgggcgaatcctgaggatcatcaaaactttctgaacgcctgtggcaggctacaggccaggttatcgctggtgaccccgcagggggcgctgcgaataaccggacgttaa

SEQ ID NO: 103622 - DNA, 348 bp, Enterobacter aerogenes
atgggactggatatttttctctacagccagcacaggcagatcgtcgcagtaccggcaccgtatcatccggtgtgtgaactgagccgcgatttttcactgattacctgggtggataagcatgtcggtgaggtggaaaacgcgacctgtctggaactgtcacgcgagcatattcagcaactgaaagagaggctggactgtgcgattgcgacatttacagagggtaatgaggataatccgcttcttcagcgccggctgcagtatgttttcaccctgcgtgacaggctggaaagcctgctcagtagttttgactttgaacatgaatacctgtggttttatgccgcatggtaa

SEQ ID NO: 103623 - DNA, 987 bp, Enterobacter aerogenes
atgaaaaaaacaacttcacgtaaggcggcccgccgcccggcaaaacagactgacctctatcgccagataaccgatcgcatcgttgtcgcgctggaaaacggcgtcgcgccctggcgtaagccgtggcgcgcagctgccggtagtggtctggccggtctgcccctgaacgccacaaccggacgccactacagcggcgtgaatgtcctgcttctctggatgtcagcggaagagcagggttttcgcaataaccgctggctgacttaccggcaggcgcagcaggccggcgggcaggtgcgtaagggtgagaaagccaccctggcggtggtttataaggactggacgaagcaggcggaggaccgtgagggcaaccgcctttatgacagtgacggtaaaccgctgatggaaaccgtgccgatgctcaaacccctgcagctgttcaacgctgagcagtgtgaggggttgccggcagaggttgcggcttctcctgaacagcccccgacggtggatgaggacggcatactcagtccggacgtgatggacagggtggtccggatgtttaacgccacaggggttaaacaccggatgcagcctcagaaccgggcttattaccgcccgctgacggatgaaattgtgatgccgatggaagggcagttttttacggaagcggactggtggtccacgctgctgcatgagctggtacacagtaccggtcatgcgaagcgacttaaccgggaggggataacctcctcatcccggcagttcggggacccggtgtatgcctttgaggagctcatcgccgaaatgggcagtgcgtttttgtgtgcccagctcggcgtgtccggcgaggttcagcacgacagctatgtggaccactggctgaaggtgctgagatctgacaaaaaagccctgttccgcgcctgccggcatgcccgggaagcgtcggaatatctgctggcacagactgaaagtcaggctgtggcggcgtaa

SEQ ID NO: 103624 - DNA, 933 bp, Enterobacter aerogenes
atgtccgaatggtgtcataaccgcctggaaatcaccggtaaatccgtctgcatcgatgttttgctgcagtggataaacgggactgacgtcccccgtcaccgccatgccgtgcagcagagcatacagctgtttctggccggcgcggcggggatactcaagccggtacgcaccacgtcgtatccgccttttcaggggctggtccgtgcaggcacagggctttccactgcggccaaccaggcgtttgaaaactggctggcgctcctgctgaaggatgccatcctcgatgcggaaaccatcagagccgtggaccggctttatcaccagtcaggtctgggcgcgctgaaatgggagaatattcccggcccggcacgtgagattatggcggatctgattgtcagacagtataccgactggtttggtctcgtcagcgccggcgatgagtctgatgccgcaactgcctgggaacggctcagccagtatcctgaacgttctcagccctgcgacatgctggccgtgatacccacgcggctggcagcagagctgaacggcgccagcggactgatgtccggtgtgtcgacctcaaccagcctctactgccggcagtacggcatggagtggccggccgggcacaatgtcaactggcagcggcattcgccaaacagtcttacgctgcagatggataccccctggctcccgccatcaggcgaggttgtcggggaaatctcagcggtgtttgactgcgaggtgcgtcacagctacagcgaccccgtaagcgggctcagcggttacgactgctatgacggcggtgaacatgtcgacgggcacaaaagcgcgtccggcgcgcctcagcccggtcaggtgctttatctggtcagcgatgagcccgcttcactggctcaggaacctgcatcatatcgtgaggtccgggggtaa

SEQ ID NO: 103625 - DNA, 684 bp, Enterobacter aerogenes
atgcctgaaatgattaaccacgaaaaagcctttgttaaattgttcagtcagacggcccggtatcatcaccggttcaaagtgtttgaagacttcatcagctgcagcgccatcgcgctggaaaaccggcttcacttcagtgaaatgcgggagcaaaagtatctgcgtatagtcggtggatacgaaaaggaggacgtcacgcgcatggcgcagctgcttgcccacgttgttaacgggctgggtgacgcgccgggagacttccttggccgcgtttttatgcagctggagctgggtgacaaatacagggggcagtttttcacgccctgggacgtggccagaatgatggcggccatgcagctgggcgacactgaagcgttgttccgtgacaaacccttcatcaccctgagtgaacctgcgtgcggggccggctgcatggtgctggcatttgctgatgttctgcaaaaggcgggatggccaccgcaccggtatctgtgggtctccgcgacagatatcgatccgcttgcggccggaatggcttatatacagttatccttgagtggaatcgccggcgaagtagtggtaggcaacaccctggcagatgaacgacgaagggtacttcatacgccggggcattacctggggaactggatcatgcgacttgaaccgtacactggcaatactgcctga

SEQ ID NO: 103626 - DNA, 1023 bp, Enterobacter aerogenes
atgcctaatcttttggaaatgcctgctgcagcaagttgggttaaatctgccatatcagactgttcttgcgaagtttatggaagcatagttcccgccgttatctggacaaatgcaaatgatcctagtgggagtttaattgttcccctcgacccgaacgagttatctctacgaataaataatgaaccgtatattgtgttacatgaccatgatcccggtaaacctaaagggcaagtactgaaaagcgcagtttttcaaaacgacagcgggaccatattcgtcgccgctatcataggtttatatgctgaggggaatgtcaaaaagttctcagagtttgagttaggattacctgctactttttcttctcctgattcgttaccatgtttgccagagaatgcctggatagaacttgcgcttgatcccagggaagttgactcagcatggattgcaagtgtttcatcagacgccccactacatatcaagcatgttgagctttcacacaatgctgcagaaaatacttatgagttaatacatattgggcttagctatttagctatagtctggaacccctttgttaccactgtggctactgaagcaggtaagcgtacctataatgcactgcatcaatgggttcataatttccttggccgcctatctgaaaggaaaaatcccatcattgatatcgcctcttttcagaacggatgccaggtgtcttttttgattcgcggaaaagatactcttcaacattacatggctcacgatgctttatccgaagcaggtgtacaagcagcccagttaatcagtaaatttagagaacggggaaaaccgccatcgaagttaatctatgaatgggatacaaaatataataaatggtatccatcgtatgcgctgttaactgacagatctattatcgttgaccaagctactctcattgccttggagaaactgccgacaaatctcagcctcggtataagaaaaggagaaaatgttgaaatgatcttcgatcacgaaaatcaatctcattag

SEQ ID NO: 103627 - DNA, 666 bp, Enterobacter aerogenes
atgaatatcgagcaacttattgtcttgctgactgaacagcagcacttgactgcgcgagcgccctgggcggttcttgatatctatggtgatgaagccactgtggttgacgccaatggttttgagcacctggaaattcccaatgttgcgatagttcccgattgggaaaaactcggattggaacactggtcggagaaaggtggcagccgtgaggtgagccttgaggagcaaaaagccaatgcccaattagccgccgccgcaccgctgctactggcacatattcatgttctcaaccgccacgtagtggccgcagggaatgccctgcgtcgtatgctggaaatgcatgagatgatgatggcaaaggccaaccatgcagccagtttttatgatgctgaatgcctgcaggaaatggcggaagcgccactggaggcggccgcagtgcttgagtatgtctgcggcgatgacgcggttaacgctgagctgaaagaagcgacctgcgtcggttgcggctgcaccgaccacaatgcctgtgttgatgaaaatcgcacgccctgcagctggctcaaggttaaccgcgagacagggttaggtgtttgttcttcgtgcccgaaattccttaatcaccccctgactgccgacggcgataaaccggaggtgcgccatggctga

SEQ ID NO: 103628 - DNA, 1341 bp, Enterobacter aerogenes
atggctgagatgaaaatccctcattctgtggatgccgagcaggccgtactgggcgggctgatgttggagaacgcgcgctgggacgacgtggtgtctgtccttcgtgacgctgacttttatatcccgtcacatcgccgtgtgttccaggcgatggggcaactgatggcggttaaccagcctatcgacctgatcacgctgtctgagtcgcttgaacagaacaatgtacttaagcaggttggtggttttgcgtatctcgccgagatgtccaagaacacgccaagtgccgccaatatcgacgcgtatgccaacattgttgcagagcgtagcagactgcgtcgcttgctggatctggggcgagcgttaagcgccgaagccgtagcccctcaggcaaaatctgaacggttgactgagcgggtcgagacgcagctccttgagctgtcggagcaggtgtatacccggcaaaatgtctgcctgcttgatggtttggacgctgtcgccagccggctggaaagtgttaccggaggaaccggtgtgaccggaaccccaacaggcctgtcattggttgatgagatcacgtgtggtctgcaggatggggaactgattctgctggccgcgcggccaagtatgggtaagaccgcattttcactggcgtgctgcgtcggtgcgctggaaggcaccgagcgtccggtattctgcttcagccttgagatgccgcgggagcaattgctgcagcgtttcctcgctatgctgggccgagtgaatttgaccctgttccgcaatggccagctcgaggacgaacactgggcaagaattaccgatgcaatggggattatgacgccctggaacgaccgtctgattattgatgacacgtcagcgctgacgccagcgcagttgcgctcactcgtgcgccgttatacccgccagtatggccgtccggccctcattatggtcgattatctgcagctgatgcgtgcacctgattttgaaaaccgcacccaggaaatagcggaaatctcccgtagcctgaaggcgctggccaaagacacgcaatgcccggtattggcgctgtcgcagctgaatcggtcgcttgaacaacgggcagacaaacgtccgatgaacagtgacctgcgcgactccggcgcacttgagcaggatgccgatgtgatcgcctttatttaccgggacgaggtgtattacccggattctgaggatgcgggcaccgccgagattatattcggcaagcaacgccagggaccgaccggcatggtgcgcgttcagtatgaacaggaatacacggcattccgtgatttggccatgcctgcatttcagggaggggcgtaa

SEQ ID NO: 103629 - DNA, 1737 bp, Enterobacter aerogenes
atgggacgtatcaataccaaaaatattgacctgggttctgcattgctccagcaggggaaaactgctgtaggtacggataagtcagagaaggttgaacttgttcaattgacctctgaaatcccgatggtgctgactttggatgacgtcagtcctttcccggataacccaagaacctcccggaacccacggtatgaagaaatcaaagcttcagtgcgggcgcgtggtctggatacggtgcccaaaatcaccgcagatcctgagcgtcctgagctgggcttcttctttagtgacggggggaatactcgccttcaaattttgtcagaactgtggcaggaaacgggggatgagcggtttttccgtatctcttgcatgtttaagccgtggcccggccggctttcgtgtttgattggtcacctggctgagaatgaagttcggggcgaactgagctttattgaaaaggctttcgggatcaaacgagcacgggagttttttgaagaaaatttgggtaagaaagtctctttgcgagaactttctaacctgctgggtcaagaaggttacccggtgcatagttctaatatcagccggatggaagatactatccaatatttgtatccccacatgccgaacctgctcaaatcgggtttaggacggcctcaaatacaacatttattgtcgttacgtgttcatgcatataaaacatgggataacttttcctcagacaacgcggccgttcaggattttgagggtgtcttcggggcagtttgcgaacattttgatgatcctgatgcttactcacttgagatgtttcgtgatgagttgattggtgaattagttaaagccctcccgcatccgtcactgaattacgaccgctggctcctcgagctggatcccaaagagcagaatcgccggcaacagcttggtgaagagcatctgcaaagcatgcctaattttgccgttcagccaatggttggatcccccgttgatggcagtggcgcaattgatagtggtgctgcgatgccgtcatcttccgctgatgcgccagtgccagatacgtcgagcttgacgctgagcagcgcactggatgaacaggaaagtgcagaggagggcgcagtggacccctccgatgctgagtctgcttcttccggatcaccacgtattgaaacccaacatgatctgtatggcgcgccgccggtcctgtccggagatattgatgcgtcttcctcatccgataccggcagtgaagaggccgcaggggcagaaagacccccacaacctggctctgtcgcgccacaaatcagcccggacgcaggggcctcggacgttgcgttcgctgcagcaggacttgagcccgtggcctctatctgggctattccggcgctgcaggatgacatcgagcacctgcagggaatggcgtatcgcctggccttcgaacttgccgagctgaacggttgcgaagccgagctcaaggccgacaagggcacgctgcttgcagccgggtacggtctggccaccgcgcagtcatccccatttaccaccttgctgctctccctgactggggcgacagccgtgaccgatacctgttcattaagtgaaatgctgattggcacggctgatggtggcggtttcccgttgcttgatgatgtccatgccgtgaagttcttgcgcctggttcgcgttcttcgccggctgcgtgagctgcaacgtgatgtagatactgacactggggaggacgcatga

SEQ ID NO: 103630 - DNA, 258 bp, Enterobacter aerogenes
atgaccgtcatgattgaacgtttgcaggccattctggccgacccgtctgccacgcaggaggagcatgagatggcggcggagctgttggcggtcagggcgcttaccgcgtgttatacgaaagagggccagagcgtccttctggaaacttgcaacgtcctgattaaccgaaaaaacacctccgaatactcggataacatcagagagattgcgcgcgtcgcccatggggtgctggccaacaacaaggagaacaacggatga

SEQ ID NO: 103631 - DNA, 723 bp, Enterobacter aerogenes
atgagcgattcacaacgacaagtgcggctggtgaaactggtccgcaaactcctcgaactggcccagagcaacagtaatgcccatgaagccgggctggcattggctcgcgcccagaagctgatggcgaaatacggtatcaccgagctcgaggcaaacatttcctccattcagcaggcgcccactcaggccgcgccgtctcagtcctggaacaaaattccggagtggatgacccggctgacctggactgtcgctcatgcgtttggctgtcgcccttacttttcttcccgcgaaacccggagcggattactgcgccgcaacgtcacgttctacggctttagtgagcgcccggcggttgctgcctatgcctttgatgtgctgagtcgccagctcaaggacgcgacggctgcttacctgaaaactcaggataagcgcctgaaaatggcgacgcgtcgggcgcgtgccgagcagttccgtgccggttgggtcgaaggcgttcgccgaattgtcgaggttttcagcgtgtcggagcatgagcaggcgctgatgtccgcctggtcggaacagcaagggatgaccacgctgaagagccgttcggtgaaacggtgtcgcggtgatttcatcgcgcgtagccagggctatctggcaggacaaaacgcacagttacatcatggggttaacggctgcggaccggcaggtattggctacagcgccggagaggagtag

SEQ ID NO: 103632 - DNA, 195 bp, Enterobacter aerogenes
atgaatcctgaactgattttcacaagcttatttgtggtcttttttatcgcatttgtttttggtggtttggatttaagggagctcatcaaggacaggaaagtacttatttctttcttgccttatttgttctttttactgggggcggtccttttattgattgctgcccttattcgttggttcatcagggggtattaa

SEQ ID NO: 103633 - DNA, 630 bp, Enterobacter aerogenes
atgagtaacagcttgtcacaggcgacaaacagcctgctcacgcagctcgtcatggagcttaagtccggctatatccgccgttgtgagtcactcggactcacgccggaggaaatgcagatgctcaacggcctgaccgttgatgatttgtattacctgctgaacagctccgtctcggtgctcacgttccagatccatcatgaaaatttcgcgttgatgctgcagcaatctcgccgggagcagcagcggatgcagcgtattgaccgtgcgctggcgctgggcggttctatcgagatgatgatgcacttttttggcttgtcgagtgtggaggtctccgcacgccggcgcatgacggggatccaaatccggcagggccgttgttcgacgcttagcgatgaggacaatgcatcgctgtggcgtcagtggcagaaagccgacattgaggatgtctccagtgcggacggtctggacgtcatgatgctggcggccgagcaaatggatgtgtcgttaaccgcggtctggcatgcggtgcgcagttttgatggggcacagactcgcacggtccgtaaagcgatccagtcagtacgtaataaagccggtgtcggggaggagcttgtaaggaggtcagcatga

SEQ ID NO: 103634 - DNA, 264 bp, Enterobacter aerogenes
atgaagccgttagtgttgatgccggggctttatgccccgcgttctgcccctccagcctgtcagaaaaaagcgcgggaacaggtgagacgttttcgccagggggaaaggaattacaaggcactgcatgtaaaaggtaagcaccgcagcggccgtgcctggatgaagatcaatattagtgacagctggcgcctgctcagcagaaacagtggtgttgattgggagctgctgacccacgaacgctacaacaatgaattatggaaatga

SEQ ID NO: 103635 - DNA, 1281 bp, Enterobacter aerogenes
atgagcataagcaaaagacctgatgacagcctgatctctcatacgatagagcagatgaatgcccggctggctgagcgaatatgcgatgacacacaggctactgctggtgatgtgacaaatctgcgcagtggcctcctcttcacaggaaacgtccacgatgcagtaccacgccggttgatgctcgacacgcgcctgtctccactggataaagtggcgtggatgatgatccgcctctatgcccagcagaaccaacaaaaccagggagccatgttcccgacctacgacgagctgcagctgcagttagcgtcaccgttcaagggcaaggcatcgcgtgaaacggtcagccgggttttgttgatgttgcgtctgacgggctggttgagcctgtgccgtcgcgtgcgtgacagtaaagggcgagtacgcgggaacatctattctcagcatgatgagccgctctcagcctgtgatgcggaaagtctggatccgacctggcttgatacggtcgcggcggcctgccagcacaagaatcgcgctgtcagtcagacggcctggtcagtgctgtctgacatccgtaacgacccgtcgatgcgccactaccactcgcaattgaccgtcatagcgcagcggctgggcgcacctcaaacccctcaagatatggccgcgcagattgcgcaccgtgaagacacggccggcagttcggtaaccgaacccagtgagaaatcccccagttcggataccgaactgggtcaatataagccgagttcggatcccgaaccggggataaaacagggtaagaaggcacagagttcggactccgaactaagtctaaaatcaacaagttataccaaaaaatcgaaaccgaactgtaacgtacgttctttcacacaaagtgtgaataaaaaaacgtacgtaccgcgcttacctgaggcgttacagcaacgcataccagacgctgacctgcagcaaatcgatacccagttacaggccttgccggcggaagtggcccgtcagattctggagagcctgagcacagcactggcgcgtggagaggtgagtaacccgaccgggtggctgttcagcatgatgaaacgtgcccgtaatggggccgtgttcgccatgacagcgcccgcaaagccagaaaaaacatccccctcacaccgtcctgtgcgccttgcacaaacgccacgaacagcacccggccaggctgcaacccgcgagcatgtcagtgccgtggtggcgaagttgcgccaggagatggcccgagccagaaacaggaagtga

SEQ ID NO: 103636 - DNA, 714 bp, Enterobacter aerogenes
atggcagacaccaccgaaagcgcacagcgcaagacagttccgtcaagggccggggccctcaaatccacgctgaccgtacagttacatacccagtacgccattctgttatgggaagggcgccagcgcgataaagaaaccaataaacctcaaatcgtcggtatgccacaggtgatcgcgcgtgcaggcaaaatcaatactgattcgaacagtgataatccgtatgccgattctgcgatgctgttactggaagaggcgatcgagcgcggtaccggccggctgcaatcggcggttgctgagctggataaaactttatccagcttgcctggccaggtctcaatgtcggaggtcgcatcggttgctcctttgaatatcggtgtctttagccgcacgcctctgggctatcgttgcgtctggttgcttgttggttttgaccagttggcgatgaaagccttccaggcctggcactacgggctgatttcccgtcaaaaacgcgatgagttactgagtcagggcgggcactgggtccgccaggtctacggcgttgttcagcaatatcgttcggttgcagcgacccgtgatgatattcgcctgcaaacccctgccggcattgacgcggtaaaacgtctgggcccgcctgatgctgacatcatgagtggtgcaaaacgctcagcattttcaccgccgcttcgtccggttaaaggagacacagcatga

SEQ ID NO: 103637 - DNA, 576 bp, Enterobacter aerogenes
atgaataatgacggtttgaagtctttacgctctgcggttgccgcctgtctgttcggtagttttttgctgtcggggtgttcgatgtcagatgtgaccgcgtggaatcagaagatcagcgatgctgcacattctattgccagtggctcggggacgagttcagattccggcggcatgccctggatgaccaaggccggtgctaccggccctcgtcaggacgtgcagcatacctatacgcttccggtagatgtggataccgctgctgcacgactgaaaagccactatcagtttatctccacgggtgagctggaaagccttcgtcaacgcgatcaatacggtgactggagtgccggtgctattgatgaagcacggccggaatgggcagcgcaaaggggcagttattacaagatggggcaggagtggaaaggcaacgaccgtctggttctggaggtggaaaaatccggtgccggcagccgcctcaaggccacgtatagctctccggacagttcgcacctgactgaggcctatttacgccgcctgatgacccagctgcagcaggtcgccaaaggccagcgctga

SEQ ID NO: 103638 - DNA, 2040 bp, Enterobacter aerogenes
atgcaactttacctttgtgagaaaccgtctcagggaaaagacattggcgccgttctgggcgccagtcaacgcaagcagggctatctgaccggaaacggtgtgattgtgacctgggcaattggtcacctgctggaacaagctcagcccgagacctacggcgaacagtatggcagcccctggcgagagtcggtgctgcccattgtcccgacacagtggaaaatggaagtcaaaaaggatacggctgatcagtttgccgttatccgtggcctcctgaagcaagtcgactcggttgtgatcgcgacagacgccgaccgggaaggcgaggtgatagcgcgcgagctgctggaatattgccagtttaccgggccggttgaacggctgtggctatcggcgctggatgaaaccagcattcggcaggctctggccaacaagttgccgggcaacaagaccgcgccgctctatgaagcagggttagcccgtgcgcgcgctgactggatgaccggcatgaacctgacccggctttatacgctgaaggcgcgggagcaggggtatggcgaggtattgtctattggccgcgttcagacgccggcgctggcactggtcgtcaaccgtgaccgtgaaatcgcgaacttcgtttcaaagccctactggcaggtgcaggccacgctgcaaaaggacggcatcagcttcccggccaactgggtgccggcggccaattactgtgatgaagaaaagcgctgtattcaccagaacgttgcgcaggccgtggtgcagctctgtcagcaaaccggacaggctgtggtgctggaggtcggtaccgagcgcaagaaagagtcggcaccgctggcatttgacctgggctcattgcagcaggcctgctcgcgcaaatgggggatgggcgccaaccaggtattgagtatcgcccagtcattgtacgaaacccataaagcgacgacctatcctcgtactgactgcggttatctccccacttcaatgcaggctgaaatcccggatgtgcttaatgccattacccgtacggatccgacacaaggtgcggtgattgcttcgctggataccggttttgtctcccgtatctggaatgacaaaaaaatcacggcgcaccacggcattattcccaccaagcaggcatttgacctgagcaaactgtcagctgatgaactcaaggtctatcaactgatacgtcagcactacctggcgcagttcctgccactgcatgaggtggatgtcacggaagcgacgttcaatatcggtggccagctgttccgtacccgcggcaaggtcgaggttattgccggctggaaaacgttgtttcagcgcgaggagcgtgacgagaaagaaaagtcggacgagtcggaagaggcacgtctgccggcactagaaaaaggacagtcatgcgctatcgccggcgctgaacttaaaacactgcagactaaacctcccgggcattttaccgatggtacgctgatagcagcaatgaaaaatgcggcggcgtttgtcagcgatccacagctgaaaaaagtgctcaaggagaacgccgggctggggacggaggcgacccgggccggtatcctggagacgttgtttaaacgggggtatctggagaagaaggggaaatttttgctgtcgacgccgattgccggcgagctgattgatgcattgccgacggcactgacgaacccgggcatgacagcgctctgggagcaggcgctggatgaaatcgcccagggtaaaatgacgcttggggcgttcatggaccgtcagacacagtgggcgacacatctggtcgacaaaggaaagacacaagcggtcaaattcaccgcgccgccatctcctccctgcccattatgcagcggtaccatgcgccggcgcaccggtaagaaggggggcggtgcattctggggctgcagcaactacccgacctgtcaggggatcatcaacatcgatgctaaaagtggcggtaagggtaagcgttataaaggaaaatcggcggctaaaaataaaacaaccagatcagagtaa

SEQ ID NO: 103639 - DNA, 477 bp, Enterobacter aerogenes
atgtctaacgcaaatcaagctcaacaaaatgccaccaaaaacactgaatacttcaacctgaccatcaacggcatggggtatctcagtaatgttcgccaggttaacggtccgaacggcacctttatcagctgtgttgtgaatgccctgtccggtccgaccgataacgccagctatacgcgtttcgattgtactgtttcaggtaaagaagccagcagcctgataaatcgttgccagaaagcctgtgacgaagacaagaaagtcctgattggttttgtgctcagcaatccgaaaacggacatcttcacgctcaacagcggcgaacatgccggtgaacagcgtgtcagcctgaaagcccgcattatccgtatcgactggatcaaaatcggtcaggaaaaggtgtaccaggctgaaaaatcctactcccagccgcctcagcagggttccgcgcagccaagctacgctgaaaactccttctga

SEQ ID NO: 103640 - DNA, 549 bp, Enterobacter aerogenes
atggcgtctcgcggcgtaaacaaagtgattcttgtcggttatctgggccaggatccagaaatccgttacatgccttccggcggtgcagtggcgacgttgtcactcgcaacgtccgagagctggcgtgataaacaatccggtgaacagaaagagaagaccgagtggcaccgtgtcgtgttgttcgggaaactcgctgaaatagccggcgaatatctgcgtaaaggttcgcaggtctatatcgagggtcaactgcggacacgcaagtggaccgactcggacggtgttgaccgttactccactgaggtggtggtcaacgttggtgggtcaatgcaaatgctgggtggccgctcttcggataatgccgctggtcaacgcggccagagcagctggggcaagcctcaacagccaacccacagcggcacaccgcctcgacagcctcaaccgcaggcacagtctggcgggaatgagccaccgatggactttgacgatgatataccgttcctcgggtttggttacggtatcgcaaaaccagccatttacgctctatga

SEQ ID NO: 103641 - DNA, 237 bp, Enterobacter aerogenes
atgccgacaattcttagggtaggaggttttcgcttttacttttacagtcatgaacctaatgaaccggcgcatgtccatattgataagggcaatgcaaccgctaaaatatggttacatgatgtcagtattgcgcgtagtgtggggtttgcatcacatgaactgcgtatactgcagcgtctggtgactgaacatcggacacttttacgggaggcctgggatgcttactttacgcaatga

SEQ ID NO: 103642 - DNA, 273 bp, Enterobacter aerogenes
atgcttactttacgcaatgaaaatgatctgcgtgtaatgaatgtccgcatcgatgatgaccgattgacggttgatttgatggatggtcgaactatttcggtaccgctggcctggtatccgcgtcttgcggctggtacgccagcgcaacgggaaaactgggaactctgcggggctggaatggggatacactggccagacctggatgaggacctaagtacggaagggttgctgatgggcgcgaaaggcatttctcgtgcaccttcattaccctga

SEQ ID NO: 103643 - DNA, 636 bp, Enterobacter aerogenes
atgaaaaaaacatttgtagtctccgccctggcagccgtcatcctgacgggctgcaccacgcaacaacccctgcaacagcgtgatgcgtcactggtcacaccgcctgtcaccgtcacccgcaatgttcaaccggtctctccggacgcttatgccagggcaccggaagtggtgcgctatgaccgctatctgctggtcagtaccgatccggctgccgtccagcgagacccactttctcaaatcatcgatatccgtattcccgcctccgtcaaaccgaccgtcgccgatgcgctgcgttactcactgcgccagtccggttacaccctgtgtgcgaccgggccggccaacggggtgttgtatcgccaggcactgccggcggtgcagtaccagctgggaccgatgcgtctgcgcaccgcgctgcaggtgctggccggtccggcctggcagctcgaagttgacgatgtgcagcgcgttgtctgccacagcctgcgcgacggttaccagttgccggcctctcagttaccaccgtcgccgacgccacgtgtgtatcacgcagcgccagctgcagcaccggctggcacgatgacgccgccggcgattaaacctgtttcttcaaccggaggatggctgaaaaaatga

SEQ ID NO: 103644 - DNA, 756 bp, Enterobacter aerogenes
atgaccgagcataacgaagaaatggtgcccatgacgccggccaaaaaaggattgctgcgtagcaaggccttttggctggtgacgggcggggtggtggttgttctgattatcggtatggtgggtgtcggcaccgtcaaacacgttgaccagcgtattgcccagctggagacggcgcaaaaagcgctggcccctcaggatgacatgacctcgatggccgatgtggtgcaggcgcatgccaagcagctgaaagccctgacagtacgcctgaacacactcaacgacgagatgacgggactccgggccactaacagtctgcccgaaaagcttgagcagcagctgcaggcgcagcaggttgaactcaatgcactcaaagacagtctggaagcgctgaaaaagtctgcggtaacggcaccggcagaaaataccgcccctgccggcaaaccttctgtcgccgttccggctgcaccgtcggccacggcaaaaatcaccccaaagcacgaacctacgccgattaaatctgccccgcgtaaagcggtacgccgtgtggcgcgcaaagcgccattcgtgctgaccggggtggagcagcgtgggacagcggcctttgcggccgtggcgccgcagggattcagtgacctgtcacaggttcggctgattggggaaggcgagtccgttgccgggtggacgttggtcagtgccggtcacggccaggcgacgttccgtgtcaatggccgcctgcagaccgtcagcgcgcaataa

SEQ ID NO: 103645 - DNA, 711 bp, Enterobacter aerogenes
atgaagatgagatacagcctgttcgccctggtgctactgagcccgttatcacaggcggcgcagcagtcggctatcgagaacagtcagtccacactgagccagctgcagcaaagccaggccaacaagctggccgaacagggcaagcagtggggattgagtggccaggagtaccagcgttacgagcaactcatggacgggccgcgcgggacacagtccccggggctcgatccgctgacggcgctcggcatcgaggccaaaagtgatgccgagcgcaagaaatacgcggagcagtgggtgcgccaggagtttgcccgcacggagaaagagctgaagtttcagcgtgaagttgatgcggcctggcagcgccttggcgtactgccggtcaacatggggaatgcggccggtatcgcgcatgacagcggtggccgtctggcgctgttcgtgaagggcaaggactgcggccagtgcgatgcgcgtcttgctgcggtgctggctgacaaccgtccggtcgacatttacctggtcgacagcaagggggatgacgacgtgctgcgcagctgggcgaaggcgcatcatatcccggcagacaaggttcgggcccgtcaaatcacgctcaatcacgatggcggccgctggatgaaattcggcaacggcctgatgccggtcgtgctgcaacaggggaaagacggatggactatcgccgcgttttga

SEQ ID NO: 103646 - DNA, 675 bp, Enterobacter aerogenes
atggactatcgccgcgttttgaccgcaggcctgctgcaggccacgttgttgtttgcgcatgccgctgccgcgcaggacgtgccgcagggttaccgcgaagtcgcaatgcgccacggtgtgccgccggagtcgctctattcggtagccttgaccgaaacctcgatgtcaccgaaaggcattatttcggtgacccgcggcgccggcccggcgccggatgttgaacgtccgtggccgtggaccattaacgtggccggcaaaggctaccgttatgccacccgcctgcaggcctgggaagcgctgcagggctttctgaagaaatacccgcgcaagcgcatcgatgtcggtattgcccaggtcaacctgggctggaacggccatcacttcacctcgacctgggaagcctttgaaccctacaccaatctgaatgccgcggcggccatcctgcgagagtgctatgaccgtaaccccggcagctggctgacagctgccgggtgttatcaccatccggccggcggcgcccctgcagcccgttataaatccatcgtgagaaccaagctggcacgcctcaatcgtagcggtacaaaggcgccagtggtttcccgtcatacacctgacccgacgctggcagcgacgcaaaccgtcgcgctgacgtgggttgagccgaggagtcaataa

SEQ ID NO: 103647 - DNA, 357 bp, Enterobacter aerogenes
atgaccaataagcaactggaagacctgaaagaacaactgccggcagcgctggcgacgtggcaacagtcgaaaggtagcagagtcactgtgggctggctgcatgtggcgaatcctgaggttattgcaacgctgctaactgagctggaaaaagcacagcagctcattaaggcggcggaaatcagaggtgtagaaaagttggcggccgctttcaaatcctggtctggcgacaactctcatctcgattacgaagcacagcggcactgggccacagcgagcgaagaagcgttgtcatttgctgatgacctccgcaatggggccaatattgaacgggaaggggagcatcatgaagaacgttaa

SEQ ID NO: 103648 - DNA, 516 bp, Enterobacter aerogenes
atgaagaacgttaattttctgctgttcggtctgtgcctggtgacctccaccgcgctggcgaatctgaacgtgattgccgatgttggcggtgaggatgcttccccgtattttgacggtattaacgcccagggtgaggcgccgccgtcaccctccggccaacccggtgttggtgacgctcaagcctctatgttgcccgtgtctacgccggagctgactcctggagaggttgctgacagaccgctccagctgccagggattggcgccctgtttattgtgggcgatgacgatgccagccgcagttggctgcaggcaaatgccgaagggctcacgtcgcgccatgctgccggcctggttgtgaacgtcagcaacctgccggccctgcagtcgctgcaggcgttggttcccggtgtaccgatggcaccgacttccggcagtgaactggcgcgccgcctgcagctgtcaaactacccggtgttcatcaccgacaccggcctgtcccagcaggtcacgccatga

SEQ ID NO: 103649 - DNA, 627 bp, Enterobacter aerogenes
atgatctccccgcagcacgtcggcaccgccctggtggcaagtccgctgctggcagccttgcttatcgggttgtttattgtggtgatggccacgctcaacctgcgtggccgtgagtctgcttctgcacggcgccaccggcgttaccgtgcaacggccgcccgcgttctgcagcggttgccgcagttgggcggtgatggccagcgcttgatgtacctgcgcaaaatcaatccctacgtctttgaggaactgctgctcctggcgtttgaacgtcaggggtatgcagttatccgcaaccgcgcttacagcggtgacggtggtctggacggtcaggtcatcatcggcgaccagaaatacctcatccaggccaagcgttacggtcgcgccatcacgccgtcccatatcaagagttttggtgccctgttgcggcatcaccactgtcagggttttttcattcataccggccgtaccggccagctgagccgtgccttgctgcagaaccatccacacgttcatcttgtcagcggccagaagctgctggcgctgcttgccggcaatgcgcagtggctgtcttttctgccggaaaatacggtaatcaaacggagtacccccaatgtcgaattgttctaa

SEQ ID NO: 103650 - DNA, 525 bp, Enterobacter aerogenes
atgtcgaattgttctaagtatgttgctttggctaccggctttttgtcctcggtattcagagttctgttggtctggccaggtgtagttctggcgttttttggcctcattttttttatcgcaacactttgtgataacggcgcgcaaaaagcagcctcacgcatggcggacaccgcgcaggaataccgtgcagcccctgccggaatggtgatggtgcgtctgtgtccacacgcggatgatcatgtatgggaggtggcaccggtactggaacgggactgcaaacctcatccgaagacgttcactgacgttgcaaggcaagagcggcgcgccgttctctggatcgggagtgtgctcatcgtccttggcatgttgattgaactgttttatttgctgtaccgccgccgccagatgagcctgaatgctgtgtacggaagtatcaatgcaagaggtgagtatcgtgctgtgacttatctcggtaaagccaatgctgatgaacgtcgtcgctcttctgaaggggagttgtcatga

SEQ ID NO: 103651 - DNA, 789 bp, Enterobacter aerogenes
atgaacgacaagccttttattgagcgtgtgctagccaacaaacccgtctgggctgatacacggattggagcctggaatcgactggtataccggcaggatgcaaattttgtcactgaagattttgtcacccgccactactggactgacagagggagtattaatgtgttccgtatcgtgggtactgaccacccgcgatatggcggaatgagctggctcgacctgctacatcagggcagacacatggatatcaatatcccactgattgaaagcaacccggattattacaccgatgccacgcaattccatcatgggatgagctttgtcagcctggacggactggactggtatgccaataaggatggtaatcatcgcagttgcctggcgcgtttttatttccatctgcagggttataacgtgacgcagctgcacaatgtcgccctgaaccaatatcaggtcgaccacacttttatgacggcatgtgaggccctgtcagcgatggtgccggcgttgcggtcgcagggcgtgtatctggcactgtcagctcagagggggcaggtttcccgtgatgatacgcccggctggaaagtggacacctggcacactgaggtgacggtgacgctgtatgatacgaccggcaatgagagggggcggcgatttatcctgcatcatgccgcagaagcggagcaattacgttgtcagcttgaaatccggtacctcaagccgggtgccacaccgaagaagggggcgtggtggaaacgcctgttggcttctggcaaggagggcgcatga

SEQ ID NO: 103652 - DNA, 2112 bp, Enterobacter aerogenes
atgagtaaccggcatgtgatggaagccttgctgcgtccggcggtggagctcaatacggcgattgtggccgggggcgcggctgtagtttgtgctgtcgcaccttggtcggtggcgctggcgcctgaagtgagttatgtcaccgccggcagctttgcggtgttgtctgccattcgcgcccgccagggtatgcaggtgatccgctatcgccgcaatctgcgccggctaccgcggtatgtcatgaccagcgcccaaatcccggttagccggcaacggctgttcctgggcaaggggtttcgttggcagcaaaaacatacccagcgtctgatggatacgcgccggccggaagtggaaaagtatgtccagccctccagggtttaccagatggcccgtcgtcttgaactgcagaccgagtacagcatgccctggttgtcgcagctgctgcgcaaggactctccgctgaatccggtacggccgctgccgccggtaggtggcaatccggctattcatggtattgagcctaacgagctcgatgtctcgatggcgctggccgaacgcgttggccacaaactggttttgggcaccactagggttggcaaaacgcgtctggcagagctgctgatcacccaggatattcgccgcggtgatatcaccatcgtgtttgatccgaaaggggatgccgacctgctgcgccgggtgtgggccgaagcgcaccgcgccggccgtggtgacgagctgtatattttccacctgggctggccggatatctcggcgcgatataatgccgtcggccgctttgagcgtgtctccgaagtcgcggggcgtatctccgggcagttaagtggcgagggcaacagtgccgcgttccgcgagtttgcctggcgctttgtgaatatcgtcgcccgcgccctggtggcgttagggctgcgccctgattacaccctcattacccgctatgtgaacaacatcagtgagctgtatgagacctatgcgaaaaaggtcattgaagatcggatgccggcgctgcagcagcaaatcgacaacaacctgcaggtgctgtcggaagaggatgtgccacgcaatatgcaggggcaaccgaacgcggtcaaaattttcgcggttgaaatggccttgagctcggaagccggcaagcagctgtacgaccctatcctggacggtctgcgcagtgctgtgcgttatgaccgcacctatttcgacaaaatcgttgcctcactgttgccgctgctggaaaaactcaccaccggcaagacggcggagctgctggcgccagattacatggatatgagtgacccgcggccggtattcgactgggagcaggtcattcgtaagcggggcgtggtctatatcgggctcgatgcgttgtctgatggtgtggtggcgtcggcggtgggcaacagtatgttcgccgacctggtctcagtcgccggccatatctacaagcatggcatgcacggcgggttgccaacccgggccgatggtaaactgccgatcaacctgcactgtgacgagttcaacgagttgatgggcgatgaattcattccgctgatcaacaagggcggtggcgccggcatgcaagtcacggcctacacgcagaccgaatccgatattgaggcgcgtatcggcagctcagccaaggcggcacaggtcacgggtaacttcaacaccctcatcatgctgcgtgtgagggagaatcgcaccgcgcagttgctgacctcacagctgccggaagtagatgtctacaccaaaaccctggtgtccggtcatgctgacacggcagacgttgagaaggggcaggattttacatccagtacccaggatcgtgtcggtactgtcaaggttccgctgctgaaagaggctgacgtgattaacctgccgaaagggcaggcgttcgcgctgctggaaggcggccagctgtggaaaatccgcatgccgctgccgagtggtgacggcgatgatgccctgatgccggcgaacctgcagaaaatcgccgaggagatgcagcgtaactaccgcaccagtgagtcatggtggtcggcaagtcaggtgatgccggatgtggtcacccagggaggacgcaatggcgcaggcggataa

SEQ ID NO: 103653 - DNA, 759 bp, Enterobacter aerogenes
atggcgcaggcggataatacgcagccgcggcaggcggcagaaccccggaaacatggcctgctgtataacctgctgtggggctggccctggatgctgatagggatgtttttcgcgtccttgttcgtgagcctggtgattgaatgggtagggatggcgttcttctggccggagctgggagcctcgcacagtgaagcggtgatgaacaccgagctgggttacctgtcctcggagtttacccgcagcctgctgctgtcagagccgtcggtaacggtgacccactggattttggtggcctaccagtgggcgtttgtggacagcggttttttgagctggatacagcaggcctatgagacgcagacgcatagccagaacgccattgccagagagctgaacagctggagtggttggttggccagtacgctcaaggaatacctgatggccacggtgtatgtgacggtgattaccctggtgcgcgtgaccattctggtgctgtccattccgctgtttattctagtggtactggtcgcgctgaccgaggggctgggacggcgtgatatccggcggtatggggcggggtacgagtccagctttgtctaccaccatgcaaaacggatggtcaagccggcggtgtacatcccctgcatgctgtacctgtcctggccgacggcggtatatcccaacctgctgttgttgccggcagcgattttgctgggtatcgcggtgacagtgacgacggccagctttaaaaaatatctgtag

SEQ ID NO: 103654 - DNA, 324 bp, Enterobacter aerogenes
atggaaatcgacgggataacggccatagtgtatccgatgcggctcgctgaaacagcatccttagaactgacgcgcctgtgctggtttttacagggcttgtctgctgacgatggcgcacaaaaacaagttttgcacgccatcgtccagctcgatgtaggctacagatattttttaaagctggccgtcgtcactgtcaccgcgatacccagcaaaatcgctgccggcaacaacagcaggttgggatataccgccgtcggccaggacaggtacagcatgcaggggatgtacaccgccggcttgaccatccgttttgcatggtggtag

SEQ ID NO: 103655 - DNA, 333 bp, Enterobacter aerogenes
atgcgtatccccgtagttacccgaggactgggcgccggctgtttgctggggctgtcattcctcaccgcattgcctgcctgtgccgccgaaaaagatgagctggcgtccgcccagcgcatgttgatccaggtacaggcggcgcttgagcgcgcgcgggtagcggccgtccaggccgaccccgccgagcgtggtcgtttctttttcgactatcgccgcgccacctctgatctcaacaccattaatgccggcatcgaccgttatctggagccgtcacgtgcacaaccgcgtgatggcggctccgtggcgggcaattaccggcgggagcgtccctga

SEQ ID NO: 103656 - DNA, 243 bp, Enterobacter aerogenes
atggccatgaccggcactcaggaacaggccttcaatacggccagcggcggcgttgagatcaacgtcctgtcgctgatctgtatcggtgggctgttggcggtgctgtttgtctgggctgcctgggcctggattgatgtttacgaaggctggaggaacgaaaaagtccccaccaaggcgctgatccgctttgtcgttaaaaccgttctgttgttggtcgtcgttatgtggatgttcgccagctaa

SEQ ID NO: 103657 - DNA, 366 bp, Enterobacter aerogenes
atgaatgctgtagttcgtcttttccgtcacttctccacgcgcattgcggtggcgacatctctggccgttgcggccagccagccggcgcaggccgccttaccagaggttgagccgccgtcatccggaggcggcggtggtctgatggagaccctcaaggggcatattcaagacggtattgtgctcattggtctggttctggccgccgtggcatttatcgtggtcgccagtgctgccgtttcaacgttccacgaggtacgggaagggaaggcggtctggggcaaattcgctgccatcatcgtcgttggcgtggtgttggtcgtggccgtcatttggctggtcggcaaatctgctgaaatcctgttctag

SEQ ID NO: 103658 - DNA, 366 bp, Enterobacter aerogenes
atgcagactatccgatttttgcccgatcgtcttaatgctgaacctgtcgtattccgggggtttactaccccggagatggtactgggtgcagctattggcgtgggtctgggtctgcttgtgtcgctgccgtttctgcttattgccggttgggtggtgatccccaccggcatgctgatcaccccactggcggttctctggtttggtggcagccggctggcacgcctcaagcgtggtaagccggagaactttatttggcagcgacttgagctgcgtaaacgtcgtatggggtggggcaatcccaccctgatcatcgaccaacagggctggtcattgcgacgcagccgagcagtcaagaggtcaacatga

SEQ ID NO: 103659 - DNA, 672 bp, Enterobacter aerogenes
atgagccgttttcgtcatgcggtaaaaaaccgtgaccagcacatcatgacgctgcgtgcagcctgcggcgtgctggttgtgtttctcctggtcgccatcattggctggatgcgcgccccatccaacctgaccatccataatccgccggatttgcgcagcggctcgacgcgtgcctggtgggaagtcccgcccagcacggtctacagcttcggcttctatatctttcagcagctgaatgcctggccgaaaaatggtgaggtggattacccggccaaaatcaatgcgctttctccttacctgacgccgtcgtgccagcggttccttaacgcggacgccaaaaaacgcagtgagtccggcgaactggccggccgtacacgcgtggtctttgaaatcccggatcacggttacaacgcccgttacaaccagaatccggttgacatcaaaggtcgggataactgggtagttcgtctggatctggttgcggatgagacgtttgccggcgaaccggtgaaacgcgccctgacccgttatccgctgaaagtggtgcgatcggaaggggatccagagcgtaatgaatttggtctggcgctcgattgttacgacagcatgccgcaacgtctggcggcggcaccgccagcgccggcgcctgagaaaaaaggagtcttccaatga

SEQ ID NO: 103660 - DNA, 909 bp, Enterobacter aerogenes
atgatgaaagctcgcgtattggcgctttctctgagcgtgttgacactgtcaacactggtttctgcaccagaagcgcaggcagaggaactgatgaagtgggagcgtatcccgctgcagatcccgctggcagtcggcaaggagcgcgtgctgtttgccgataaaaatgtccgcgtcggcttcccgccggcactgaacggcaagctgcgggtgcaaagcagcggcggggcggtgtatctgaaagccgacagcgcgttcccgcagacccgcctgcagctgcaggacgtggagaacggagaggtcatcctgctcgatgtcacagcgtccgataaaggctctgccgagccggtacgcatcgtttacagcggtgaggtctcctcggtcagcagcagtcacgacaagccggcctctgcggaggggagcagtgcctcgccagctcaggatgacggcagccaggcgaagcgcaagaccgtgaaatacaacgcgccgttgccggtggtgctgacgcgttacgcggcgcagagcctgtatggtccggtgcgtaccgtcgaagccgtgcccggcatccatccggtgaatccgcacctgcccaaacgcatcaccacgctgtatccgtccgagccggtctccatcaccccgctgggtggctggggtatcggcagccgcaacgtggtggcgctgaaagtgaagaatacggcgagccgcaaaatcacgctcgatccgcgggtattgcagggacagtttgtcacggcgacgttccagcatcggtacctggggccggttggcacgccagaggacaccaccacgctgtacctcgtcaccgccggtcgtccggacggtgcgtttgtcgccgagccgtcggtagtgcgcaaggcggtgaaagcggcgaagaagggggcaaaccatggctga

SEQ ID NO: 103661 - DNA, 1500 bp, Enterobacter aerogenes
atggctgatgtgaaatccaatatgctgccgaaagtgatcgtgtttggcgtgctggcggcggcggtgcttgtcggtcttaaggcctgcagtggtaacaagagtgcagagaagccgcagcaggcgcagaacgtgctggccaatatgtccccggaagagctgcgtgcgctgggcgtcgaaggggatacgcctgaagacacgctgcgcaccctggttggcacgctgcgtaccacgcgggcgcagcaggctgagctgcagaaaaacatcgataacgtgctgaaggaaaacgaggcgctgcgcaaacgcaacagcaatgtctccggtcaggtgaatgaagcggtggccggcttccagaaacaggcccagcagcgccaacagcagctgcaggagcagcaacagacgctgatggggcgtatccagtcactgacagatcagttggccagcaataaggacaaggcgaaaaacgacagcgacatgccgctggggttgggtctggacggcatgggggccggcagcggcagcgcgacggccggcgacgatggtttgatgtgggtcgggccgaaggatcagaaagaagtcgacccgcgtaacccgaacagcgccaaggaggggccgcagttcccgacgtccttcttgtcagacaatgccatcacgcgtcagaaagctgcctatgagcagcaggtcaaaggccgcaccaatgaaaaaggggcggaggagaatgccgagccggtgttcaccctgccggagaactccacactggtcggcagccgcgcgatgacggcgctgctgggacgggtgccgattaacggcacggtgaccgacccttacccgttcaagttgatgatcggcaaggacaacctgaccgccaacggcatcgaactgccggatgttgaaggggcgattgtctccggtaccgccagcggcgactggacgctgtcgtgcgtgcgtggccaggtcaacagcatcacgttcgtgtttgccgacggcacggtgcgtaccctgccgcaccctgacaccaacatgaaggccaacagcaataacaacagcggcaacaacgggaaggatgtcagcactaccgccggcatcggctggatctctgatgacagcggcattccctgcatcggcggtgaacgcaagtcgaatgcctccacctacctgccgaccattgccgccctgtcggccgccagcgcggccggtgacggtatcagccaggggcagtacaccacgcagaataacgtcaacggcattacgtcgaccatgaccggtaatgccgggcaggcggtgctgggcaaggcgctgtccggcgggatgaaagagacggcagattgggtgcgtgagcgttacggcatgatgttcgatgccatctatgtaccaccgggccagacgctggcggtacatatcacccgccagctggcgatcgactttgaaaccaaagggcgcaaggtgcgttatgacgacttcagcctgccgggcgaaggcggcggcgccggcggtctggactaa

SEQ ID NO: 103662 - DNA, 414 bp, Enterobacter aerogenes
atgaagacaatccgatcagccttggtcatgttggtgattggcgccgcgctgtccggctgctccacctcaaaggaagagatgttgccgccgggtgacagcacgatgctgcagctctggcaaggtgaagacggcggcggctccacgcgtaatgcggtggcggcccgggacagcctgcgccgcccgctgacggagagcgagatccaggccagtatggctgacgatcgcagctacagccgtacgcaggagagtgagatcagccagcagttcccgcggctgccgaatcccgatctggtgatgtacgttttcccgcacctggccgacggcagcacgccggtaccggggtacagcaccgtgttcccgttttacagccaggtgcaatacgcaatgccgggtgaacggacggaggcttactga

SEQ ID NO: 103663 - DNA, 2862 bp, Enterobacter aerogenes
atgcgattttccctgtttgataaaaagcgcctgacgcgcaaaaaagcggtggcgccggcggaggctgaaacgatgaccatcacggaagatggtgcgccgctgtcggtggccggccgcgaagcgctgacccgtccgggcaagatgaccgtccaggacgagaaaaaggtttacgacgccaatccgtccatcattgattatttgccctgggcagagtttctggatcatgagcagtgcatcctgctcgatgacggcgtctctgtcggtgcggtttatgaagtcaccccggtggcgacggaggggcgcaccaccgaccagctggagaagatgcgtgatacggtggaagacgccctgcaggattcctttgatgaacatgatcagaacccctgggtggtgcagtttttctgccaggatgaagacaatgttgatgcttacctgagtcgcctgcgcggctatatcaagtcgcatgcccggggttctcagctgaccgagtcctggttgcaggaaaccgagcggcacctgcggggtatcgcacggccggaagggctgttcaaggacaccctgatcaccgaccagccctggcgtggccagcagcgccgcacgcgcatggtggtgtaccgctggattggtaaaggcaataccgatccgatgccgccggttgccatgctgaatcagacctgtgaacggctcaccggcgcgttgaacggagccggtgtggcttgcgtgcggcaaaatggcgcgcaggtgcatgactggatgctgcgtcacttcaatccaaacccggaatgggtggataaaaataccctgtaccgtgaggctgcctatttcgacagccgcgatacgccggaaggcacgatgccggtacaaaacgattttgccgaaacattgtggtttacgccgccggtgtccgatccggaccacggcgtgtggtggtttgataatcaggcgcactgcgccattcctgtagagaagctgcgccgcgcgccggagcccgggaccattaccggggaaatgaagcgcggtgagaagaaaatcaatgcgctgatggacatgttcccggaggggacgatggtctgcatgaccatcgtggtacaaccgcaggacacgctggaaggcgattttaacaagctgtcgaaaaatgccgtcggcgagaataccgagtccgggcgtgtgcgccaggatgtggcacaggttaaggaatacctgggcaaccggcacaagctgtatcgcgccggcattacctttttgctgcgcgccggcgacctgacggcacttaaccacaaacgtgtggagctgacgaacgtgctgctcggcgccggcctgcagccggtgcgcccggagttcgatgtggcgccgctcaatacctacctgcgtgcactgccgatgtgttttaacccggagacggacaaaaagcactggtacacccgactgacgttcgtccaacaccttgccggcctgttgccggttaccggccgtgaaaccggcaccggtaaccccggcctgagcttttttaaccgcggcggtgacctgctgacggtggatccgttaaacaaggatgaccgcagtcagaacgcccatatgttgttttttggtcctaccggtgccggcaagtcggcaacgctctgtgcggcgacgacgcaactgatggccgtccaccggccgcgtctgttcatcgccgaggccggtaactcgtttggcctccaggcggattatttcgaaagtcagggactgacggtcaacaagatcagcatcaagcccggcagcggcgtgtcattgccgccgttctcgtttgcgcacaagttgattgaggagctcagctcactggagctggacgagagcgagctgcgcgatatcgatgccgatgatgaggacgaggataaacgcgattacctgggtgagatggaaatctcggcgcgcatgatgatcaccggcggcgatccgaaggaagaggccgacctcaaacgcgctgaccgggcgatgatccgcgaagcgctactgatggccgcacagacggcctatgatgagcagcgccagatgttgccgtccgatctgcagaacgcgctgtatgacatcggcaatgacacgagtaacgaaaagcgtaacacgcagcgccgggcaaaagcggcggaaatggccgaggcgctgggcatgttcacccagcctggctcctttgaggccgagctgttcaaccgtgaaggctcgctgtggccagaagcggatgtgacgctgatagacctgggacatctggcgcgggaagggtatgaagcgcagatggccctgacgatggtgagcctgaccaacaccatcaacaacattgccgagcgtgaccaatactcggagcgggatatcgtctttgtggtcgatgaggcgcacattgtgacggtcaacccgctgctgtcgccgtatatgaccaagatcgtcaagatgtggcgtaaactcggcgcctggctgtggctggccacgcagaacctgaaggatttcccggacattgccgagaagatgctcaacatggccgaatggtgggtgtgtctgaccatgccgccggaggaggtgaaggatatcgcccgcttcaaggcgctgacggctgagcaagaatcggtgctgctgtcggccagtaaactgtccaggtgttacaccgaaggcgtcattttgtcgaaaaaagtggaagcgttgttccgggccgtaccgcctagcctctacctggcgcttgggatgaccgagaaggaagagaaagcggagcgccgtgcgctgatgcaggagttcggttgcaccgagctggaagccgcgttcaaggtggcgcgcaagctggaccgcctgcgtggtctggttgccaatgacgaggacgcggggagccaggctgcatga

SEQ ID NO: 103664 - DNA, 405 bp, Enterobacter aerogenes
atgatgacgttgaaataccctgagcccgctgtccgtctccaggcggtgccgtcacagggcaccggcctctttactctgccaccccagggggcggcgaccatcagccagacggatgcgcaggcactcaggacgctgtgtgatgcgctccgtgagcggttgttggggcgggttgtgctgacagcacacccgcaccgtatcgggagccggaccagcgtggcgctgcatctggaaggtcgtctggggcaatctgtcgatatcctggtgacggtgacaggaaccacttcctggccacagtccgaggagtacgatcaccctcgctggtacattaccgtgccggacgctgcggatgtggtgtacctgctgctccacctgagcgatctgtgtgaacgttttcagatcaactag

SEQ ID NO: 103665 - DNA, 381 bp, Enterobacter aerogenes
atgcatcctgttttaagaaagaccttcggtggtttatccactgcgtactattgccgacagttcgtttttggcctggcgatcagtgcactgatcttgttcattcaaacgcgtgatctgcaggctcatccattggagtggggattggtcgctcttctggtgatcaacacggtgttatatccctatgcgcggttcgtctacgaaagcattgtcggcttcattatgggtaacaatatcttctgggtgaatgcgttgttcatgctgtttgtgaagttgataaccatggctatctgctggagtttcgcgatcttcatcgcaccagtgggtttggcttacctgtattactaccacacgaaagcagagtcgcgcgcacgcagtgagtga

SEQ ID NO: 103666 - DNA, 417 bp, Enterobacter aerogenes
atgcctgatttttcccgctgcgccttttctgaaggcagcgtttccctgccggatggctacagcgaccgcactgttaacgtgctgttacccggcgatgacttctctccttccctgaatatctcccgcgatgcgctgctgcccgactacatcgcgcgccagctcgaagcgctatcccagggcctcaaaggctgggtgctgaaaaaccgtgagccggctgtgctgggtaaaactcagctgcagggcgaatgcgtccacgccagctatctgcgtgatggaaaacgcgtctggcagcgccaggcggtgtttgcgctgcaggaagggcgcgtactggtgttcaccatggcgcatacgcgtaaattattgccgcaggatgatgccttgctgcagcaggttctggacagttatcagccggcataa

SEQ ID NO: 103667 - DNA, 4260 bp, Enterobacter aerogenes
atgggcgaagcagcacgcgtcggcgatacgattgggcattcccatgcgctggcggggatgattggcggcacgattgtcggtggcctgattgctgccgccggtgcggtggccgcgggtgcgctgttcgttgccggtctggcggcgtcctgtgtgggcgttggtgtattactggtgggcgccagcctggcggtgggctatctcaccggagagctggcggccaaggcgcgagatggcattgcggaggccggcgcagggagcctgacgccggccggcaagatagtgaccggctcgccggatgtgcgcatcaatggcaagccggcggccatcgccaccgtcagccaggtcgcctgcgaccaggacggccctagcatgcagatggcgcagggttcggacaaggtgtatatcaacggtcagccggcggcgcgcgtgggggataaaaccaactgcgacgccaaggtgatggaaggctcgcccaacgtgcgtatcggcggcggtaccgtcaccaccctgccgataaaaccggaggtgccggactggctgtataagatttccgacctgacgctgctgtttgccggcctggtaggcggcgtcggtggcgcggccagcaagctgggggcgctgggcaaaatgctcagcaaactgcccggcatcaacaagctggggcgggttgcctgccgctttggcacgctgatgaccgccacgaccgccgccggcattatcgcccggccggtcgatatcatcagcggccagaagttcctgtccggtgacgatgagctggactttgtgctgccgtcgcgcctgccggttgagtggcagcgctactggcgcagcggcaacccggcagagagcgtgctggggcgcggctggagcctgttctgggaaagcagcctgcagacctaccaggatggcctggtgtggcgtgcgccgtccggcgactatgtctccttcccgatggtgcccaaagggcataaaacctactgcgaagcggaaaagtgctggctgatgcacaacagcgatggcagctggcaggtgttcgacgtcagcgaacaggcctggcactacccggcgttgagtgaagagccaggcaggctgcagatgatgactgacctcgccggcaacgcggtttccctgttccatgacgaccatggccggctgaccgagctggtcgacagcgccggtcagcggctggcgtgtcgctacctgaccaccaccaacggactgtcccgcctgagtacggtgctgctgcataccccggacggcgaactgccgctggtgcactacacctacgatgaggaaggacagctggtcaccgtcagcaaccgcgccggcgaggtcacccgacgctttggctggcaggatgggctgatggtcagtcatcaggaccacaacggcctgctgaacgagtaccgctggcaggagcttgacggcctgccgcgggtggtggcctaccgcaacagcgctggcgagcagctggaactctattatgattttgccggcggcatgcggcgggtggtgcgtgatgacggccggcagtcgctgtggcagctggatgacgacgacaacgtggcgcagttcaccgattttgacagcagaaaatcggcgtttatctatgaacggggcgagctgtgcggcgtggtgctgccgggcggtgcgcagcgtcagagcgagtgggaccgttacggtcgcctgctgagcgaggccgacccgctgggacgcaccaccacctaccagtattcccgcaacagcggccgcctgttctcggttacctatccggacggtagtcaggcgtttcagcactgggacactcaggggcgcccgacgcagcagattgatgcgctgggcaacgtcacccgctatcactatcccgacgaggaagagagcctgccggaacgcgtcatcgatgcgctgggcggcgaggtgaaactggtctggaacgctcagggattgctgacgcgctataccgactgttccggcagcgtcaccgcctacgcctatgatgcgctgggccagttgacgcaccgcaccgatgcggaaggtcacctgacccgttaccgctgggaccgcgccggccggctgcagaccttgttgcatcccgacggcagcgaagagcagtttgcctggaatgcgcagggccagttggccgtacaccatgacccgctcggcagcgagacgcgctggcagtacaacctgctgggccagccggtcagtgtcactgaccgtatccagcgtacgcgccgctatcactataactgccgcggctggctgacgaggctggaaaatggcaacggtgccgattaccagttcagccacgatgcggttggccggctgatgattgaacggcggccggacagcatcgaccgtttatatcgttatgggcttgacgggcaacttaccgaataccgggaagtcgcaccgccggacgtggagccacagccgtccccgcggctgcaccagttccgttatgacgacgccggccagctggtctggcgcgccaacgacagcgccgagtggcattaccactatgatgcggccgggcgtatgaagcgcctgacgcgcaccccgaccgccgccggcagcgaactgggtatcgagccggacagcgtgcagttgcgctacgacaaggccggcaacctgttgagcgagcagggcgtcaacggtgaactgcagtaccagtgggatgccttgtccaacctgcaggcactgacgctgccgcagggcgaccggttgcagtggctccattacggctccggccacgccagcgccatcaggtttaaccagcaactggtgagtgaattcagccgcgaccggctgcaccgggaaaccggccgtacccagggtgcgctgcagcagctgcgccaatacgatgcgctggggcggcgcagttggcagagcagtgcattcgggcagataaccaaaccggaggagggcgtgctgtggcgcacgttccgctataccggccgtggcgagctggaaggtgtcagtgatgcgctacgcggagatattcactatggctacgacgcggaaggacgcctgctgcagcaccgcgaggcgcagcagggcaggccgggccaccggctgcgctacgacctggcggataacctgaccggggaactgcgcgtcagccgagacccggatgccgacctgccgccggcgccggtggtcaataaccggctcgaatactggcagcggatgttttaccgctatgacggctggggcaacctggtcagccggcgtaacggggtttaccaacagcattacgtctatgatgccgacaaccggctgataaaggcgcacggccgcggcccgcagggggattttgaggcgcagtatcactatgacgcactgggacgccgcacgcgcaagacggtaacctacaagggtaaagcgccggaaaccacgcgcttcttgtgggagggctaccggctgctgcaggcgcagcgggacaacggtacgcgccgcacctggagctatgacccggacagcgcctggacgccgttggcggcccttgagcaggcgggcgacggccagcaggcggatatctactggctgcacaccgaccttaacagcgcgccgctggaggttacggatagcgagggtaacctgcgctggtccggcaactacgacaccttcggcaaactgcaggggcagacggtcaccggtgccgaacggcgcaagggcgcgctcattgaccagccgctgcgttatgccggccagtaccaggataatgaaagcgggctgcattataatctgttccgctactatgagccggaggtagggcgttttaccacgcaggatccgataggactacgcggcgggctgaacctgtatcaatatgcgccaaacccatacggatgggtggatcctttagggttaatgccatggccaaacccaatacgtcaaggtcaccaccttatctataaacagaaagccaagagtattgggtgggatcaccttgcatccggtagtcagacgccgacttatttcttcagtgagccctatacgccaggtgcacatgaagcaattcatagagcgcaaaaaccacatgttgggtctgtgcaaggtgcctggcaaggcagtggcgatgagctcattgctgcaagtaaagcagggctgggtgaggtagattgggttaaaggtgatttgaaaataccagcaacaggtgaggttttagccaaaaacgtatcacctgcaaaagcatttgaagccttggaaaaatggcatcatgagaagataggaacaacaggaaaaggtgggtgttag

SEQ ID NO: 103668 - DNA, 411 bp, Enterobacter aerogenes
atgaaattatttccggaactctatggtttcgttgttttctctgaacagccgttgctgtctttcatgaaagagaacggtataggaaaggatttgctcacctttatgacgacgaatgatgaggcagataagctgaccgaagcggggatcatcctccctatttttgaagtgcctgaggggttatatgaggtgtccctgcagtgttcgcagcctgcggaggatacctccaaacttggtgtgttcaaatcagagggtaaattgagcatctgcggtatggggtacttggcggattttgatttagaagccttgcgtaacagagagaaaatccaagactttttgatccctcagggagtgtttgagttgtcctgtgccattgatgaatccaatgagaaaatttcattaattttggattag

SEQ ID NO: 103669 - DNA, 393 bp, Enterobacter aerogenes
atgagcctgatgaaattcgaagctttggtactggtatgttatgaagaggacgatgcgctcactgttgctctgggcgataatgagcagtcacctgtgaattatctaatcattactcggttggatgatgaagataatgactcaattgatgaggggattggcttgcaaacatcacagtccgcttatgaagcatcggcagccatcgagaaagtgattttgcattctgaccggttagatgtggttatcacgcctgattcacacgagcatttcggttgctcgaagctcgaaggtgtgttctctgaaacggtgcgtaatgcgcctgaaaaaatcgctctgttgcgaaagtatcttgaagcaattttcaacggtagcaagacaacccttatattttcatga

SEQ ID NO: 103670 - DNA, 405 bp, Enterobacter aerogenes
atgaaaatcagcacgttgctgacgttgttccctctgctgatgccggcatcggtgcttgccggcacggtactctataccgattctcaccatcccccgaccaacatcgatgcgtcggtatccgtgatttatcttgacggcccggagcagctgcagaagcaactgttcggcgagctgtcgtcaaaccccgatgaggccgagcgtcaggcgcaggccgtacttaaatccccgcaatggcaggcgaacgagcagcagctggccacggtctaccgtgcagtggtgcacgcctgggagctgggcgtcaaaaaagtgccggcggtggtgtttgatgacaccgacgtggtgtacggcactgcagatgtagctcaggcagtgtcattgcgcgctcaggcgcagggagggcagtaa

SEQ ID NO: 103671 - DNA, 1008 bp, Enterobacter aerogenes
atgcaacaccagcttcctgatacatcgcttcccggccagtcccgcctgaacctcaaatccctcggcatggccatgatgctgtcagtagccagcgtgccggcagccaacgccgcgctgaacagcgcgcagattgttgccagtgccgtgtcgcaagcctgtatcagctggcgtgtcagcggtatctgttactggctgttctgcggcctgcacggctgtacggtgcggacttcggtcaaagtcacacatttcattccggaagcggtggtctcgacctacaacagtcagggtggtaatccctggcgtgagatgtcgatggtcagtcaggcctccggcggcctggaaagcagcattaccggcgcgctgagcggtgtctctgccggcggcggtaataacgagctgaaaacccccggtcagcgcaagaccaacctgcatttcaagtacgctgatgccattggccacccggcgacgtccatcattggcggcagtatccccgggtattcctgccgcagtgccgccatgccgttcgtgccgtatttcctcagcacgctcgacagcctggcgtggcgtaccggtatgcccgaatccctctatccggaagccctggtacctggccaacgcgagattggcagccagggcggcgccaacatgtgggggaacgtctatccccggtcggggttcgtgacccaggttgatgacgacaaggccggcgccgtcgtggcgcagcgggtggctgacatcattacccgttctggtcagcctcacgtctaccagccattggtgggccagcgttcggaagggtactggccgccgggcgccgttcaggagaataccggcaccagcaaccacaaatggcagcgtctttcaccgcagttgagccagtcctgtgcggtcttcccggacggagaccatccgccggcggcagatgccaacgccgcctttgccttgtggcaaccctacagctgctgccagcgccgcgggcagcgtttcctctacagcacggatttctga

SEQ ID NO: 103672 - DNA, 1485 bp, Enterobacter aerogenes
atgaataacacgatgcatacatttttacagggacggcgcagtctgctgtctctgctgattgccggcagcctggcgttggcaggcacaatgagtgcgcacgctgatgacaatgacgacaacggtacgctgtttggcgtttcgctgccgcaggtcaatgacagcaatgtcgggtatgggaaaagcgccagcggcgcggtgtccgacaagctgttctactcgctgggcggcggttcggtgatttcgcagccggcgacacgcggcaatatgcagcggctgggcatgaacctgggctggagctcggacctgatgtgcggcaacttcgacctgaaaacgacgatcggcaaccagcttaacggtgtcaccgacgggttcaagaacctgatgagtgatgttatccagggcgccaccggtgcggtggccagcctgccggcgatggccatccagcgcgccaacccggggctgtatgaaatgctgaccaacggggtactgcagggcggtgttgctttcgacaaggcacagctcaactgtcagaacctttccaaacggatgatggacatggcggataccggtgcctggagccaggcggccgcgatggaagaggccaaaagcctggtcaacagcagcggcggcgatgccgtccgctcgatgaatgcgacggagaaagtgaccggccagtccgggcagacctggatcggcgggcagaaacgcggcggctctggccaaccggccatcaagccgacccatgacctggcggctgccggctacaacatgatgaatgcgctgcctgtcaccagtacctccggcgtgtccggcagcagctgcacaggcggcgcctgcgccaaatatgccagcagcgaggaggccgccgctgcggtggtgaaggtcctgggcgacacgtcattgcgcacctgtaaggacgcgtcgcaatgcaccagtggcgaaggcgatgagcagccgggcagcaccgtggccggcaccggttttgctccgatgcttgaggaggccaccaaagccaacaatgagcagctggccaaactggttaatggcgctgaaaaaccgacggcagcgaacctggccaagctcaaatccggcagcctggcggtgaccgccggcgttgtgcgtgcactgcagcgtgacccggacaatgctgccctggtcgggcgtctcgccagcgagctggcgatggccgataccattgagaccgccttcctgatgcgccgcatgatcaccaccgggatgtccgaaccgaatgcggctgcgcagaaggtggcgatgcaagaaggtgatcgccgcatcgaagcgctcgatcgggaaatcacggcactgaaaaacgagatggagatgaaacgggagatttcccgcaatgcagtgctgaccattatcgatcgcgagaacaaccgcgctgaaaccaacccgcagcgtcagtccgcagacagcccggataccaagtttaatcagctggccgtaccggaaactgaccagtga

SEQ ID NO: 103673 - DNA, 372 bp, Enterobacter aerogenes
atgactgaatcagagaagaaagacctgctgccccgccggggcggcaggcttggtcggggcgcgaaacgcgccctgcagctgcttgccatgcttgtggtcgccatggtcatggcgctggggcttgcacactggggcgttactcaccccggtgaaaccgcagcgctgcgtagctgggtgcatagcacccgttacggctggctgttctggcgcctggcgctttatgcggcactggcctgggcattctggaaaatctggcatgcacccgtggttaaaccggaacatcgtcagcccctcaagcgtatggtcatcgcgtgcgcgctgtttgccctggcgtgtgaatactccatctttggtggagggctgacgctatga

SEQ ID NO: 103674 - DNA, 1539 bp, Enterobacter aerogenes
atgatgaccaacagctacctggagtatttcctgacgttgctcggctggatcgtgaacaacggcctgtgggagctgctggtcagcaccgggctgtttgtgctgccgctgctgttcaaggttgtcggcatctggctgaaagtccgggaggagggggaagatgaaggcaacaaggggatgctgtcgctgccgcgcatcgagaacctgctctatggggcatttttcgtgatgattgcctgctgcctgccgctgatgaacgtcagcctggacaccatcaagtatgacagcagccgggcgagcacctgcggtacctggacaccgaagaaaccggatgaaaccgggtacgccagcatgatgtcgagcatgaatggccagacagcaaaagtgcccgtgtggtggctggtcgtccataagctgtcgaaggggattacgtctgcggctgtggccagcattccctgccggccagacctgcggcaggtgcgttttgaggtccagcacagccgggtcaataacccggcgctggcgaaggagctgcaggacttcaccaacgactgctacgcgctggcattgtacacctggcagaaccgtgaccaggggcagacaacggacaaggcgacgctgcgtgatatcgaatggctggggtcgaaaaccttcctgaatggcgggtactacaacaacctgcagtcgaagacgccgcgtgcgagcttcccatggaacgaatcacgggatagtggccggccgaacaccggccggggtgggtacccgacttgcagcgagtggtggtcggcggccgataccggcctggaagcccgggtggtgaagcaggttgatccgggtgtgatgctgcggatgtccgctgcgctcaagatgatgggcgagaacaacgccgactacaaggaagcagtggtacgtcgcctggtcagcccggataacctgacggtttcccagggcgggcgcgcttatgccggctatggcggcaatgcggacttcactgggagcaacacggtgacacgtatggcctcactcggcggcaccgccctggggagcctggcggctttcccggcctttgatgcaatgcgccaggccttgccgatggtgcaggcggtcctgctgatggcggtgtatatcatggtaccgcttattctggcctttgcggcctatgagtacaaaacagtgatcaccgtgacgtttgtggtgttcgcgctgaactttctgacgttctggtgggagctggcgcgctggctggacagctgggtgttggaggcactttacagctcagactcgcacagtcgctggaacgtggccggtttccaaaacagctctgatgacctgatcatgaatctggtgatggggactatgtttattgttttacctgtcgtatggatgggggctttatcttgggctggggtaagtgttggtgcggccttagctagctctatgaaaagtggaacagaaatcgctcaaaaatcaggaggaaaggttggtgaaattggtggcaatgcagtgggcagtgttgcaagcaaaggtctgactggtaagtag

SEQ ID NO: 103675 - DNA, 405 bp, Enterobacter aerogenes
atgaacgatacaacacaacaccacgcctatcagcgcggtgtgcgcatggcaagtcgatggaagcaccttaagagtaccgtcctgaagtgggatcgtgcctgtgtgtccaaagctcagacagtaaacctccctaaatgggttggacatattccaatcatagcgttcactgtaaccatactggctgcgcttgtgttcggcggggtgattatctcaatgtcagcggtacttttagcttcagtggcacttattgtcggtgaagtattttctgcaggggggatagaagttgaaaattcagatgacagtgcaatgccatctcattgttttgatgaagatgaatatgtgactaatagcatcttgaatgacgattacgatggctccccatacaaatctccaggaggagactga

SEQ ID NO: 103676 - DNA, 237 bp, Enterobacter aerogenes
atgacccactcatacaacctggccaacttgtccaaagaggatatggataaggtgaacgtcgacctggctgccggcggcgttgctttcaaagagcgctacaatatgccagtgatcgccgagctggtcgaagctgagcagcctgagcatctgagggcttatttcaaagaacgcctggcacatcatcgtacgcaaaaagacaggcttggtcgcttgctacctgaggaaccaggcaaatag

SEQ ID NO: 103677 - DNA, 453 bp, Enterobacter aerogenes
atgtatctgatggcttataccgcccttgaaatgcaagcagattcgcagaagaagagggccggggtcccgatttttggtgacggggtatcgtgcggcttcccgtcgccggcgcaggactatgtcgaaaaacgtctgtcgctggatgacttctgtatccgctacccggagagcacatacctggttcgtgccgagggtaattcaatgcagaacgccggcattcgtgacggagatctcctggttgtcgagtgcattcgccaggcgcgccacggtgacattgtcattgcggccgttgacggtgagttcacctgtaaacgactccagttgctgccgatgccggcattgctgccggccaacccggaatattcaccgatccccctgacggaggatgtcgacaccgtagtgtttggcgttgtacgccatctcgtccacagctttaaatcgcgggattcctga

SEQ ID NO: 103678 - DNA, 657 bp, Enterobacter aerogenes
atgatttcgttaatcaataagttcagtattcttctttatggggtcgcttccattgcactctttaagttctttcaagacagcattttattaaacctgtggttactgaagacacttcatctcactttcctggaattatccatcaccaaaactgtaataggtatagtatttgccatatcactcgttaacgttctaaataattcccttcaggataataaaatatcacctggaacaatcaaccttcgatcgacctggtttgctcttgcgatccttgcctcttacattgcaggatattacttaacgccagacgagccttatatgcaaaacttcttaaaagggttaagctctcaagagattgctgtaaggatcattagcacaatcatactcacccctatcttggaagaattaatttttcgcggaatatttttgagttcattcctaaacctactgggtgagagattagggtacattgctggcggggtaattgtatcaacagtattcgcatggatgcatagccagtattctattcaaacacaaatactgatgtttactgtatccattattttttgcgcagccaggtattatagcaaaggtttagcactacctatcgcgctgcacgcattatgtgttattattggtatcgccagcgaatatatctaa

SEQ ID NO: 103679 - DNA, 990 bp, Enterobacter aerogenes
atggactgggagacgctgcttgaggaatattttttctcaaagccgttacgaccagatacggagaaaagctatcgcggtgttgtggccgttttccaaaagtttattggcgaagataagttgccggacgaggtgacgcatcgtgattttattctatggcgcagggacatgcttggacgagggctgactaccagtacgtggaataataaggtgcgccaccttcaggcgctttataaccaggggatcaagaaaaaatggctcttgatatctgagaacccggttaaggaaacccaggttcctcctggtagtaaaaggaaaaggttgctcaatcgtgaccaactggtgaggctgaatctggtgttggaacaatttgaaggacaggaaaaattgagtgttggcaagaatcgtccatgcgctctttaccctgtatggttctggaggactgttattgacgttctgcgttcgactgggatgcgacaaaatcagttgttacatattcgtctgatggatgttgatatggaggcaaactcgatattgttgtgcagggaagggagtaaaacgcatcgcgaatggcttgtcccgatagtcggctttgcgcgtgaacggatgcgaatattaatcaacagggcaatcaatcagggggctgagccggaggattacctgttcgatgtggagcggtttaaaaatcctctgggggaagtaggccctgaacctgaaatacaacctgtacgatcttttttcacacgactgacaaaagagtgtggttttaaggtcacaccacatcgttttcgacataccctggcgacggaaatgatgaaatctcccgatcgcaacctggccatggtgaaaagtcttttggggcacaggagtgtgagcaccactatggaatatattgagctggatctgaagataacaggacaggcgttagaaagtgaactggcgctttatatggatataccccgaataccagcaactggtcccggggtatcttga

SEQ ID NO: 103680 - DNA, 1770 bp, Enterobacter aerogenes
atgctgaaggcgatcaaggagctgctgatcggcacggcgccgaccagggctaaatcctcctctgtggcttcatcacctgcaggaccggcagggtatttcatgccgcagtccgccacgcagctgctggatatgccggcccgtaaacagtgcctgcagcagctgtgggaaaacagctcattgccaaaggatttgtacgagcagttttatctgcagccgctgcatcacctggtgacgctgatgcaacggctgccggcaaccaagcaaggtgagtatgccaacgaagggggcctggtcgatatcacgctgcagacgacgacctttgccgttcgcctggccaaggggcatatgttgccgccaggcgccgcacctgaagatcagtcagcgcaaaatattctgtggaacgcggtggtgttttacgcggcgctctggcgttacctgccacaactcgcgctgttcgaaggtgagctgcagactgggcgcccgtggttacccgggttgactgttcctgccgaaccttaccgttttcggttcaaaccggtggttcctgagcctgttatcacggcaagccaaagcgggttaatagcgtgtaggttgttgccggcggaggtggtcaactggctgtctaccctgccggctgcagcgcaggcagtgatgctgatcgcctcacgtcagccgagttcgctgccggtgatcgatgaaatagtcctggaggctgtccagctggcgcgcggtgatgccattggcatggcggcgccaatggtcgttactgctccttcctcttctatacccgtgccggcagagacatcgccagatcctgttggtgcacctgctgcgcaggttgtgttggagagcagtgtacctggtgccgcagtccaaaatgttgtgacgggagaaacggctatcactaacggccagaaagagggggctgacactgccgccgcagtctgctcggaagaagccatggctgttccatcgggtgatgtgttgctgagttctgcgctggatacccccgtcaatgatttgccgctggccgagatggttgttgcacccgaacctgctgttgaggttgaggaggatatgcaggcgttgctttcgctgatgaatgtcagtgtatctgcgccggaggctaccgagatgcaggctcaggaggacgccccccacgaggaagatcctgattttgcacaacgtgaacgaccggcaacagatttcctcactgtagcggatagtgagccggaagtgccagaaaagacaccaatcctgacggcaagcgctgccccctctgaggatgtcgttgcccgtgcagaaacagcgatgcctcaatcgcctcctgaacaagcggaacctgggacagacaaagaaagcgcagtggtcagtggggaggttgtacctgcctccgatgagcattccggagaactgttctggcagtggctgagcgccggcctgagttcaggagacatcccgattaatacggtagaggcgagggtgcacctggttgccgggttcgtctttatcacggtacctggaattttttacctctatctgaagcaaaccggattagccggcgatcagcgtgaagcattacaggatagtttcgagcgcctggacaagcatcgccgcgtgaagggtaagcgtttttattttgcggagttgtatgccagctcagaacgcaaaggatctttcaagcgaacgaaagggtatctcattaaagccagtttactctaccgaggcgtgcccgtacctgacgacagtccggtactggttatcccttga

SEQ ID NO: 103681 - DNA, 1455 bp, Enterobacter aerogenes
atgtcttattctgatacgcctgaacaggccgctattatcggctggtctggtcatcgcctggtcgtcaaagcgttttccggcacgggcaaaacgtctaccctggtgcgctatgccctggcgaacccgaacagcaggatgctctaccttgcgtataaccgcgcggttagggatgaagccgaacagaaattcccgttcaacgttgagtgtaaaacgtcgcatcagctggcctggcccaacttcggccgtcattaccagaagcggttaacagggaatctgcggatcaccgacgttgcccgcctgctcaatacccgccattggccgctggccagaacggccatcatggccttcaacgcctttttgtgcagtgccgaccacgaattgggggcgcaacacctgccggatgaagatgatcgcagcgggttatcagcagaccggatcctggccgctgcacagcagctgtggcgcgaatctgcgcgccaggatggcacgttcccggttacgcacgatgtctatctcaaactgtatcagctctctcagccagatctctcaaaacgctggcaaacattgctgtttgatgaagcgcaggatgccaacccggtgacacagagcctggtgcttgcgcaggactgtaatgtggtgctggtcggcgatcgtcatcagcagatttaccgcttccggggggccgagaatgccctcgatgtgccggctctcagcgatgccgaacggctgaacctgactcacagtttccggttcgggtctgcggtggccagcgtggccaacatgctgctggcccgccagggggaaacgctgcccgtggtcggggatggcggggaagacgcggtagtcacacgtctgtcagacgagtatcggggagagcacgtcacggtattaagccgaaccgttgctggcgtgatcggggcggcgctggatgccagcctggcaggacaaaaggtgttctgggtcggcggtatcgccggctacaagaccgaagaactcgaggacctgtactggttctctgcagacatgcccgaacggatgcgttcgccgacgctatcacgggaataccgtaattttgacgagtttgagtcggtggccaaggccacgaaagatccggacatgaatcagggcctgcgtttgctggatcagtatttcccgttgccgcagaaactgcaggtaatgcgtgagcatgctgtcacggatgaaactcaggctcaggttacggtgtcgacggcgcaccgcagtaagggtttggaatggccggtggtcgtcctgaacgaagactttgccgacatcaccgacccgatgttgcctgatgatgaacgtaccgatgaaaccaatctgctgtatgtagctgtcactcgcgcgcgacaagtcctggtgattaacgggttgctgcaggtacttctcgacgaagatgccgctggtgataaggaaggggacatgccggcatgctga

SEQ ID NO: 103682 - DNA, 828 bp, Enterobacter aerogenes
atgaataactacaagatgcttgttgaaagtctgaaacagaaagtcgcccgtgatgaaccgattatcggtgctggcgctggtactggtctctccgcacgcagcgaagaggccggcggcgttgacctgatcgtcatctacaactcggggcgtttccgaatggctggccgcggttcactgtcggggctcatgccgtatggtaatgccaaccagatagtgcgtgagatgggcgatgaagtcctgcccgttgtcaaaaagacaccggtgcttgccggcgtctgcggtacggatccattctgcaatctttcaccgttcctggacgagctgaaaacccagggctttgccggggtgcagaacttcccaaccgtgggccttatcgacggtaatttccgcaagaacctggaagagaccggcatgggctatcagctggaagtcgacatgatacgtctggcgcatgagaaggggatgctgaccaccccgtacgtctttaatccggacgacgcggtggcgatgactcaggctggtgcagacatcattgttgtgcatatggggctgactaccggcggagatatcggtgctgaaactgcgcatgacctggagtcttgcataccgataatcaacgcctgtgcctgggcggcgaaagcggtacgtgatgacgtgatagtgctgtgccacggtggtcctatcgccaggccggaagatgcggcgtatgtcctggcgcattgcccggactgtcacggcttctacggcgccagctcgatggagcgcctgccaacggaaatagcgattaaaaataccgtcgaagtatttaaacaaataaaacggaattaa

SEQ ID NO: 103683 - DNA, 1257 bp, Enterobacter aerogenes
atgtccagttttgtgtatgtcatagggactgcagacaccaagctcgatgagctggcctggttgaagtctcgtttacatgacgccggcgtggattcacacatcattgatgtgtccactggaacgtcatcagagttaagtgaaagcaacaagatagatattccgtcgtcccagatcgccgagtatcacccggaaggcagcaaggcggttttctgtaatgaacgcggtcgggcggttacggcgatgtctgtggcgctgacgcgctttcttcgcagcacctcggaggatatctcgggcttgattggcataggcggttcggggggcacagccctcatatcgtcagccatgaagtcgatgccgataggcatacccaagctgatggtgtccaccatggcgtccggtaacgttggcggctatgtcggtggtgtggatattgccatgctgtataccgtgacggatctcagcggcctcaactacctgtcccgcaccattttgaccaatgcagccaatatgatcgccggggcggttaatcatgttgctgtgcctgaccgcgcacaacggccggtgctgggactgaccatgtttggggtgactacgccatgtatcaaccagctgatcgctgtgctgaacgaacagtatgatccgttggtgttccatgccactgggaacggtggtacctcgatggaacggctagtcgaaaatggcgagatagtcggggttattgatatcacgttgaccgaagtggccgacctgttgttcggtggcgttctggcctgcccggaaacgcgactcgatgttatcgcccagaccgaagtgccctgggtgggcagcgccggcgccctggacatggtcaacttcgcagagcctgacagcatacctgagcgttatgctcagcagagaaaatttgtcgagcataacgctcaggtgacgctaatgcgcacaacaccagaggaaaactaccagctcggcgtgtggattggggaaaagctcaatcaatgcaatgggcctgttagtttcttactaccagaaggcggattctctgcgcttgatgctcctggccagccgttttatgaccctgacgcacgacgggcgtttgctgacgggttggagaagactgtgttacagacgagccggcgccggattatcaaaacgcctcaccatattaacgcacctgaatttgcagcacttgtgattgaggagttcaacgcagtcatgcaacaccagggaacccctcatcactcaacaccagggaaactttaa

SEQ ID NO: 103684 - DNA, 612 bp, Enterobacter aerogenes
atgcagctctttgacgaagacaacctatctccagtgcgccgcagaacgcttgagcgactcacccatgcggctctcaagctgtatcaggaaaacaaattcccctcaccggaagagatcacccgtgaagcggaatacgccaaggtgacgctccgtagctacttctccacacacagcgaatttgtagagtacgtggtaaaaagggttatcggcgcgttcgaaaaaccgaagatgggagacgatcccgaagaaaatattgccaggttgctgagctggggatatggcgagctaaactcccatgaggctttgatgcgtgatgctatgcgcatttcacaacagcgctggcagagcctgcatcaggatgaggagcctgatgaagaaagcagcctgctgaaaaagagtaatcgccgtgaagcgctctctgaagcgttagcaccgctagagtcactactcccaccggaaaaagtggaaaagctggtcatgctgatgtcggtcctgtatggcacagaggcgatgagcatactgaaagacactttcggtctcgataaagacgagatcatcgatctgaccacctggggggcacaacttatgatccggcaggcagcacaggactaa

SEQ ID NO: 103685 - DNA, 336 bp, Enterobacter aerogenes
atgtttcgaaaaatcgggctggctattgtttgcgctgcattttcaggctctgtcttggcaggaaatataagcaaagatgttgaaatttctgatctcacaattgccaacactgtgaatgggatgaaagctatcgctgggacaggcaccaataagaccgaccatgaactcaatacggtcgtatttagattcaacctactccaaaatggcgtgatcattggcgaaactgggggggtggcccataatgtcgcaccaggtcaatcctggaagatcacatccccctacgacacaaacctcaaacctgacagtttccaggtgacggaagtattagtaaattaa

SEQ ID NO: 103686 - DNA, 678 bp, Enterobacter aerogenes
atgcctggactgattaaccatgaaaaagctttcatttcactgttcaatgagacggcgcggtatcaccggcgcgccaaggtgtttgaggacttcgtcagctgcagcgtcatcgcgctggagaaccgtctttgcttcaaccaaaagcgggaggacaagtacctgcagatcgtcaaaggctatgagaaaacggacgtcagtcgcatggcgcagctgcttgccctggtgtcgacgagcatgatggaccaattcaatgatttcctgggaaaggtcttcatgcagcttgacctgggggacaagtaccgcggccagtttttcacgccgtgggacgtcggcaggatgatggcgcagatgtctctgggtgatgttaacaccatttttcgggataaaccgttcattacccttgccgaaccggcgtgcggcgccggctgtatggtactggcctacgccgatgtgcttaatcaggcgggctatctgtcacaccgccacatgtgggtgtcagccactgacatcgatccgctggcggccggcatggcgtatatacaattgtcgctctgtggtgtagcgggggaagtggtgatcggcaactcgctgcataacgagcgtcgccgaatactttatacacctggtcactatctggggaactggccagcgcgcttgaaatcgaaacgggtttcatga

SEQ ID NO: 103687 - DNA, 927 bp, Enterobacter aerogenes
atgtctaactggtgcaaaaatcgtctggttgttaccggccagtctgtgtttgtcgacgagctgcagcaatgggtgaatggccatgtcgttcctgactaccgccatgccatccagcagagttgcagaatgttcctggctggttgtgccggcatcttgaagccggcgacggtaaaaccgggtgtttatgtcccttaccctggtttgctggcacatcccggcgtttcgtcagtgcagaacctggcgtttgaacagtggttttggctgctgaaagccgatgcaccactgacggctgaaaatatccgtcagattgagcggctctacagccagtccgggatagcgtcagtcaagtgggagaacattccaccacttgcccaggcgcgaatagcggacgtcatcgagcgccagtttgccgactggttcggcattgtggggcttgatggccaggtggatgccggcagttgctgggagcggctcgggaatatgcccgagtataccgtgccctgcgacatgctgatgttgatccccacgcgtctggcgacagagctgaacggggccggcggcgcgctgctgcgtgatgtgccggcaacggttgatttgtacgggcgtcagtatggcgttgaatggccgtgtggccacaacgtcggttgcgtgcgtgacagtatcaatgttctgacggtgcactttgattctccgtggtacgcgccggcaggcgaagtcattggggagctgtcaaagcagtttagctgccaggttgaacacagttggcatatgttcgacgccggccgcagcggttacgaccgttacgaccatggcgaacatgtcgatggcggccggatggagccggaagtcctgggcggtgaggtgatccagttcacctacgccgacaaggattctacgcctttaccacccaatgctgcagcgagttaa

SEQ ID NO: 103688 - DNA, 267 bp, Enterobacter aerogenes
atgaccgaggaacaacaccactggcagaccgttgccggcgtacttttaagtcggcattacggactgacgttgaacgacaccgacctctgtgaagaggtctgcgtcattactatgcaggaggccggtttacggccgtatgaggcgattaacgatctggctgagaaattcgacctcgaacgtatcgatgtcaatgactatcagcagttgtcgccacccattagcctggcccatgagttacggattttacgcgaactttccggccactga

SEQ ID NO: 103689 - DNA, 1014 bp, Enterobacter aerogenes
atgaaaaagacatcatcatcacggccagcgaaaaaacggcctgaacgtcccgacctgtatcagcaagtgacggacaaaatcatcgccgccatcgagcgcggtacgctgccctggcgcaagccgtggcagacggaccgctcccggatggcacaaggttcggtaatgccgctcaacggcaccaccggtaacttttacagcggcgtcaatgtgctgctgctgtggttggctgcctgtgaccatggcttcagctctaatcgttggctgacctatctccaggcggaagccgccggtggtcatgtgcgtgccggcgagaaggcgacgcttgccgtggtcttcaagccctgggaaaaggatgcgaaggatgccgacggtcggcagctgtttgacgacgaagggaacgccctgaaggagcgtgtctcgatgctgaagccgctgtacctgttcaacatttgccagtgcgacggactcccggatgacgtggttggcgcattgccagcagacacgccgggtgaggacgacccacaggttgatgagcgaatacaggcgcaggtcagcacgatggttgaggactgcggtgttcatcttcagcatgtttaccagaacagggcgttttacaccccgagccatgacctgattgtgctgccggaagtccggcagtttaagacggaagcggactactggtcgacgttattgcatgagctggtgcacagcaccggtcatgcgacacgtcttaaccgggaggggataacgtcttcttcacgtaagcggggtgacccggtctatgcgtttgaggagctggttgccgagctgggcagtgcatttctctgtgcccggattggcgttgccggcgatgtccagcatgagagctacctggacgggtggctgaaaatcatgaaggaggataaacgtgcactgttccgtgcgagcagccaggcgcgtcaggcgaccgaatttctgttaatgccggtggcagaaacagaaacggtaaagactgacgccgcccgggcggcctga

SEQ ID NO: 103690 - DNA, 603 bp, Enterobacter aerogenes
atgttgcactttgaccctgaggcattgcgcctggtcgtagccgaagttaaggccaaccagtgcgaactggcgttggccaaagacgacggtgtttacctgatatcagcagtggccgaacgtggcgatacgggccgcgtgaagcacatagcatatgccgacggctgtcatccggaaaaggatgacgcctggtacgaaacctcccgcgtgttggtgggaggcgacgacttttgtgagcatctgcaactgaccgacgaaagcatggaacgaatactttcagacggctttgagctctggatacacgtgctgcacgaccagatccatgtgcatgcgtcacccgtcatctgggtgccggtggccgagtaccgtcatatcattaatcgcatgcagcgcctggcccatgtccattaccgggcatgtgtcggcaacgcggagtacaaacgctggcgcgtcagcgccatcgacctgctggcgacagccagtcataccgacgctaaacgggcgaagccggacgacagggaggagttcctctcgatgttcgaacgtctgtatcacctggccgacacggttaatgcgcaaggggcgctccgtttccctgctcgctaa

SEQ ID NO: 103691 - DNA, 486 bp, Enterobacter aerogenes
atggggcttgatatcgactttttccgtcagcgtaaggctgactatgcaatgttgccggtaaacggcgactggacacccgttggtgactgggtgccgtgttcaccagcgtggctggaggacggcggtaactgtgaacaggcgccgcgaatatacaaccacaaaacgtgtaatcactaccatccgccgctgctggttaacacctgtcattttcgcgggtttactgcattgatgcactgggtggacaacagtgtcggggacgtcaaaagcggtgagctgatggcgttcgaccgcaacgacgtccagatgctgcagatgctgttgtcacgattgaatgaagcgaactgccatgaggagttccccgatgactctcgcgactacggcgatgtgtactggatgcttgtcaactcactgaaaacgtacgttaacagcgtactgaccggcttcgattttagccgggatcacctttacttccgggcatcgtggtaa

SEQ ID NO: 103692 - DNA, 549 bp, Enterobacter aerogenes
gtgagcactaccgtgtattttgacgcaccaccgtcccaggacgcgtggattgattttaccctggcggtgacagagatgttctggttgctgccggcatctgcacgacctgcaggtattgatgtcgcggggcagctgtttgccggcggcgtatttgcaggtcctggtatccgtctgtcgtcatggccggccgataacctgcccgtgcagaagattgtccccggggatgaggcatcggatttctttcaccgcctggtactcatcctgatacacaacctgtgtcctggatgcgtgcacattgagcgggagttgtccagccagtcaggctgggaacaaccgctgatttggctgcgtcatcatctgcagcgtccggcgctttcagctccgggatacgttgacgctgcggcgatgggggatagctcgatccgtttgcaccttgaacggtatcgggacagtttgtgtcatgccgaccttccgtaccactggcaagtgattacgtggatggatgaggtgttgtcccaacgcagaaagttgactcaacgcgtcgcctga

SEQ ID NO: 103693 - DNA, 369 bp, Enterobacter aerogenes
atgaataccactatcgattacctgaaaacccctctcgatatgctgcgctacttgtgcctgctcgaaagcgagttgatgagcgcgcgagcgttccaccggcttggttttgatgtggagcgcgatccggcaagcggtatgacgctcgttgaggttgccgttcatagcgccggctttgcgtttgggtatttcctgtttgctctgcagaagagcgggttacctgcacttcccgataccggaaaggatgtgatgaatgtcctggacaaaatagggaaggaagttaacgcgtcagtctgggagcgcgctgtggcggagggtaaacgtgacagagagtctgatgaagtgattgctgcactcgatacagcgtattga

SEQ ID NO: 103694 - DNA, 381 bp, Enterobacter aerogenes
atgaatacgcaaattaacatccgcacgaatgttttcgacctcaagacgtcccaggacgtgcttttctacctttgcgctattgaaggtgaactgtataccgcaagagcctatcgacgactcgggctcgatcaggagcgggatgaacctcgtgaactgaccgacctggagaataaggttatcagtgtcggtgaggctttcgggttatttctctactacctgcagagggatagattgccgacgttgtctgatgctggccgggaagtcttgagcaacctggacagtctcggcaacgacgcccacaaagaagcgtgggcgtggagtttgtcctacggcaaggttaacggtgaggctgatgaggccattgcggcgctcggtttctga

SEQ ID NO: 103695 - DNA, 294 bp, Enterobacter aerogenes
atgaatggtatttcacttgtcgccgccgacagtaatgaatggcattacatgtgggcagaattagccaaacgggcagcaaaccgtgaactgccggatcccactgtcgctgagaattttggtgaagtgtggcagtacatggagacgcaggaagtcaactcattttggtcaggaaagcgccgggtccattgtttcaggcacaggctgcatccagtcaaaagggctgactatcggctcaagataccggcaagtcggggttttgagtctgctgatttgcagcctgcttttcaacgttag

SEQ ID NO: 103696 - DNA, 339 bp, Enterobacter aerogenes
atgtctgtttttacttcttcagctgttcctgatttcatctcaaccctgcaccgtgtcatatcggccgtccagcgaataccttttcgtatggcgccgccgcggtttactgactggtacgtcaatgcagcaggtaattttgccgttcgcgcgcatgttacctgcagtgatgaagggtcggtcaacgcggtactgacgttgcgcaaaggttggtacagcggtgaatatacctactcaagcacccgtgttgcattgccttgcaagcataccgagcgcagaaaggcttaccggctcgcctgtcagcaggctgagcatctggccagactgcgttatcgcttctaa

SEQ ID NO: 103697 - DNA, 423 bp, Enterobacter aerogenes
atgcgtgatgatattttgatgacggtagtatcgattaaacctgtttatgagatcattctgggaagtgatgaatgtagtgaagttatcattagttttaaatgtgtaacaccgctgggtgaatctgatacatgtgcaatgttggcaagatattttggtgatatttattttgaggagggggacgatgacgcttttatccctaaaggtggtgtatttgatatgcacggtgtaatcagagttcctccctctgagaagacagaactgattgcgggtgctgagttctcgatccctatttcctccagtttgactcgtcagattatctctcaggagtatgacgctgaggggaaagagagtgttaacgaaatggttgataattggattggcgatctgttcgataagcagggtaacttgattattgataaatga

SEQ ID NO: 103698 - DNA, 210 bp, Enterobacter aerogenes
gtggatgagctgttagacaaagcggcgactaccatggatgacaacgcgcgtatcgctgaatatgtggcggcgcaaaaggccattatgcacgacgcaccgcatgtgatgctctacttccaggacgatctgtacgccacccgcgccaccattaaaggcgtgcggatggagccgggcggcgaaattatcgttaccgaagcgcaaaagccataa

SEQ ID NO: 103699 - DNA, 522 bp, Enterobacter aerogenes
atgaaaacgctgtccttactgctgtttaccctccttcccctgaccggccatgctgacctgaacgtgattgctgacctgggcggtcaggatgcggccccgtattttgaagccgttaataaacagcccggcatgagcacggaaaacgacaccgcaccttcacccccgtcacctgttcttcagggcgaagccgccatgctgccggtgttcacaccggagttgcgcccgggcagcgtggccgaccagccgctgcagctgcccggcataggggcgttgtttctgatcggggatgatgccctgtcccgtgactggcttaaggccaatgccggcgcactggctgaacagcatgcggccgggatgatagtcaacgtcacagacatgaataccgtgcgcgagctgcgcgagctggcacccggtgtcagcctggccccggcttccggcagcgagctggcccgtcgcctgcagattgcgcattatccggtactcatcaccgataccggcctgacgcagcaggttaagccgtaa

SEQ ID NO: 103700 - DNA, 489 bp, Enterobacter aerogenes
atgcacatcatcctgaacagcctgcgttacgtgttgtggcttctgttctgtttattccgtcatgccgtgttcctgcctgccgctttcggcggtgtcctcctgcttgcctggcttattctgggccatccggtcagtgacctgaacgaccagttgcagaaggaggcaacggcatggcgcaccgcgccgcccggacactacatgtgggaggagtgcccggtgcctgacaaagcggctccgcctgaggcaaagcaggtcgcctgtaccgtcactgccgtctccacagaaaccgcggcgaacaattacctgctgtcattgcgggccgtatggatcatttttttcattctgtcgaatgtcctgtatgtgctctggcgcttactggcgaatgccctgtgttaccactctctgccccgcagggaagctggctccgcaaaggggacgtatacccgcatggccgacggtaaaattataaaggaggcagacgatgagtaa

SEQ ID NO: 103701 - DNA, 852 bp, Enterobacter aerogenes
atggcaatcaatgcctactcacacctgcgttacgacctcgataactatatcgttgagttgcagcgtgtatctgagctggccgcgacctttctgattaaagatgcgctgaaccggcatgattacctgcgggagatcggtgccgacatccgggattatcagtcccggtttgatagcgagaaaaacccccataatcagacgggcatcatcgaagagctgaaagcagaattaaagcttaccgaacgcgaataccagatgctgaggatgaaagactatgtgacttacgttgttacagatgtgtttgaagagcatggggtgctgaagtatgtcaaagttgcaggggggattttcggaggaagtatggaagcatggggaggattccagttagctaagctgggaaattccctcaaaataaaaagactcaaaggtgctggcataatccttgctctttatggtgccaacaatgtttatgagtcagttagcccggtgctttacgaacacagtgaatcagggccgatcaggtatttctaccgtaaggcagccgagcttgcgggatttagtaatgatgaaggtgatctggcttacagtagcgtggaactgtctttgtcgctttatgctgcagtcagaactccggttcttacccaaaatcctggccggttggtcagcaaatatcttggggagcaacccggtacaggcaagctgtttcgccatgtgagtaatgattttatcactaaatggtccagcaaaaatggtgtaatgaagttgtattttggccttgattctgcaaaaaaaatcaaagccaaattctatgatgatgaatacaaatacgatgaaaaattcacattaaaagattaa

SEQ ID NO: 103702 - DNA, 465 bp, Enterobacter aerogenes
atgaacaatattttcttaaaaattgatggagttaatggtgaatccagagatgccgcacacagcggctggaccgatgtcgatgcctattcttggggttccaaaagaagctcaggtcgctccgggggaggcggaaaggttaattatcataacctgaccgttcactgtcaggtggataaaaccacgactggcgcactgctttgttcatcaaatggcaacaaaattaaatcggtgcagctgtctgcctgtaaggctggcggcgagcagatggagtattaccgaatcactctcgaaaatgccgtcgtggttgaggtgctgtttcgtgacaatggtgcgctgaccgacgtggagtatgagttcgaagctgacaaagttaagttccagtactgggaacagggtgcaatcggcggcaaaggcgcagaaacacgcatgggctgggatatcaagaattcgacctcttacttctga

SEQ ID NO: 103703 - DNA, 156 bp, Enterobacter aerogenes
atgcggaatagggagcgtcgggtcagcgataaactctatctgctgttgttgaaatttatccttttaagcaataatacctgcctgatgcaggtagtgataaaaagtaaagcaaccaaaaggtcggggacgaatgaacaatattttcttaaaaattga

SEQ ID NO: 103704 - DNA, 387 bp, Enterobacter aerogenes
atgtatcaatctgagtctgttgttgcccgcctgcgccatctcgccagccgtgcgctgatccgcaccggtacgctggccattctgggctggctcacctgtaaaccggcctttgctgatttgccaagtgttgaagcacctcagtccagcggcggaaccggcctgatgggtcagatcaagggctacctgcaggatggtgtggtcattggtggtctggttgtggcagccatcgcctttatcaacgtcgcgattgctgccgtccacacttttacggaagtccgcaatgagcgggcaacctggaccaaatttggcgccattatcgtggtgggtgtggttctgctggttgcggttatctggctgctgggcaagtccgcagacatcattctgtag

SEQ ID NO: 103705 - DNA, 1317 bp, Enterobacter aerogenes
atgagcatatcggatatgttttcagcttttctggataatctggctataactaatgcagagacgattagcctgcgttatggtgaaataactgcatctttgaataaaaagtttcgagagaccgaatccaaaactgcaaataccttacaggttggttcatttgggcgtaagacaggtataaaaggtatttcagatttggacatgctttacattatgccttcttcaaaatgggatagttataaagatcatgggcagcttaatttactgaaagatgtaaagagtgcgatacttcaacgctacccttctaccaaagttaaagttgacagacttgtcgtaaccgttacctatacagattttcatgttgaggttcagcctgtttttgaagattcagataatgattgttttctttttccagatacaaatggtggaggggtttggaaaaccactaagccaaggcaggaaatggaagcaattgttgagatgcataataaaaagaatcataatttacgtcgactctgtaaaatggttagagcatggaggaataaacatggagttgctatggggggattgttagtcgacacattgtcttataattttctaaactcaaataatgactacgatgaaaaaagctttctttattacgattggatgagtagagatttttttaaatatatatctgagcttgcagagcaggatgactacttagcacccggtagccgtcaaagagttaaagtcaaaaagaaattccagaggaaggcaaaaaaagcatacgaattgtgcttggaggctattgaagctggcgatcaggataatgctcatagcaaatggaaaaaaatttttgggagaccttttcctgcggctgcagttagcgttgaaaacctcgactatgccagcacctccttaacttggaaaaacaccgaagagtttatagaagataaataccctatagatattacagaaattttagaaattgactgcgaagttaagcagaacggttttcgacaatattatttgagagatatgctatctaaacatatcccattgcttaataaaaaggacttaaggtttgaaatatcgaaaatctcagtctctcaaccctatgagattttttggaaggttctcaatcggggtgatgtagcgcgaaaaaagaattgtgttagggggcagattattaaggataatgggataatgcagaagattgaatccactaattttcgtggagaccacatagttgaatgttactgtgttaaagacggtgtggttgtagcaaaaagtagaatacatgttcctattgttttggaggggaaacaagatgactaa

SEQ ID NO: 103706 - DNA, 555 bp, Enterobacter aerogenes
atgactaacgaagaaattattatggagggccagttgcgggaatgctatggtcgagtcgtctattcacacaaaactcacgaaaaatgtgccgatatactcatgcgcaaccatgagtatatcaagcttgcgcatattggcttttctgtcctgataacgggaggaattgtcacgacacttctaagtgatagtaaggcaggtgtaataattagcgctattctttcaactatagtgttgtttcttaatacctatacaaaaaattatgatttaggagagcttgctcagaagcatcgtcaggcagcagctgatctttgggtaatacgtgaagaatacctttctcttctgacggatgtaagaatttctgacttacctctcgatgttataagagcgcgtagggacgagctgatgaaaaaattacatgcggcatacaccggtgcccccggaacggggctaaaagcatatactgcggcccagaaggcattgcaacaacaggaagatctgacatttacggaagatgaaattgatgcctttttgccaaaggagcttaagcgtaagtag

SEQ ID NO: 103707 - DNA, 312 bp, Enterobacter aerogenes
atgaaacgttacgcaaccgctctgtttttttgcacgctggcgctgagcagccaactggcccatgccgatattattgacgacgctattggcaatattcagcaagccatcaacgatgcctacaatccgggcagcagccgttccgacgacgacgacgggcgctatgacgacggacgctacgatgacggcagctatcagggcagccgccagcagcgtagggataaccagcagcaatataacgatcgccagcgccagcttgacgaccgccgtcgccagctggagagcgaccagcgccgtctcgacgacgattactga

SEQ ID NO: 103708 - DNA, 522 bp, Enterobacter aerogenes
gtgagtagcgagtcaactgaaattggatttaatggacggcgacttcttttatcttttgttatatttgtttacataatgacttatacacttttttcaataaagtacctctttttatcatgggctggtgattatgcatttttgaatgatttaattcatgcgtcggacagttttgttgctaatgaagaaatgaagctcgcgatctttactataattggtgctttgttcggtggggctacattaggtattacttctttgcataaatattctgctgtaactaaaaaattagatattgaccacctgtggggatatttgatggcaccaattctatctattgtaataggtatactaattttttgtctgttatacagtggaataatggttttgaatggtggatcgagtattaatacagcacaaactagtgtgaaaattggctatttatcgcttggtgcaatctgctcttataactgggatgtattcgttatgaaattgcagaagctatcaaaacatgtatcagatgaataa

SEQ ID NO: 103709 - DNA, 1305 bp, Enterobacter aerogenes
atggatattttcgcccgtcatccttcttttggtaagcttaggattataaatgtttacctagaatttgatggacctaaaattttctatgcagaaaatgaaactggttccactttttttgtttactggattggtgatgatgccaattttgataattggtatgtaatcccgtgttcaaaagcaaggatcattgcttttgaaaaagaaaaaataagtttacgtaacatccttgagcatcaagaacaggaatatttttacgatatcaaaatacctttttctgctgatgatgaaatggaaattcattttaagcacaaaaacaaaatggctgaaatcagccttccaaagcctgaaatttatgtcaaacgagttgttatatatgcgcccagcttgcttgaaaacaatctcatcccgacacatgagattatcgtatcgaaaacgaataaaaaatcaaagaaaaacataacattagaggggatgagtcaagtatgtgatcgattcagcgaactagtactcggcttcaataaatctcgaggcgtgaagggaaatctgcaagctttaaatgcacggtatggctcttttgccatttcactgcatgcagaagaattgactaaatttgaaagtttcttgaaccaagtatcaacacttatggtccataagaaggatataatacctttactaactcaaagtgatattgatataaaggtattccttaactttctgaaatcgattgagttatctagtattgattttgaattacgttcatccgctgatactagtaacactataaaaatattcaaaatagatgctgaaatttatttatcacgacttaagcatcgtgcactaacatatatatcatcaatcaaagtgccacaaggaaatgatattgagaaagttttcttgtatatcgaactcaaatggaataacgaacctatcacggcagaaacattaaaagttaatgcgcgacttgttgattattataagcattcagcacttattctaggattacttgagttcaatggtgagttaacaccgcagggacaacgagttgccctctcagatctaccaacaaaatacaggattacagcaaatgcttttgaagcaagtgagtgcgcttgggcatggatgaatcattgcgacattactagccttgctgatatcgatccagggactgcagaagattttttaactaagtgctgcccttcgcttacaggagatactatcccacgaagagctaatacattagtgtcatggtgcagacagttaaaggatcattatgttaatgggaatgtgttgccccaagaaaaataa

SEQ ID NO: 103710 - DNA, 1287 bp, Enterobacter aerogenes
atgagtgaagtggtctctgtttttgaatatgacctgttagggagtggaaaagcggcatcagttggcgcaaaactagtccctcagcaagtctttgattatttagaagatcttagcctaaccagtactcagggaaaccagtttctcaagctcacttctcgttcaggtttcaaattgcttcaagtgcaaaacttcgcgggaatgctttcaacccctcacggtatacaacttgaaatattgcctaagattggtaaaaacctcacggaagcgagtgcgcgaaaaacattcatcacgatgctaagccacctgcctggttttcgacatattcaaacccagcaggcaactctgcaggcacagcgcatgcctttgcttgagatctttattagccagtttttgcatagcgtcagtcaattgcttaaacaaggtttacgatccgactatgtgagcgagcaaggtaatctgtcttttatgaagggcaaactgatgctttccgaacagttacggcataacgcggtaagtcgtcataaattttgtgtcgattatgatgactatctgccggattgttcagccaatcggctcttacattctgcgctggatgagctacttagcctgaagctttcctctgagaatcaacgcttgctttacgaactacgctttgcttttgaaggtattccactttgtagggatattgaaagcgacttaaacagcttacgtctggaacgtggtatggcccattacaacgaaccaatagcttgggcgcagttgattctggcaggcatgagcccgagtgctttgcagggaaatactaaagcaatatcgcttttgttccctatggaagcggtatttgagtcctttgttgcacaaactctccccgacgaattaccccctcaccttaaaattaaatcacaggctgccacttattcccttgtgaaacacggacctaacgattgctttaaacttcgccctgatctgttgattcaattgcgccaaccggttaaaacccaaatggtgatggatacaaaatggaagctggtggatagcagccagcaaaaaaaatcattgtatggactggcacaatctgacttctatcaaatgtttgcctatggtcaaaaatatcttgatggaactggtgaaatgtacctgatctatcccgcgcatgatgactttaaccaaccgatacagcagcattttgctttctctgaaaccttaaaattatgggttgtgccatacaagataacggcaaagcgcggtgagaggatgatgtgggcgggtgatgtttccgagttatag

SEQ ID NO: 103711 - DNA, 2076 bp, Enterobacter aerogenes
atggatattgtagatagtgtcgaagcaggcaaactgacgctcagcggattgatagataccctagccaaagataaaaattatgccatttccaagtgggataaacgataccgtgaactcacaactctgctacagcaaacctcaacctttgcagaacatgaaacggatgacctgatcaagcgactttggtatgaacggggtaatggtattgccagtattcgtcagggtgttccgtctttagccgaatatcagaaaaacctgccactgtttagagaactaaccgagcgtattcggcagcaaccggatgaagctacctaccaatatgttggaaatgctctaaagcaggccaaagaaaccgggctgctgaagcgtatgtattggagtttgagaaatcgtgtctttgccgcgttttcgcctaggacatgcactagtaccgttgatgagaatgcgtttacaaaagctgcggatttcctgaacaagaaattcagccttggattgaagcttaacggaaattggctgcagaaaaaccatgaattgaagcaagccatacatgcaaaatctcccaatgcagatccctactacgtaaatatggctatttggcatctctatgagttactacgcgaacgcgataatgagcagaaacaggagaaagtatccagcatcacatcaacagctagcagtgaactcactgaaactaaaattctcccacattcaccaatgaacgttatttactttggtccaccgggtactgggaagaccttcacactgcagcaaaagatgaaagagtacacctctcatgctgtaccagccgatcgtgatgcctggctggattctcgccttgaatcgttgaactggatgcaggttataacgctggtgctgctcgatcttggtaaacgagccaaagttcgccaaatgacagaacacgaatggttccagcgtaaagcgctacttaatggccgtagtagcaacttttcgcaaactacttgggcgacgttgcaatcattcactataccgggatcaactactgttgcttacaaaggtcgccgtgaaccagcgatcttcgacaaaactgccgatagtgaatggttcctggttgaatcccagttagagcaagtcgatgagcttctttctctttatgaagagttaaagcaagggcctaaatctgccgaagccatccagcgttttgcgacggttacgttccaccaatcttacggctatgaagaatttattgaaggtatccgcgctcgctctgacgagagtggcaatatatcttaccctattgagccaggtatctttttgcgcctttgccagcgtgctaacgccgattcagcacatcgctacgctattttcattgatgagatcaatcgcggcaacatatccaagatctttggtgaactgatctcactcattgaagtagacaaacgtgcgggtatgtccaatgcaatgagcttgcaactgtcttatagcagtgatcacttcagcgtacccgccaatgtcgacatcatcggagccatgaacacagcggaccgttctttagctctaatggatacagctttgcgccgtcgttttgactttgtcgagatgatgcctgatctctctttactgagtggagctaaggttaaaggcatagagctcgagcctttgttagagaaactcaatagccgcatcgaagcgctttacgatcgtgaacatacactgggacatgcattctttatgccggtaaaaaatgcactcgattccggtgatgaagaaactgcgtttaaacaattgaagatcactttccagaaaaagatcattccgctgttgcaggaatactttttcgatgactggaacaagatcaggctggtgctagcagacaaccagaaacaagaagacagcctgcaattcgtgattgagaaaacagacgatcttgatacgctttttggtaacaaccatgatttacgacgccatgatcagcaatctacagcttacgagctcgaagcatttgatgaagagatctggaatatgccaaaggcttaccgcgcaatttatcagccgcagcagaccgcgcttgataagcaggcagtaaaccatgagtga

SEQ ID NO: 103712 - DNA, 588 bp, Enterobacter aerogenes
atgggagataacgtggagaaacatctcacggaccgtgatgtccaattgttctttgatgccgctgaaaagctgcgagaggcagcagagcgtgatggtaagaacgccagagaagcaacggcggctttggcttcttttattaacaagatgaacatccgtcttcagaagttggaagccgatgtttcccacaatttaaacaactcagcggaaacaaccgctaatagggcggcagagttgctgagtatcaagtttcaacatgcaaatgatgcggccgaaagagcgacggaacaatatcagcaagctgctgaaaacctcaacattaggaactggttctttatcctgggcacacagatagtactaatactgatttttatcgcatcaattttatttctggtaccttcgctggatgatattcagcagcgtagagaagaattgtcatcccttaatgagcaaatcaaaaattcccacttagaatgggctaactgcgagggagataaaaaatgtttccgtacagatgaacgtggcaatgccggagaaccatacagaggcaagcaggacggcagtacctggcgagttccttggaaaggataa

SEQ ID NO: 103713 - DNA, 282 bp, Enterobacter aerogenes
gtggcggatgacgctatttcgtcgaagaacgatgtaagggataaacaagagaaggattatctgaagcttgttagatggtgccaaggagtgggagaaacaggcgccggtgcgctgatcgtaattgtgggttctggcggcggtctggaatttgttgcgctggaggatctgatggcactgaatatgtcccatcaaaaatggataacatatagacaagaaaaggaattaaagatggaaaaagaactggaaatgaagttggagcgagagtggagctatgggagataa

SEQ ID NO: 103714 - DNA, 375 bp, Enterobacter aerogenes
atgaaacaacaacctgctaaatgcgcggtcgatgaatgggggaatctggtcaatgtagaagattttcgctctccctcattctggaaactgtactgcttccactgctgcggtccggtcatctcaaaaatagtgttagatatatatcctagcctatatcttaagttaagaaacctttactatctggtttttcatgtggcccactacctccttgctatgatagatacctgctctcctataaacggactgatgtcacacatctcacatattaattcgtatagctacctcgataatgttttgataaaagtaaataatgtagaagataaaagggattacatagcgattgaaaaccagcagaacgaccttgaaactatatga

SEQ ID NO: 103715 - DNA, 333 bp, Enterobacter aerogenes
atgtcgaataagacacaggcagtgaatgacgatactgtcgagccctggtggggcttgagttgtaacgtcatcccttgttttggtgcgcgtctggtccaggaaggtaaccgcctacattacctgtctcaccgcgtcaataaagcggatttgctccatcttgaccaggcatttcctgttctgctgaagcaggcggagctcatgcttactagcggcgaactgaatccccgacaccagcattgcatcactctctatgcaaaggggttaacctgcgaagcggatacgctgggttcctgtggtcacgtctatatctccatttatcctactcaacgctaa

SEQ ID NO: 103716 - DNA, 321 bp, Enterobacter aerogenes
atgaatactttacctgcaataaaccagcgggctgttcagacatgcttatcacccgtggttgtctggcaaatgctgcttgctcgactatttgagcagcactatggcctgaccttaaatgacacgccgttcagcgatgaggctgttattaaaagacatatcgaagctggtatcacgcttgtcgatgccgttaattttctggtggagaagtacgagttggttcgtgtcgaccgcaggggatttagctggcaggagcaagcgcagtttctgaccgttaccgatgttctcagggcccggcgtgctaccggattaataaatacttaa

SEQ ID NO: 103717 - DNA, 837 bp, Enterobacter aerogenes
atgcaaacagaacccgatgtattaacagaaaataatgaactcatctgttcgaccaatatcgaacgagtagtttctggccgcgatgcagcactgctacaaattgaacagctcatacaacagcttgatgccatttcacgattaacctcagaagttggcggtggtacggcgcaagactgggcgatgaaagctgggcaccgctacgatagttggctgactgaaaaggtggataaagcgctccctgctgtcacccgtaacattgaccgtagtatctggcgcgatttgatgttgaagtctggcatgatggccttgatggatgcgcaggctcgagaccagtggcataagaacctggaagagggcgatcttcctgctatcagtgaggcgaatattctcagtacttttaaacagttacatctgaacaaaatggaagtctttgagcgcggggtcattaacgtcttcaaaggcctgtcttgggattacaaaaccaacagtccctgcagctttggtaagaagatcatcattaacaatctggtgacgcataaccggtggggatttagtcttaattgggggtggcggcgggatcagttggctgacctagagcggatgctgtttttactcgatggcaaaccaatacctgacaaccgtggtgatatatctatcctctttatggaacatgttcgggataaccctgctaagaatgcttacgaggatgaatacttcagcatccgctactttcagaagggaacagcccatctgacattcaaacgtttggagctgatagaaatgatgaatgacattattgcgaaacactatccagggatgttagctaagcccaactga

SEQ ID NO: 103718 - DNA, 1311 bp, Enterobacter aerogenes
atggaaaacaaatgtattgaaagtgagcaaatcttttttgctaagatgaacaggtatagtttcaaactgtcagataagaaatggcaactggataaagaaaactgcgtataccctcataaagttgtagatagaatgcctacaaaaatgaaacttagctacttaaaaacattggcttactatgcgtctgaatatagttctttttatattcaaagcattaacaatctattttataagtggtttggtgcgatgactatcgatactattgatgacaaagccatatatcaattgaatgtttatttaggttcagcgagaaactacaagctaaacatagttaaggccttcataactaaatggaaaaaactcaattaccctggagtagaagcgactgcccttagaatgttggagaaaataaaaatcattccaaaccaaacaggagaggcagttaaaagacgagatccaaataaaggacctttaactgaaacggaactaaattatatccttaactctgttagcaaactttatcttcagaagaaaattcaacgcttcttatattgttatattcttctgttggcaataacaggaagaaggccattacaattaatctctctaaaagctaaggatctcattaaaaatgagaaagggtattttttaaatgtaccaaaagtaaaacaaaggaaatcattcagaaatgaatttaacatggtaatgatagaaaagttcttatatgacagcttatcaatgctaattaatgaaaatcaggtgtttgtcgaagataaatttagtgttgggattaataactatagaggcgaattgccaatcttcatggatttagacaagattacggaaataaaaagaattgagggttttctatctgatttaacaacagattttttccatatgaaaaattcagtcatttcaaagctattaaaacgctttccttcaaaattcgatgttagatcagaaaggactaacagctatatagagcttaatgccagaagattcagatatacattagggagtcgactggctaatgaaggagcctcaattgaggtgattgctaaagcgttagatcataaatcagcaaactcttctatgatttatataaaaaataatcctgacagtgtttatgatatcgataagaaactaagtgcattttttaaccccttatctaaaatacttatgggcgtagagattgaagaaaacaagaacttttttatcaagtatgttttagattcatttttattattagaagatacggaagaggaatttaaatgtttatcttgtaaaaaattcaacccctggagagtataa

SEQ ID NO: 103719 - DNA, 441 bp, Enterobacter aerogenes
atggtcgcaagtaatacttttaataagatcgttgtgagtaagcattctcataatggaagcgttaacgaagcgaagttctcgcacaacaagattcgttctcattgcgtcagtgtcagattaaatgatgaagagctaacgcttctcaatgagagacgtggccgtcatcgtaaaggcgaatggcttcgtatggcgcttctgcataacctcccctttgttattccatcgattaatctcgaagcatggaaatcgctgagcgaaatttcacagaagctgaacaagcttgtcgctcatctggataataaaagccagtgtagctctctgacgcacacagaactattcgcagtgaagcgccagatatctgagcttcgcatgaagctgatcacagccgacctatggagatcaccttctgatgaagggaatgcaaaaaatcagcaggggtaa

SEQ ID NO: 103720 - DNA, 1482 bp, Enterobacter aerogenes
atgaagattaaactctcgatatataaagcaaaaagattcaatgatgatattgaaaaagttttgaatttggagagagtgagaaatccgattgagttcaacatagatgaggcaagggtgtacttgtatgcaaaacaattcttagatcccaagcctcctgagtggacaactttatttacaagccaaaagccagaattggaccataatttcttcgggaaaaatagtagcactggtgcagtcttagttgttgaaatgaataactcaagatatctaattcctttcgggacagggcatcacttaattaatgataatagtattgtcaaaggttttggtcttaaaactacgcttaattgtattgaacataacaaaattcgtagtttggataaaggcagccataatgaaacaaatctattaactcgtagtcaaagtagtaaagaggttgatatttttaaccttaaaattgattccgagatggatatacttaccactctgacagggacttccactgaagatgttttaggtaataaaataacgggtaaagatgcatttgtaattatgcctgatactgacctgaaatccatcccggagttgttaaataaaatagactccatttattctcagcctctccctgaagagtttgaatgggttaataatataaaagaggcagatgaagcagaagttgagatacttgattcaattctggtcgatttaataaaagcaaaagattttaatgacatatggttgggtgaacctgaaattgtagattgggagaatcagataggctattgttttgagaagcggcaaagaagcatgatttatgaaagtttgtcggttagtcatatttgtgagtattttgaaagcaaaaagattgaaattactttaaatgatctcaaaggaagcagtttgcatgttttagatgcagattaccagtctttaaaaaaatggtctctttatagatgtctgtatgctgagataaaggaaggtgatcaaaactatatcctgagagattcaatttggtacgtggctgatagaaaatttgtttccaccattgataatgaaattaaacgaattaagctgtatgaggaagccgacaaattcccgatttattcttataaaagagaagagcaatacaataaagaaacttgtcttgctgatcaaagctttactcatatggatcaaaagttcatatatcatggtggtgggcgaagtaaaattgaattttgcgatattattagaggtgcaactgattttattcatgtgaaatattatagcggtgcgcaaagcatgagccatctattttcacaaggatttataagctctgaacttttcataagcgattctgaatttcgatggaagcttaatgaaaaattgccagcgcatataaaattagctgaccatacattaaggccagaggctcagaaatacaaaatagttttcgcgattgccacaagtaaaaacctcccggaagtagagcagcaaaattaa

SEQ ID NO: 103721 - DNA, 294 bp, Enterobacter aerogenes
gtgacggcaaccatcaccaacgccaatggccaggtggtgcggaccattgagattggcggcctcaccgccggggtgcacgccttcacctgggacggctcgctggatgatggtaccgccgcgccggacggtgcctataaagtggcgattaacgccaagggcaacggcgagcagctggtggcgcgtagcctgcacttcggcatggttaacggtgtgattaacgacagcaacggcgcgaagctggatctcggccttgccggtaacgccagtctagaagaagtgcggcagatcctgtaa

SEQ ID NO: 103722 - DNA, 201 bp, Enterobacter aerogenes
atggctgagaaaagtattgttcaggaagcgaaggatattcagctcgccatggagctgatttccctcggcgcgcgtctgcagatgctggagagtgaaactcagctcagccgcgggcgcttaattaaactttacaaagagctgcgcggcagcccgccgccgaaagggatgctgccgttctcgacggattggtttatgacctag

SEQ ID NO: 103723 - DNA, 417 bp, Enterobacter aerogenes
atggacgatgacgcggcacgtcatagttcggcgctgctgtttcttgacggcgataatttcaaactcattaacgataactgggggcacgctgccggcgataaagtccttattgaggtcgccagccgcctgatggcattcgttggcgaccaacatcaggcatggcgtctgggcggcgatgaattcgccattttactgcacgatgtgcataccgaaaccgaagtccaggcgctttgcgcaacgctgtccgaacagtttcttcagccattcaacctccacaatggccacacggcaacgctctctttgagtattggctatgctttgacctgggaacacacctcggtggaggagctgcaggaactggccgatcagaatatgtatcggatgaaaaaccagcgttttcatcacacacaaaaataa

SEQ ID NO: 103724 - DNA, 780 bp, Enterobacter aerogenes; identical to SEQ ID NO: 15299

SEQ ID NO: 103725 - DNA, 306 bp, Enterobacter aerogenes
atgcgctttgagcttatcggcgcggaaccgctcgttatcgaagctggtgcgccagttttcccgctctctttctgcctgctccgcgcgagcatcgagcgtcacgttagcggcacagagttgttgctctgcttcttccagctcggcgatgcgctggcgcagagcggtaacttcatcgaaaagcgcgcaggcgatatttccctgctgagtggccaactgcttcgccttctccagcgcctcaaccagcgcatcaatatctttaagctttacaaacgtaacatcgtcgccaaattcttttacgtgggctga

SEQ ID NO: 103726 - DNA, 612 bp, Enterobacter aerogenes
atgattaagcaaactgacaaaatcgtgatgatggatagtgatgaagcagccagcatccagactgtaactggttgggtagaccgccacggttgtttctggggtagtgacgagcgccaggcgcgttggtgcggtgccactcatcgcaagtgcaaaaacaaacctgacgaacaccctatacatagcactcatggctattgcgaagaatgccaccgcgaaatccgacaggctaagttcgccacctttgagcgcgcggtatgggctggagagccgctcgttctcttcgacagtgaccagtactttttcgacgctgaatcattggcagattactgctgggaacactcacttcttccaagtgaattgcaactactgatctgcgaacctaattacccgccagagttcgacttagagcagcactgcgaagaaatcatgcccgaaggcgatgattattactgcctacctcaggcagtgcgtgatgctgccgaagcactgaataaggctatcaaggaaagcttgcctgtatcgtggagcggcagtgaccgtgttgccatcgtatcggatgacatgctcgacgatgaacagaaagctgaaattttggcggagcgtgcagcatga

SEQ ID NO: 103727 - DNA, 1125 bp, Enterobacter aerogenes
atgacatatcaattacatgtcggacgctgtgaagatgttctcaagacgctgccggataactcagtcgatgccatcgttacagatcctccatatgggctgagcttcatgaaccacaaatgggattacgacgtccctaccgtcgaccagtggcgggaatgtctgcgcgttctcaaacctggtggacacctgctggcatttggtggatcacgtacctatcaccgacttgttgttaacgctgaggatgctggcttcgaaatcagggaccaaatcctatggatttacggtagcggcttccctaagtcacacaacctcgatggtgattttgatggctggggaacggcgctgaaacctgcgcatgaaccgatcgtaatggctcgaaagccattcaagcaaaccgtgtcagccaacatgaacgagcacggtaccggagcaatcaatatcgacgcctgccggataccgaccgatgaggcgcttaatggaggcactggcggcctgctttcgcatcagcgtgacggtacccaaccggttgccgactacgagcaggcgccggaaggacgctggccggccaacattattcacgacggcagcgaagcagtcgtgtcggcatttccggatgcgaaaggacagcaaggggatttgaaggaaaccggacgcgcacgaccatctcagggtcgatatggagatatggcgccgccaaaggcgcatgctgccagggttgaaagtgaaaaaagcgccgcccgcttcttctactgcgccaaggtcaaaccgaaggagcgcgacgaaggcctcgagcgattcatagcgacatcagccagcgatatgaccggcggccgtaaagagggaagcgtcggcattaacgacccgcgggccggtgccgggcgtacaaatggcgctaagaacaaccaccctaccgttaagccgatcgctctcatgagctatctctgccgactaataacccctccaggtggaaccctgcttgatccgtggatgggaagcgggagtactggccgggctgccatcgaggagggttttaacttcatcggaatcgacctgaacccggattacgtaaccattgcttccgcgcggatcgcttactccttcaaaaaatcgacggaggcagcatga

SEQ ID NO: 103728 - DNA, 159 bp, Enterobacter aerogenes
atgaaacattaccgcgacgccataaccgtaggaaaagtgaagtgcatgtactccgtccttcatcgtggctggctaatgccatctggtgaagtggtaagaaacccgttaaaggctcagaggctggctgaagagctggacacgaaaagaggtgcgcaatga

SEQ ID NO: 103729 - DNA, 285 bp, Enterobacter aerogenes
atgaacgcataccgcgcatacgacgtgatcgaagagcgtaagtgggctgagcaaacgctggacgaagagaaggaaaagtggattgaagatcgggcaaaagaggtctttgacagcctaccagaagacccttacgtggcactacgccagtctgcatcgtccaaggtgtttccatatgaaggcctccgtagcgacaaggctggcgaggtatacaacgatttgcgcacagcagtagcttacgcccaggcggaatacgactgggatcaccgcaccggctgcccgttttaa

SEQ ID NO: 103730 - DNA, 690 bp, Enterobacter aerogenes
atggatttctctgagcgtcttgctcgagcaatgtcattagctgggtatacgcaaggcaggcttgccaaagaggttggcatggcgcagtcgagcgtgaacaagttgcttaatggtgccaacggctctcgcaagacagtggaaatagcatctgtgttaggtgtgcgtcctgaatggctatccactggcgcaggtgaaatgcttgctgattccatacagatcacgcaagtgcagacgccagtaacaccgcaaaatggcatttatcgtgtggatgtcctcgatgtaaaagccagtgcaggaccaggtgcacttatcacgaacgatttcatagagacgattcgtgcgatcgaatacacatcggagcaggccagatcactatttggcaatcgaccagctcatcacataaaagtaatcaccgttaccggtgatagcatggatacaacgatctcaccaggtgatgaaattttcgtagacattagcgttacccattttgacagtgatggcgtttacgtgtttgtttttggaaaaacccttcacgtcaagcgcttgcagatgcaaagggatcgactggccgtaatttcagataaccctatctatgaaaaatggtatgtagagccaggtgatgaagaccagttctacgttatggccagagtccttctcagacaatctatcgaatataaacgattcgcataa

SEQ ID NO: 103731 - DNA, 234 bp, Enterobacter aerogenes
atgaaaaaccccgcagtagaaaaagcgatttccatcgccggcagtcagaaagaattggccaagcgatgcggcaaagcgcagtcgacgatctgcgactggctaaatgggaaaaagaggatttctcctgtgcatgttcccgaccttgtcgcggctgtaaatggagagattaaggcatatgagtttcgccctgatctgccctcgatttttccgccaccaaacaatagtgccgcctga

SEQ ID NO: 103732 - DNA, 798 bp, Enterobacter aerogenes
atgagttcactttaccagctttacaagcacaaagacaaaaacggcaccggaacggtggttaacaaaacttacacggttcctttgtcagagctgtacgtcgagcccggcctgaatatccgcgaaatcgaccaggatcacgtcgcagaattccgcgatgcgtttatcgctggcgagtctgtgcctccgctggacgtccaggttaccgagaagggcgtgaaagttatcgacggtcaccaccgttattacggcgccattgaagcgacgaaagcaggtgctgacatcatccgccttgagtgcaaagacttcgtcgggaacgaagctgaccggatcgccttcatggtcacccggaaccagggcaaacctctcactgctctggaacgcgcagctgcatatcagcgtttgagaaaccaggggtgggagccggacgagatcgcgaagaaggttaagcgttctctgtcagacgtcgactatcacctgcatttgctgacctgcggagaagagctgatcagcatggtgcgtgccggcgaggtatccccgacaactgcggttgcactatcccgcgagcacggcccccaggcagcctctgtagccgttcgccagatggataaggccagagcgtcaggtaaatccaaattaacccgcagcgcggcgctgccgcagtttagcgcagcaaaggcgcgccagtttctccagatagtcgctgatcaggctgacattgaactgccagctgatgcgcgcgccatcctggaaaactatcgcgaattcctgaaagaggccggctgggagagtgaagcatga

SEQ ID NO: 103733 - DNA, 897 bp, Enterobacter aerogenes
atgaacaccgcagaaatactcaacttccccatggccgatatggggatacaggagcaacgtgtggccgacacagacgatggttacacccgtctggcgaacgagctttatgaagagcttatcggtgcgaacctgaccaaaaatcaggccaaggtagctcatgcatactgccggaaaacctacgggttcaataaaaaaatggaccgtatcgctgacactcagatcgcgaagatgaccaggctgccacgtcagaaggtcaacgttgccaaaaaagagcttctctcaatgcatgttctggttgaagagggtgatctcattggtcctaacaaaaacctccatgagtgggctttacctgaaaccaagaagggacctcagtgtaactacggcggtgacacagactgtcaccacgatagtgacagtcaccacggtggtgacagtgtccccatggaggtgacaaaaagtgtcaccaaaacggttacagctctgtcaccagaacagggacacacaaaagacactattacaaaagacaataaagacaatattaataacccccctaaatccccccgggcggtttcgttcgatgcatcagctgttcagttgcctgactggctttctgcagagatctggtcgtcatgggtggcataccgtcgcgacctgaaaaagccgatcaagtctcagcagaccgtcacccaggctatcaacctgctggaccgctgccggctgaacggttactcccctgacgaaattattaaccagagcatcgcgaatggctggcagggactttttgagcctaaagttgccaggcagcagcgccggcaggagtcccgagtcactgagcgattcgctgacaaagactacggaaaaaccgaaattccggactggatgagggatcagcaatga

SEQ ID NO: 103734 - DNA, 318 bp, Enterobacter aerogenes
atgcaaaagagcagatcgcactggacgcatcgggagcctcggctgatatccgggttgctgttgcgaatgatgattgcactaatcgccctgtgcctgctggcgcagttaagcggctgcaacaattcgcgaacggtctacgtcaaggtgccggtggtcccgttaccagccagcctgacggctgacaccccgcaaccggaaatccctgacaacctgacgtggggccagagcctggatttaaacgtcagcctgctatcagcgctgggccagtgcaaccgggataaggctgatatcaggcaggcggaaacaaggcgtcagtag

SEQ ID NO: 103735 - DNA, 444 bp, Enterobacter aerogenes
atggcgatcgttgtctttgatgttgctgcatttcgtgagcgttatccggagttcgatgccgtaagtgaaacgctgcttaatgcgtacttcacggaggcaacgatttaccttgataacacggaccgcagcctggttgcggatgttgctgtccgcgccgtcttcttgaatatgctggttgctcacatcgcggctttgaattcaggcgtaaacggcgagaaggcttctggtctggtaggtcgggtcgcaagcgcatcggaggggtctgtatcggtttcgactgatgcggggccttccagcgcgtcatcgtggtggtatctacagacgccatacggtgcagcttactggcaagctacggccccttatcgcactgtgcgatatgtccctgggtcctctccttcgatgtaccctggccattataaccgccgctctttcatccggaggtag

SEQ ID NO: 103736 - DNA, 1899 bp, Enterobacter aerogenes
atggcagcaacggtaattgacgccctcctggtgacgctgggccttgatacttctcagttccgaaaaggccagcaggaagtcagtgacgacctgaaaaagcagcgcgaagacgccaaaaacaccgccaaggaaatggctgagcagggcaagaaggccgcttcgttcttcagcagcataaagacggaattgctggcactgacaggcgttaccgttactgccggcggactgatgagctttgtgaaaagcactacctcagggctaatggagctgtccattcaggctaaatctttggggatgacagccaaagagcttgacggtgtgggtaaggcggcagaggcggccggtagttctgtcgagaaaataagtgcagcattgcaggggtttcagaacgcaaagcaactggctaaggtcggggtgtacgatacgccagtgcaggaagctgcaatccgacttaattcactgacccatgattctttcaatatcagggacgactcagcacaaaccacgttcaggaaaatactggattcggcaaggaaggttaccgatccagatatccgccgtcagattcttcagttggtaggtattgatgatgctatcaaccagcgcaaccaggaaggacaattcctgcctgacgttgatcgcctgaccaaaagctccggcattacagacgcctcaaccaaaggcgcaaaggaatttacagctgcatgggctgaattaaaccagagcctcgaaaccacaaaaaaccagttttataccttcctgatcccgtatgtgcgcgagttcaatggcgtacttcgtgacttatctgactggatgaaatctcaccctaaagagatgaaagccggtattgatgcgtttttcggcgccatcaaagacgtggcggctgcagccaatgatgcagccgacgcagtgggagggtggaagaatgttattgtcgcgttgcttgctttaaaggttgcatcatggtttagagggattgcgtttgcgctaagtggtccgggtggtctcatttttgccataactgcgctctatccaataattgacgggctcctgtcgaagatagtgagcaaggaaaataaggagtggatgcaaaatcacggtattttctggacctctaatggagagtttttccttaacaagaaagacgcagaggaaaggcagcggcaaattgactccggcgctgttcctaatggctcacagaggactgttcctaatgcctaccagcaggcaatgatggatacccaaatggatttgtctacggcaatgaaattggatgtaggccaataccagcctaacatcccattaaatgccaaagcagcaaaattgggtattaaaggaaaatcattcttgcaggcaatggcgggcgagttcggtgcgctggagggtaaatatgacctacctgccgggctgctgtcttcggtagctgctactgaatcaggtggtgatccgtttgcggagtcgaaggccggagccaaaggcctgttccagttcatgcctggcacggcaaaggatatggggctcaaaggtcgtgatgtttacgatccccacaagtctgcagaggcagcagcgaaatatctaagatggttaatggatgccaccggcggcgatctggaaaaaactcttgcttcctataactggggactcggaaacgtccagaagaaaggcatggataacctgccgtcggaaactcgcaattacgtccctaaagtcatggccggaatgcgccctggcgccgggatggccgtagaccgcgcgatgcccgggcagtccggtgcgacttatcagttttatggcaccaaaatcaccacccaggcccagaacgtggaacagcttaccagcgacattaaaaagcacgccgacaaccgtgtcatgcttttggctggctactcaggacaataa

SEQ ID NO: 103737 - DNA, 840 bp, Enterobacter aerogenes
atgtcgttttctctgaatgtctcgacagtgctatccgccattcagggaggaagcctgttatccgtccttaacagcgccctgtcgccaacttaccggatcacctataacaccgttgacgagtcgcttttgacggctgcagccgggcaggaggttttctctccttccggctgggttagcgttgatcgctacggtgatgcggcggtgactaaggggccggtagaaaagggcaggtacacgtcctacaacaaagtgaaacagccgtctgaactcaggatcatttttgcccttgaagggtggacggctttttccgggtcccttcccaacctgaccaacttctccctgctgagccggaacaatttcattcagaaactggatgagatgaaaaacacggccagtacctacaacatcgagacacctgatacggtgtattacagctacgatctgacccactttgattactttgtggggtcgtatcgtgggcagacgttgttgatggcgaactgcactttcgaggagatcatggacggcggggaggtcatgctttcaaacgctgtaattgaaggcccaccgaccagcaacgcgaaaaccaacaatggcaccgcagcctcaacgcaggtgatcaccggagcaacgaaagaggtgacattgagcgatgtcaagaatgcctggtcaagcgcagatacaaccttatcagaagctctccagacgaccggggcggcgattgtgtctaacgttaactcggcggccgagtcggtctctaaggcgtgggacagatcttctactgcggtttctaagcagataaaaagcactacttccgactttttgaaaaaggtgatgtga

SEQ ID NO: 103738 - DNA, 306 bp, Enterobacter aerogenes
atgcaggaaattagcttatcaccgtcactatcccaaaaggtttatgtcacgcttggtggccaaaactgcgcgatcaagttacatcagcgttcaaccgggttttacgccgatctctatgtcgacgacaagccgatatttcagggcgtcctctgcctgaactgcgtttacctggttcggtataaatatctggggttcagtggcgatctggttttcgttgactcaaaaggtacagccgatccttattacgacgaaatcggcaccagattcaagctgtattatgcgacgagcagtgaggttggcagatga

SEQ ID NO: 103739 - DNA, 870 bp, Enterobacter aerogenes
atgagttacaaggagagagagcttaccgtatcgttcacgctggctaacggtacgtttgacggcggcattggtaacacgctgattgttaaaggcttcaagtgtgaagctgctatatcagcgtttggcggcgctaccggtacggtactcgaacttagtctctgggggctttccctggaaagcatgtcaaagctgacgacaaacgcacaaaagatagtcgcttatgcgcagaactcaatcgttgtttatgccggcgacacccgtgttttttccgggtcgataacatctgccaggattaacctgaaccagatgccggatgcgccgattgagataactgcggcggccgccgccagggagcgcctgatcccctgtgagcccacatccattcgcggcgatgcggatgtggctgatatgattcgcgctcttgcctttaaagttggcctgaaattcatcaatgtcgacgtcaaagcgactcatcggaatccgtatttcgatgacaacgcaataatccaaatattaaaaattgcggcagcacatgatatttctgttgatatagattttggcactgtcacaatttatacaggtaaaacaccgtcggattcagttgttccgtatatttctccagcgactgggcttattgggtatccaatattttatgagatggggattaactttcgctgcatttactccccatctctgaaactgaataccaaaatcatccttgagactgaccttccacatgcgagcggagagtgggtggtacaagcggggactacccactatctgtcctgtaaagttcccggtggactttgggagacgtttgttgtggcatctccgatatctgtcatcggaggggaaagcaatggcaactaa

SEQ ID NO: 103740 - DNA, 588 bp, Enterobacter aerogenes
atggcaactaatcaaaaagcttctgatatctcctgtcaggggaatgcgatcttgtcccttatagccacggcatcaaagggcaatgtttttgctgatattgttctggttaaagatgttggtgatggcgttatgactgtgctacctcttgtgagcggcgcgaacgtatccggtggggagattaaatgtcaggaggtatatgacattccctttattcggtatcaggccgggaacagcgctgtaaaaatgactccccgcattggtgatattggcctgataatcgcctgtgacaaagacacaaccaatgtcagagcatcaaggcaaagtggcccgccaccaactcagcggcgccactcatactcggatgctgtttacatcactgctatagccagcttgaacgatgaacccacggagtttgctgagtttacaggcagcggaataaaaatacagagtcctggcgtggtgaacatcaacggactgaaagtccatccaaacgggcagcttgagcttgtcgacggttctctcgttgatgggcatactcatggtggggtagtatcaggaggaagccgaaccgatccactggagccgtga

SEQ ID NO: 103741 - DNA, 654 bp, Enterobacter aerogenes
atgataaaaaaatcagttttaatattttttattgctttgtctggctgtgccatgtccccatctgaatatattaattatcagaaagccaacaagtttgatgaaacaaagttccctactaattctagcggtatgcagtctgtaaaagacttgcgagaaatttataaaaaggaaaccgggggaaatcttccagagcaagatacaagcgattgtcaaaaggacaataaatgctatttcaatagatatagcgatcttcttcacgacctaatgtaccagcgacaaattgataagcagaaaaaagaaaacgaagcatttgcagcacagaaagaagctgagtgtcaggctagtaagaagtgtatggccaagcgtgagattgatgccgcgtcttacactttaaataatgtctactattctctaatggcccgatacccataccagcaggctgactctgacgccggggtaaggcatatgtgccgggtggctggagcagctcaaagggaaggcgtgacccttgagtttatgaaacagcacattagcttaacagaaggaattggccctgaaatgagataccaaataatccaggttgctgaggcctgctggacaatgagcaagtacggcgttccggacggcaccacgcagatcaaatcagtgtattaa

SEQ ID NO: 103742 - DNA, 1401 bp, Enterobacter aerogenes
atggcaactcaaatcaagagcaataaaacttatcagggcgatgctgccgcacttccttccccgcaggcccctatgccgaaactggccagcctttacctggactttgagaaggagctgtatattgccctcggcaggacaacgggaaatgccgttcgcagccggcgcctggccgatctagtgacgttcactcgcgcgtcagaaaccacgcgggtaaacaaaagcggattaatcgagtatctcgcatccggcgaggctgctatcgagtatgacccgatcacgggtgattgcctggggctgcgcgttgctgcgggaacaaccaaccaggtggcaaacagcgaaaacttttccgggtctacctggacaaaaacgaacgtttctaccgttgcggcgaaaaccacggcaccagacggaaacccgacagcatcgccattcaatgagacgacggatagcagtgacctcattcactcaatgctcgaaaatgccacaccagcggcaacgataggctccccggtaacgtttagtatttatgcgaaggccaatactgccagcattattcagctcgttgcccagggcgctgttgcaacccctcagtatgcaaactttgacctggtaaatggcgttcgtacacgcagctctacaggtatcctgcagaccagtgtccggaaatttaaaaatggctggtatcgcatcagcataacgataaccccgaccgtagctgcttctccacagtttactctggcgttgatcaatgatgtgacatcagcagccgccttgccagcatacaccggcacggggaagggaatttacatttggggggcgcagattgaaaactgggatggagtgacaccatatattccaacgtcaggagccgcagtgacgcgcccggacgaagtttgcactgttcgccaggacctggattttatggctacagatcgcggcgctatttttgctgattacaacatgcccgccagcttgcaggcgatgagcggggcttataatgccgggcaagccattgtttgccttgacaatgattctgtggctgagtatgtgaactttatgaaccgtcgcatcagtaacagcatcaccaatcagaacctgactgcagcagctaaaattgtcggtagttcagagataaccgtggaagttaaacgtttagggcaagtgagaaacggccatcagtccttcatcagttcgtttatcaacgacgatatgcgtgtatttgatggcatcaacaaatacagcggtgctccgttggtctcaacacagctgaaccggcttatgattggtcgagcaagaacgacacccgcagcggtttccaatgcatatctcaaacgcctggtttattacccggttacgttagttgatacagatttagtgtctcagtttaatgcgttgtcgtag

SEQ ID NO: 103743 - DNA, 240 bp, Enterobacter aerogenes
atgctcagacaatcagatatcaaccaggcattttgtgagtccatccttcagaactcgaaaggataccaatacctacatacgcgagatttcgtatcttcgctgcagcggcgcggtatccacttctcagagccggaagcaaatcgctggatagagcgctatcaatcgtgttttgcagacaagacgccagaccatagcaacaaccgactgtggattctgcgcaacatggggagggtgctctga

SEQ ID NO: 103744 - DNA, 522 bp, Enterobacter aerogenes
atgattataaaacctaaaattttgcacatatgttttctcctaacaattatagctattgcttatttgttcggagacaaatatacgtatgcagatataaaagatattttatctaccttgcaaaacatttctgcaatgatcttcactattgcaggtatttggcttgcatatatttaccctgcagctgtaagttcaattgtaaagccatcaacaataactagtataaactatcataaggaaacagaaaaagatattgagcgaattacgctgatagtgaaaaccattataatttcagctattgtaatattttctattgttataataaatttaacgaaacctatattttcaaatctggatttcatttccttgcataagcacgtgttctgcaagtttggattttttatcacagcgttattagtatatctacaaataatagcgttatttagtatcattgctagtaatatattatttcttaatgatatacatgataaaagaaataaacgagagcttgataaattaaggtaa

SEQ ID NO: 103745 - DNA, 1203 bp, Enterobacter aerogenes
atgagtaaaaccaactttaaaactgaacgcggcattataacattttttgatttagaaatgtttggcctttataaaatacgacaaggtaaatcgccggaattagtcgaaaagaacttatcccatgttctgtgtaacttacatagctggatctgttcaagaacagttgaacaatctgttccatggggaaaggataataatagaagaacaaaagcatactgtaaaaatatttcatatgacagtacgacaggagattatctatttgttatctggaaaacgcttggtgataactctggaaatattcaaggtatagatgctgaaagtaagattgacggcacttcagataatgttgtatccgcctctgatactcaaggtggcggtaaatatatctggggcgtaccttgctactattgggtaattccagaatataacaaaattgcatccatacgattcccaagttctaatacggatacagatcttttctgtcattatattaaagcatacgttgactttaggatggagcatcctaataaaaaagtcatagatatgactcgtcctcgtaatgactcacctgaagacgttcattacaaacgtgttcttttttctcaaggtgatgatgaaagtttagtttttaaagtacagactaaacaaacaaggatgatcacgagtggagcaaacatagaagaactgtgtaaaaaaatcactcacattgtttaccatgacgtaatagaaacaaacatacctgatacacgggaaaaatggcagaagttatttgatgcagttggagatgttttctcaagaagctctcctattttatcaaaaaaacatcgcgttgaattattagtcgaaggaacgcctacgcctgaagagttcactaaactcatcgatgaatatatagaaaaccacaatcctatttcagaagatacagaaaacaacaatgagaatgtagggaatgatcacgcacgcatcggattcaaaataaatggaaaaaatggttcaactacttggttagatgaatatgtttatcgccatgaaattcacgttgacctttctaacagaaacaaacattactcttcttcatatttaatgagtgtagtaaaagctcatagaaatgatttggtgaattgttttaaaaatgaagatataatagaacaaccagaagctgataatgatacagcagtgcagattcataaaataggtgcatag

SEQ ID NO: 103746 - DNA, 882 bp, Enterobacter aerogenes
atgaatttcaaaaacggaggacaagcagtcataacgcgcatgcttgaagcgtatggattcaagacaaggcaagctctgtgcgaacagttcaacgtatctgcaagcactatgggcacgcgctggatgcgtgacgtatttcctgctgactgggtaattcagtgtgcaattgaaacgggtgcatctatcgagtggctctcattcggaaaaggcgtaccattccctcagagtactgaggctccggtcatgtcaaaggcaactgcatcaaaggttcagcacgtttcccaagccaccacactgaagtccccaattgggaacgatctgaatttggactcaggcggacgtgatgcaatagacaggctaatgaaagcgtatggctttaaaacaagacaagaacttgccgaccatctgaatgtatctaaaagcactatggcaaatagatatttgcgagacacattcccggctgattggatcataaaatgttcgttggaaacaggaaattctcttttatggctagccactggacaaggcagcgagcacaatgctctcacaacatcggtaaaagaactgcctaaatttcatctcaatgcaggcaaaatggttgagagtggctcatatattttcgattcgtcatttttacccgctaatctttcagcaccaattgtcgttcaggatggtttagtgacatacatctgtgatcagaaattttctgatgtattagatggatactggttaattaatattgatggaacctattccgtcagacaaattactaggctacctaaaggtatgataaatatcagaagtaaagaaacttactttgaatgtgcattttctgatatcgaggtagttgcatgcataagaagcacaatcatttcgaattaa

SEQ ID NO: 103747 - DNA, 222 bp, Enterobacter aerogenes
atggctccacatatttcaatcaccttagctgtcccatctgtttctattgagaaatacagtgaactgactgggttatctatcgatactatcaatgacatgctggctgatggacgccttattcgccatcgtctccgtaaagataaaaagcgagaaaaggtaatgatcaatattgcagcaatgaccgttgatgcgctctctgaatgcaatttgagtattaactag

SEQ ID NO: 103748 - DNA, 2025 bp, Enterobacter aerogenes
atgagcagtttcttttatatccagcctgatttaaaaaatgatacaaatgctgattttttgaactctgttgaagagtatgcaaatactcatcaaatgcagatttatgcaataatgaatcccttaggggaaaataaatataaatataatagagacgatgttcttattatattaagcccaggataccaattagcgttcgttgcttttagtgatgatgttgatggtatacaaaattttatagaggattttatagaggatttaggttccttatcagataaatacaattataaagatacaattggtaggcctcgagcgtggaaagataaacttgttactgagtgctcatacgctgattttagtttcggtaatcttgataagttttttgatgaaattaaaattattgatggtgttctggctaaaaagagtgagttaattatctctctcttaacaggaagtatcaataatattgataaagttaaaggcaatgtgccagataatatacttgacaaggttaagcaaaagataattttgtttgatggagatcagacaaggtttgtataccaaaaatttgataagaaaaaagttgttattcaaggattatcaggtactggtaagactgaactattgcttcataagttaaaggaaatatatttggataaggagaatttaaatagtaaaataatgtttacgtgccataataaaatattggcagacaatatgagaaagagaattccagagtttttcaactttatgaaggtcgagcagcagattagctggaatgaaagactttggtgtgttaatgcatggggttctcaatatgacggtaactctggcgcatatagatatatatgtgaatattatggattaagtttctatcgttttagctatgtgatgactttcgataaagtatgtagaattgcgttggatgaactaaaaaagttgccaagcaatgaatttaagcattgctttgactttatgttaatagatgaaagtcaggatttcccatcaagcttcattgagctttgcgagctggtaactcgtgatactatttatgttgctggtgatatatttcaaagtatatttgatactaatatctctaatgagatacagccagactttcttctaagtaaatgctaccgaacagatccaaggacattgatgtttgctcatggtttaggtatggggctatttgaagaagaaccattaacttggttaatgaataatgaatgggaagcctgcggttatatagttgatgaatcggtaaaaggtaaattaagattaaagagagagccactaagaagatttgaagatgtaacggatgcaaaaatacatagtgtggaattaattaattccacatatgaaactgaagaagagaatattttgggtatacttcgtaaaattaaggaggagaatcctactgttttggctgatgatattggtatcatctttattgatcaggctaagactatatttaaaatcgcagacagacttgaattgagcgtgcctagattattagggtggaaggttaataaggcatatgaaacaaaagaaaaaattaaagatacgttattcataagtaataaaaaccatgtaaaagggttggagtttccttttgttatctgtgttactcgtgatattatcaagagccattcttatcgaaattcactatatatgatgttaactcgttcctttattaaatcatatttgcttctgggggatgggaataaagacttacagaatgagatagaaaaggggttagatgctattaatgagcatggttatatggatattaacgttccaccgagagaagttatttcaaaaataagaacaacaatcaaatatgatgagaaaaatatatctcattatgatttggttacaaaggtcttcgatgacttacagattgagccgatatttcgtacatccctgtataatacagtaaaaacaatcatgcctgattcttttgatgtcgataaaattactactcttgttcggttcaactatgaaataatgcttcaggagtcgaagtga

SEQ ID NO: 103749 - DNA, 630 bp, Enterobacter aerogenes
gtgaataaagagtattattttagtctggagcaggctcagtgtgactgggcctttaagccaatacgaacaaagaaagatgttattgaaatattgatgagattaatcaaactaatttctgtttatacagaaccatgcgaacagaatgtggttgggagagtgaaacttcatatatcaaagatgagtcgagttttcttctttagtgaaaataaatattattctcttgcatttcctttttttcttgatgaaattaatggtcagattttatttagtagtccagaaatggagtgtatagatagttttgtaacatcaaaagtcatttcttttattaatgactcctcttatttgaatagttcttcttgggccttttttgaaccattgttaaatattgaagaacatcaaggtattcccgggttttggccttttcttagaatgttgttaacttatgaggatggttatattagatatgatgtcgatgaagaaagggctaatggaaatcgtcatccattatatcatttcgacgtcttttattctaatccaccaacgtttaaaattggtttgaatgcacattatacaaatgatgaaatgattgattttcttgatagggaaactgattgtcgttatttgaaatga

SEQ ID NO: 103750 - DNA, 1071 bp, Enterobacter aerogenes; identical to SEQ ID NO: 14536

SEQ ID NO: 103751 - DNA, 1593 bp, Enterobacter aerogenes
atgttaccgtggtttcgtaaatcgctttcccggaaagcggaagagaaaacattgcgtgtttccccgggaaacacgcaggaaaggccattatttatccgtgacagtgacggcttttatttaccgcaggcagctgacgtattgctgaccacaccgcagcggcaaaactggttacagcaaatcagccgggtggtagcgttaccggataaccagtaccgggcactttgcctgtctcctttgcagacgctggcagaacgacttcagtgtgtgccggcatcaaaaaccgggaaatatgccggcgaagggggattgctggatttaacgctgaatacgacagcctggtgtatgcggatgtcccagaaagagatgctgccccgcgggcttccgtcggaagagcagagccgtcagttcagcgcctggaatgtgtgtgttttttataccggactgttttactggttaccgttaacggcacagtttgagggacaactgaacagcctgtcggcgtggcagccggggatgagtgcgcccaccgtaccgtatcgttttcgctttcatgagccggtgccggatatgacgcattttcgccggacgacgggggccatgatggctttccggctattaccggagaaggtaatccactggttgtcgggtacaccaaaggcgcttcaggcgttgtctgacgtggtgaccgagccggtaaacggtgataatgatttacagcgtgtgctgaatgaggctctggctgcgttccccgccggtgcattgccggcattttcttccgttgtttctatgtcagcgcctgatgcttcgtcttcagtgctatcagggcagccggagaatgatatcgcgtcattggcgcctgctgaattggcgcaaaagccacaacctgaaactccgtctgtaacatctgtattgcctccggagtctgttacttcagaaaaaacagagaacggaattcactgcgatataccgctaatggtagttgcagaagcagaaggtgcggttgtccatggggcacttgattctgctgatgaaaaaactgtctcagatatgtctcctccgttatctgaggatatgaaatatgcacttgaattatcaggtttaatgccggaaatcttatctgatactcagacgggcaatcgtgatgagaaggatgaacagcgcgaaaactgtctgagtataaaaaatgaaggagaggctttctgggcgtggtttaagtccggattattgggcggaaaactggcaataaatacgccggatgcgaaggttcactgtgtcatggagtatttgttttgccagagtccggctgttttttatcagtacatacaggaggcgggtaaaaatccggatgatatcggccatattatttcttcttttgaatcccttaaattgcaccggattattcgtcatgatacccgacaaacagggcatttcagggctcgaatttatggtgaaaaactgaatccgctgagtgataacaaaacattaattacgttatcccataaaaaaatcaatggttacatgattaaaggacgtcagatttttggcatgaatatgccggaggaatcattgtttattcgtattgtcggaagttaa

SEQ ID NO: 103752 - DNA, 327 bp, Enterobacter aerogenes
atgagatgtgaatttgggcagggtgtgagggagtgggctcaggatttttggaatgaaattctgtttcctttttttgtcacagccggacttttgttgccactgattctggttgtgggcgttttcctggtctgggatgaacagcgccaggctgagtgggggcgttattacctgacggaatgtcagttggtggaaagaaacagaaatgcgggcttctggtcaggtcgggaaaatattctgcaatgcggaatgacccgggagcatgtgaatgcggacgcgtatgaaaaggccatccgtgcctggcagcagaaacagacagagacagaataa

SEQ ID NO: 103753 - DNA, 1002 bp, Enterobacter aerogenes
atgccaaactggtgctcgaaccgacttgacatcaccttacacaacgcggcggatatgccggctcttaaacactggatatatgcggatgatgggatacccgcctggcagacggcgatagcacaaagtctgcatttgttgctggccggctgcgcggggatactgaaaccggtcagaccgctgtcttttccgccgttaccggaactgacttcatacggtgcaaccgggcctgtttccccgggaaacacggctttcacgcactgggttgacctgctgatgactgcaccggatttgacaccgtcatgttgtcagcaaatccatcagtggtatcagatgtggttatctgaaggcggggcgtaccattcctgggactcgctgacggcgacgcagaaagcgagactgtccccgttgttatcgggaagcagttttgactggcttaaccggtttaccggagaggatgagagccgggtggcgacagcctgggaggatattcagtaccttcgcagtaccggagaagccataccgatggatatgcggactctgttaccgaccagccttgcggctgaattacacggttttaacggctgtttatggaaaacaccggaggtcatctggcggcaggcgcgctggcaggcgtttgcccccggtaacagtacatatcacctttatcagtgccgttatggtgtgaaatggccgaacggcagtggttttcactgtattgatggcgggtatgcgacggagttatccgcagagtttgatactccgtgggggccgccgtcagcagcggttttgtgtgctctgtctgcgcgtttccgctgtcaggtccgtcatgtctatgccgaagaaggctgtggtttctgcggatacagcgagtatgaccatggccggttaaccgaccatgaatctgatgagattgagttcagtgatgaagagaatgaggacggtttccaggatgtgacgggaccggactatattcttgattcattgccacattatggagggtga

SEQ ID NO: 103754 - DNA, 300 bp, Enterobacter aerogenes
atgaacaaaatgaccattatccgctttcagttactggtacatcagttactgcaagtgcattacggcattacgctgagtgataccggattgtccgatgatgctgaggtgtcccggatgattgaactcgggatatcgccggtatcggtggtcaaccgtctggtggataagtaccacctggataaactgaatgcatcctgttatctgccggcatccccgtatgtcagtgacagcgatgccttacttgcacaggctcagctgagcggtgccattaacccggatgtcatgccggataatccttaa

SEQ ID NO: 103755 - DNA, 975 bp, Enterobacter aerogenes
atgaaaaaatctgaccgtaaacgccgtccggcagcggataagccggttcgcgatatttatcaggaagtgactgaccgtattgtggccgcgctggaaaaaggcacccgtccgtggaaacgaccatggcggccgtcggaagggacaggcaccggttttccggtgaacgccctgaccggtcattcctaccaggggataaatgtgctgctgttatggttgtcggcggcggagcagggctttggttacgatatctggctgacttaccgtcaggcacagcaactgggtggccatgtccgtaaaggcgaaatggcgacgaatactgtgatattcaaaccggtgaaggtgccggcaaaagaccgtcacggtgagctgctgcggggtgaacacggtgaggtggtgatgacggaggtgccgatgataaaggcgaatccgttatttaacatagcccagtgtgatgacctgccggcgcatttttacgaaaaccggcgactacccggagaggagacagcagggataaccctgccggccacgcaccgggtgctggatatcctgaatgccagcggcgtgaaggtgaccagtgcggcgcagaaccgggcgtattacagtccgtcacaggaccggattgtgatgccgctgtcgtcacagtttgaccggaatgccgattaccaggccaccttactgcatgagttggtgcacagtaccggtcatccgtccaggctggcccgtgaaggcatcacctcatcgtccctgaagtttggtgacccgctgtacagttttgaggagctggttgcggaaatgggcagcgcttttctttgtgcgcagttaagcgtcgagggagaagtgaaccatgaaagctatcttgacagctggctgcgggtactgaaatcggacaaaaaagcgttgttccgggccgccgggcaggcccgccaggcctgtgagtttttactgaatgtggccgcatcccgacaggccgcgtag

SEQ ID NO: 103756 - DNA, 648 bp, Enterobacter aerogenes
atggccagagcctgtacgatacgggaactgatagcggatttatcccgctgcaatccggaggcattcgtcttgtgtgagatgtggttccccgatgatgttacctatgttgatgaaacggcttgtccggcagagacacgggcaacattaacgcatgttgcacatcattttgatgcggagctggggatcaactgggacacgctggcgtgtgcgttatcgtgtgtcagagatgctgagcagaagggactcgatatttacttttatgccagtgaaaagcgtggtacagacaaaagccggatacccgcctcacgttacgcagaagcggacagcgacggcgatattgaagtcgggtatttccgtaaggttaatgcgctgtttaagtgggtgcatgaccatatcggggcttttgagaactgtgaaaaggtgctggtgacagaggcccatctgcgggctttacagcaggacttgcaggcactgacaccggaaaactgtcagacacggttcccgaccactgagggctttttctttggttcaacggcttatgatgaggcgtactgggctgatgtggaaggcgtcagacgctggctgtcagagataacggagacgtttgactttgacgcagagtcactgttttttgtggcctggtggtaa

SEQ ID NO: 103757 - DNA, 513 bp, Enterobacter aerogenes
atgggatatacacattattttacacaaaaacaaagcgttgaccccctgatgtggcagaacttccgtgaacatctggacaagctctatcaccactatctggccaatcccatatccgcagagcagatttgcggcggatacccagataaacctattgtgttgtgtgatggcctggaggaaaaacggctgaatgatggctcattattcaccgacgacggtgaggcgctttgttttaacggtaatgcggctgatgacatgaatcatgagacgtttattgttcagcgcgaaatccccgtagaggactactgggatttctgcaagacagcatacaaaccctatgacgtgtttgtagtcgcggcattactgttgttgtacaacctgtgcccgggatatttttcggtctcttctgacggggatatccgggactggcagccggtgctggactatgtcagtcaggtatttccttatcttatcctgacgttaccggaagggataggtttaccggaggcaggataa

SEQ ID NO: 103758 - DNA, 357 bp, Enterobacter aerogenes
atgtctgttttactgccagaaaacaaaccgttttcatttctgagtctgatcatgcaacggctgtaccgtttttatgaccgtataccgtttgtttcgtcagggatacccggtgaattaccgtggataagtaaccgaaccggccggcgcgcttaccgtgcgacggtggtgaaagtgaatccccggcagttcaggatccgcattactgtacgtctgggcgcgcattcgaaagaataccgctttcattcgttgataacctcgctggacagcaggacattttgttccataaaagcggcctcccgtgccggatttgcactgacataccagctggcacaggtgcgttatgcctggtgtcgctga

SEQ ID NO: 103759 - DNA, 423 bp, Enterobacter aerogenes
atgatttatggcattacccgcggactgttctttgtggccgatcacgtctgtcgctattcccggagttgggaatggctgatgtggctggttgaggaagcccggacactgcgaaatgttgaggctgatttgaaactggctgaaaggtatgccggtgagcaaaaccgccctcattccatttcgctgatgaagtgtacgctttatgatgccggatttgcttacggcagattattactgtggcgtgcggatggtctgatgagaccctggccggcatgtctgcttcgccgtttaccggatatcggtcagcggattgatgcagtgatctggcagaaaggctgtgaagccggcttggatgagaccgtcagtgaatggatggcaatggagatggctgatgaataccttgtcggtatcgaactgagcgactga

SEQ ID NO: 103760 - DNA, 318 bp, Enterobacter aerogenes
atgactctttttacattgaattatggtgttgcccacgtaatgtctggtattgccagttatttatttccgcattcccgtgtttctcagcaactgaaggccgttgctaatgatgcccggatgctgaaaatcaccgcagaagaactggaggtgatacgtttggacgaaaaacggatgtatcagagcggagattacagagaactgccgtttattgagcttgatttgtatacaacggcatttcgttttggcgccctgatttactatggactcgcaaaccggtgcccccgcatttttgcttcaccggctgacagtcatcgctga

SEQ ID NO: 103761 - DNA, 363 bp, Enterobacter aerogenes; identical to SEQ ID NO: 14547

SEQ ID NO: 103762 - DNA, 195 bp, Enterobacter aerogenes
atgacagaactccgttcgtccttgaaatcgacggagggtgataacagaatagcgttatcatcaggattatttttacgcaacgcttcatataacctgcccgctgacggggaaatcacccgtcatcagggaatttctccgttttttcacgagaaattcaatgaaggtatctacatttccggaatcgtctttttttga

SEQ ID NO: 103763 - DNA, 612 bp, Enterobacter aerogenes; identical to SEQ ID NO: 14549

SEQ ID NO: 103764 - DNA, 909 bp, Enterobacter aerogenes
atgtccagaagagcaaaagccctgtcccgtgaaatgcatatccttgcacgtcaggccggagggagctttaaaaccattgcagaccgggtcaaaattgcagaacgggttgcggcagagctggccgggttgaatattcagatacgatctgttgagcaactgaaatcccgccatattgaaatgtatatccatgcccgcagagaacagaatatcagtttacgcagctgtcaaaacgaaatgtcggctatccgggcgatatttcgtgttgccggacgtcataaactggctgaccctaaacatgagcgcctcagtaatgaggcgctggggctttcaggtgccagcagggctggcacccgtaccgcgatatcggacgagcgctttcacgaagcgctcgctcggattgagccttatgatcagggggtggcattaactatgcagttatcccgtagtctgggattgagaaatgaagaagccgtgcagtcagtaaaatcattacggacctggcaacaggcgcttaaaaacggtaaagatcgcgttcatgtggtttttgggacaaaaggaggcagaccccgtgaagcattagtgccggataaagcccgtgtattaacattaattaataaagccattgaatatgcggataaacataacggttatttaattaatcgtccgtcattacattctgccaaagatcgttatattaatgtgatgcgacggataggcggatttattcacgaagaatcaaatcatggtttacggtatgcctatgctcaggatgttgaaaaatattatctcagtcagggattcagtcaaaaggaagcctatgcattaacctccatggatttagggcatggtgacggtcgtggcgattatattaaacgggtttatagtcagaaaggagatattgaggaataa

SEQ ID NO: 103765 - DNA, 258 bp, Enterobacter aerogenes
atgaattttattttttggtttgtggtcttaataggggcgggatatttgtggaggaggaggggttggttcagtaaaataaggaagcaatactcaaggagaaaaacaacattaaatggtaacaaaggatgtttatataataaaaaaaatgacaatgatgctttggaaggtaatggggattgtaataatttttattctgagaataaagaaagtttcttttggttaatgatcgagagaggtattaaattttacagaaaataa

SEQ ID NO: 103766 - DNA, 408 bp, Enterobacter aerogenes; identical to SEQ ID NO: 16655

SEQ ID NO: 103767 - DNA, 1515 bp, Enterobacter aerogenes
atgatgacaaacagttatctcgagtattttctcacgctgctggcctgggtggtgaataacggattgtggtcggtactgaccagcaccgggctgtttgcgctgccgctggtctttaaagtgctggggatctggctgaaagtgcgggaagagggggaggatgagggtaacaaaggttcactggcaattgtgcgtatcgagaacgcgctttacggcacctttgtggtgatcctgttttgttgtgtgccgttgatggaggtgagtgtcagtaccctgcaatttgataccagccggaccaaaacctgcggcacctggaccccggtgaagccggcggaatccggttacagcggcgtggtgtcgtcactggataatcagacagccaaaatcccgctgtggtggatgctggtacataagctgtcgaaaggggtgactcaggcggcggtggccagcattccgtgccggccggatttgcgtcaggtgcgttttgaggtgcagcacagcaacattaaaaatccggcgctggctgccgcacttcaggattttacggatgactgttactcacgtgccctgtatgactggaaagcgaaagatcagggaaaaacacaggatgaaaaaacgttacaggatatcacctggataggctcggccacctttatgaaaggggaatatcatcagatccagtcacggacaccgcgggcgggctttccctgggatgccgaccgggatgacgggtatgcgaatgtcaacggcaacggttacccgacctgttatcagtggtggaatgatgcgaatgcagggttactgaaacttgtcaaagagcagaccgatgaagggatgtggctgcgtgcccgggcggcgatgaagctgattaataaaaactcgaaagagtttgaggaggccatcgtccgccggctggtgagtccggcgaatctggatgtctccggcggccgggtataccggggatacgggggtaatgcggatatgacggtgatgaatgagctggccagaatgggaggggtagccgggacttcgctggcgtcactgggggcattccctgcctttgatacgatgcgacagtccttaccgatggtgcaggggctgatgttaatggcggtgtatatcatgatcccgatggtgctgatgttttcggcgtatgaatttaagacggcgataacggtgacgtttgtgatatttgcgctgaactttctgacattctggtgggagctggcacgctggatagacagctggatgatggaggcactgtataattccgatacgcacagtcagtggaatatgaacgggcttcagaacacgtctgatgatgtcattatgaacctggtaatgggaacgatgtttttggtgttgccggcgttgtggttgacagcatttggttgggctggagctaaagttgggtccgagctaggtaatatgacatctaacgcgacttcacctgcgcatagtgcgggggggaaaggaggacagttagcagaacaagctatttctaaaaaagttaactaa

SEQ ID NO: 103768 - DNA, 339 bp, Enterobacter aerogenes
atgacgaaaggaaaaaccgggcgccggttatggccggtgctgaaagtaaccgggctgaccctgctcagtatggtggtgttgctggcggtggctcagctggggctgagttattacggtgaggcggacagtctgcgccgggcgttttaccgtgcccgctggttctggctggtctggcggtgtgtgttgtacggagccgtggcggttggattatggaaactgtatcaccacccgaaagtcagtgagacggcccggcgcagtctgaagcgcagcgggctggcgatggccgcctttgtggcggtgagtgaatggtcagtctgggcgggaggtgacggcttatga

SEQ ID NO: 103769 - DNA, 1443 bp, Enterobacter aerogenes
atgatgaaagcaaaacgacacacgttttttccgccggcgctgacactgatggtgttatgcagtgtaccggcattttctgtccgggccgggctggatttttctgccggtgcgaatgatatcggctacggcgcaaatgtttccggcgcggtctccgacaaactgtactacaacctgggcggcggcacggtgttatcccagccgccggggcgcagtaatctgcaacgtctggggatgagcatgggctggaacagtgatctgatgtgcggcaattttgatatcaaaaccacggtgggcaaccagctgaacggggtgacggccggctttaagaatctgatgagtgaggtgatccagaatgccaccggggcggtggccagtctgccggcgatggctatccagcgggcgaatcccggcctgtatgaaatgctgaccaacggggtgttgcaggctaatgtggcgtttgataaggcgcagctgaactgtcagaacatggctaaacggatgatggacttttcagaaaataatcagtggacgcaggcggcgatcctcgaagaagcaaagaatatcatcaataacagtgacggggatgcggtaaaaactgaccagcaaattcagcaaagcagtggcgataaaggggttgtatggataggcgggaaacagcgcggtggggttggtcagcctgcgattcagccggcgcaggattttgcacaggccggctttaatatcatgaacggtctgccggcaaccagtacggccccggtgccggccggccagtgtaacggagccgcttgcaggcgctttgccaacagtgaggaagccgctcaggtggtcacacaggtgctgggcagcaaatcggtccgcacctgcaccaatccggcggattgtcagagcggcggtgaggcggagcaaccgggcagttcccagccaggaaccgggctggcacaggtgctggagaccaccacccgggaaaatttggaacagctgcataaactggtgaacagccggggcgcggtcggggcggcagagttggcgaaactgaaaaccggcagcctgacggtctcccggggggtgattgaagcgctgcgccgggatccggataaaacggcattaacacagcgtctggccggtgagctggcgatggcggacacgatggagctggcgctgacgatgcgccggatgctgatcaccggccagggggagccgaatgccggtaattttccgaaagcccaggagatcggtaaccagtcggttgaccagctggatcgcgaaatcgggatgctgcaaacggaaatggaagtgcgtaaatccattgccaataacgcgatgctgacggtgattgagcgtgatcagcaacggacacaggcgaaccctgccacccagaccccagataatacggatgtgcgtgtacagggactggagcaaaacagtgacaccggaggacgttaa

SEQ ID NO: 103770 - DNA, 975 bp, Enterobacter aerogenes
atgacccgacaatcacatcgccggcgtctggcgggggctttgttactcggttgttcactggtgccggtggcggaagccagtctgagtaccgccactctggtcgcttctgcggcctcaccgtcgtgtatcagctggcgtatcagcgggatttgctactggctgaagtgtggctggggcggctgccgtatccggacatctgtccgggtgtcacattttattccgcaggcggtggtctcggcctaccatgccccgggtgaaaacccgtggcgggaaatgtcactggtcagcggggcggccggcgggattgaaaatgccgtgaccggcgtgctgagcggggtatctgccgggggcggaaacagtgaacagaagtttgaggcaaaacgtaaaaccgccctgcactttttttatgcggatgctatcggtcatccggcaaccacccttatcggcggcagtattccggggtattcctgtgacagcgcagccacaccgctgtttccttattacctgagcacgctcgacagtgtgccgtggcggctcggtgtgccggaaatggcgtatccggaagcgataattcccgggaaacgggaaatcggggggcagagccggggcaacatgtggggaaatctctatccgcgcagcggttttgtcaaccagcaggacggggataaagcggcggctgtggtggcgcagcgcgtggcagatattatgacccgcaccgggcaggcgcatacctatgtgcccctgaaaggcaaccgccgggatggctattggccgccggacgcggtgacggagaataccgggacaaaaaaccataaatggcagcgcctgtcgccggggctgaaaaacagctgtgcggtgtttccggatgagggcggagcacaggcacaggacggtaattatgcctgggcattgtggcagccgtacagctgctgcaagcgcatggggcaaaaatttctgtacagcacaacgttttaa

SEQ ID NO: 103771 - DNA, 441 bp, Enterobacter aerogenes
atgaaaaaacgatttttatctctttccggattgctgatgctgtcgctgtcatgcctgccgttgaccgccggggcggcagtggtgctgtataccacgcaggatgacgctctgccgcagacggacatcccgtttgaggtggtgtatctggatgcgcctgaacgcctgctggatgaggccctgcttcagccggggacggaactgagtgaagcggatgccccgcacatcaccgccctgttacaaagtccggcctggcaggccagagaaacggcattacggcaggcttatcagggcgtggttcaggcctggcagctgggggtgtcatctctgccggcggtcgtcgttgatgcgcagtgggtggtttacggcaccaccgatattgcacaggcggtgacgcagatacagcagtaccgggaacaacaggaaggaggaggtcaaccatga

SEQ ID NO: 103772 - DNA, 2226 bp, Enterobacter aerogenes
atgaaaacgacgggagttaaagtaacgcttttgtcgctggttgtcagttattcctgcgctttacaggccaaaaacgtgtcactgggggacacggccgtggccacggggcagcacagtacggctgtcggtgagggcagtatggcgctggggaacaatatgacggcggaacaggcgcaggcggcgatgaaagcccagaatgccctgttgcagaacagggcgcaggcgcatgagcagtacatgcagacgcaggccctgtttgacagtaaatcgctggcgaacagcaatattctggagcgtcaggaagcgatgaaaccgttgttgcagcaacaggagaccctggcgggtcagcgtaccgcgcaacagcagcaggtgacacaggcacagcaggtcgctgaccggatggcacagatttatgaacgcaatctgggggcggtttcacagattgtggatgagaattttgtggcgttgtggcagcaggggcaggctgaccgtctggctcaggaagtgaaaaaacgggttgagcaggatacgtcggtcagtaatgacacgcagttttatgtcagttatgttaatgcctatattgaagcgaaaaccagaagtgctctggttaatgaaaccatcaaagagaaaaccggttctcagattacgaccaactatcagggtgtggccctgtccccggtactgagtgccggccacagtgataaagcgatgctgtggtcggatgcggtcacggacagcgagcagaagaaacaattatcccgtttacacctgaataccgcggccctgaagggcgttgccggttatcaggaagagctggccaaaatcgccctgatcacctctgcggacgggaaaaagaatctgtatcaggcttatcagaaaaatgcccggcagcaaattgagcaggggctcaccggggtgacagaggccgggaagcagatcctgtcagagctgtatctggataacatcgatgaaggcacctttaatcagatggtcagcggtattttcacccgctatgagaatcagctgaactacctgatccagctggataaggtcaacagtttatcgccggacagcccggattatgccaaagagttacagcaactgctggtactggaaagccgtccccgggataacaccgtcgggctgaataccaacccggaggcgctgaaacaaaaagtggatcagtaccttcaggacaatgcgctcagtcacacacaggccatgtcgtcacaggccacacagctgaaacagcagttatcggcggaaaaagccgtcaccgatcaggcactgaagcaggcagaaacgcaactctcccggctggaaaaggatctctccgcgctggatacaaagttgtctgatttgcgtccgacgcaatccgagctggaaaacatccgggatctggagaaggtgaaagccgaactggcgcagaaacaggcggaatatcaggcggcggataaagccctgaatgaggcgcagagtacgctgagtcagggtaaacaggctgttgcggtcggggataagagtctggcgctgggcgaaaaatccgtggcactgagtgtggatgcccgggcgctggcgaaaaacagtgtggcactgggggacggcagcctggctgaccgggataacagcgtgtccgtcggccgtgaaggtcaggaacgttttctgacgcatgtggcggccggcattgcaaaaacggatgcggtcaacaaagggcaactggatgaggagcgggatgcgcgtattgccggcgataagcagacgctgaaacaggccatggactacaccgatgtgagcattcagtacagtgaggcgaagataaacaagcggattacggaagagcagcaggcccgtattgagggggaggaacagaccctggcggccgcaaaccgctataccgatgagacgttcgggcaggtgacccacacggtgctggacaatgcccggcagtataccgaccagcgtttcagtcagctggacaataaaatcagtcaggtggagaaacgggccaatgcggggattgccggggtgaccgcaatatcttccattccgtatgtgaacagtgagcgtttttcgttcgggatggcgatggggcattaccgtgatgcacaggcgatagccaccggggtgcagtataagccgacggccaataccaatgtgcgcctgaatgcgtcatggaataacggcggcgataccagtatcggcgccgggtttgcggtgggctggtaa

SEQ ID NO: 103773 - DNA, 2868 bp, Enterobacter aerogenes
atgggattttcattattccgctcacgccggaaagcgcaggcggtttctgctgaaaaaacggatgaaaacaaggctgacaaaaccgtacaccgcagtacaccggcagagaatgccggtttaggccgtcagccgctttcccggccgggaaaaatgacccgggcggatgagcagaagatttaccatgcgaatccgtcctttattgattacctgccctgggtggaatttctggatgaggagcaatgcctgctgcttgatgacggggtgtcggtcggggcggtgtatgccgttgagccggcgccgacggaagggcgctctgccggccgtctgctcgaaatccgggatgcggtggaggatgcgcttcaggacagtctggatgagcatgatgataacccgtgggtggtgcagtttttttgtcaggatgaggacgacgtgagcgtcacactggccacattgcgggactatatcctgccggcggcccggggcaccgcgtttaccgaagcctggctgaccgaaatggcgcgtcatttacgggggattgcccgtccggaagggctgtttaaggacacggaggtgaccggacaaccctggcgcggacagcagcgccggacccggatggtggtttaccgccggctggggaacagctataccgatccgatgccgccggtggcgatgctcaatcagatgtgtgaccggctggtcagcagtctgggcagtgccggcgtgcagtgtgtccgccaggacgggaggcaggtgcatcagtggctgctgcgtcatttcaatccggcccctgactgggtggaccgggagacgctgtaccgggaaggggcgtactggccggcggcggaggaagccccgggcaccctgccggtgctgaaggattttgcggaaacgctgtggtttaccccgccccggtcggatgtggaaaacggcgtgtggtggtttgataacctggcgcacggtgtggtgaatatcgaaaaactgcgtaaagccccggggccggggcacctgaccggggagcagaagcgcggtgacaaaaatatcaatgcgctgatggacctgtttccggaagggacgatgctgtcgatgaccatcatcacacagcctcaggatacgctggagcaggaatttacccggctggggaaaaactcggtgggggaaaacaccgactcgcaacgtacccgccgggacgtggaaaccgccagaggtttactggggcaccgccataagctttaccgggcctccctgtcattgctgctgcgtgccggctcggtggaggaactgaacaaaaagcgcgtggatctgacggccacgctgctgaatgccggtctggagccggtgaagccggaatatgatgtggcgccgctgaacgggtatctgcgtgccctgccgatgtgttttgacccgcagacggataaaaaacactggtatacccggctgacctgggtacagcacctggccggattactgccggtgaccgggcgcaccagcggcaccgggcatcccggctggagtttctttaaccggggcggcggggtgctgacctttgatccgcagaataaacaggatcgtacccagaatgcgcatctgctgttattcggtcccaccggggccggtaaatccgccaccttatgcgcacagttatcgcagctgatggcggtccgccgtccgcgtctgtttattgcggaggccggtaactcctttggtttactggcggactattacgccagtctggggctgagtgtcaataaggtcagtgtcaagcccggcagcggggtgcgtctgccgctgtttgcggatgcgcatcagctgctgatgatggatgaacagcgtctggcactgaatgcggatgaactgccagagacggacagtgaatctgaggatgatgacgggcagcgtgacattctgggggaaatggaaatctccgcccgcatgatgatcaccggcggggatgtgcgggaagaagcggagctgaagcgggctgaccgggcgatgatccgccgggcgctgatggcgggggcccgggcgtcttatgccgccgaccggcagatgctgccggcggatttgcaggaggcgctgtatgccctctcccggggggaaggtgaagaggaagggcgggcattaaatccgcagcgccgggcgaaagcggccgaaatggcggaatccctggggatgtttaccgaaccgggcagttttgagcatgagctgtttaatctgccgggggagctgtggccggaggcggatgtgaccctgattgatttggggcacctggcgcgggaagggtatgaggcccagatggcgctgacgatggtgagtcttatcaactccatcaacaatattgccgagcgggatcagtaccgggcccgggacattaattttgtggtggatgaggcgcatatcgtgacggtcaacccgctgttatccccctatgtgaccaaagtggtgaaaatgtggcggaaactgggggcctggctgtggctggcgacccagaacctcgatgactatccggactgtgccgagaaaatgctcaatatggcggagtggtgggtgtgtctgacgatgccgcagaaagaggtggaggcaatcgcccgctttaagacgctcagtgaggagcagaaacaggtgctgctgtccgcagccaaactctccggctgttacacggaaggggtggtgctggcgcggaaagtggaggcgctgttccgggtggtacagccgagcttatatctggcgctggggatgacggaaaaagaggagaagcagcaacggcgggtgctgatggagcaatacggatgcagtgagctggaagcggcgttcagggtggcagatgaacttgaccggaaacgggggttaccgccccgggtgccgggatga

SEQ ID NO: 103774 - DNA, 438 bp, Enterobacter aerogenes; identical to SEQ ID NO: 14572

SEQ ID NO: 103775 - DNA, 486 bp, Enterobacter aerogenes
gtgacgtattttgcgaagccgggggtgctggctgtgacgccggtgacgtttccgctggtgtttgtgttcagtgccggacaggccggttgtactggaagtcatttttgcctgacggtggccggtcatcaggtgtttgatgaggagcaacagcagctgattgccggcatgtcaccggcgacgatacagctggcgtggcagagtaccgccggtgagacgcccggggcggttctgtctgtgggccgtcaccgggtggggctgagtgacaacgacattaccgtttaccggtttgccccgcgggatgaggcgtggccgcaggacagtgactgggatcgcctgctgtacaccgtttttaaaggggaggcgccggataaagccggctggcaatgtgtgcctttttcactatctgaactgagctgtcacggtgagtttgcccggctgacctgccggggggcgatcctgaagggcgcgggaggcgtcatatcatga

SEQ ID NO: 103776 - DNA, 1530 bp, Enterobacter aerogenes
atgaaagtgaaatccaatacgctggtcaaaattctggtgccgtccgcactggcgttggcggtgctgattggtatcaaaagctgccagcccgacacgccggtcaccggcagcggacaggacaacctgtctcagtcaatcaatgaccttgacccaggggagctgaagtcactcgggattgagggggataccccggccgatacactgaggacgctgattggcactatgaaaacggtacgtgaccgtcaggcggaattgatcgcccagaatgagaaattgctggaagagaatgcgcagctgcgtaaccggcagcagaatgtgtcggggcagatccagtctgcggtggcttccgtccgtcaggaagcggagagtcagcagcgtgccctgcaacaggagcagcagacactgatgcggcgtctggatagcctgggggaaacgctgacagcatcaggtggtcagccggctcagggcagcggacaaggcgatattccgctgggactggggctggataccgggggcagcggactgacggtgaaagacgggttgctgtgggctgagccgcaggatgcacaaccggctgaaccggggcggatggtgaacggacaaccggctgaaccggggcggatggtgaacggacaaccggctaaaccggcgtttccgacctcttttctggaggataacgccattacccgtcagaaagcggaactggaccgggtggccaaaaatcagcgcacgctctccggtacagtggacggtgaggcccataccgaaccggcgtacacgataccggagaatgccaccctggtgggcagccaggcgatgacggcgttgctggggcgggtgcccattgacggtaaagtgaccgatccgtatccgttcaaggtggtggtgggaaaagacaacctcacggcgaacggcattgagttaccggatgtggaaggggcggtgatcagcggctcggccaccggtgactggacattgtcctgtgtgcgcggggatatcacctcgatcacctttgtttttacggacggcacgatccgcacggtgccgaagccggctgaccggacggacggcggcagtcaggccaacagcggacagaatgcccgtaataacggcgggtcgctcggctggatttcagatgagagcgggatcccgtgtatcagcggtgaacgtaaaaccaatgccggcacctatctgccgaccctgtttgccctgacggcagcggcctcggccggggatgcgatgtcgcagagtcagtataccgcgcagaacaacgggtacggtatcacctcctcgctctccggggatgcggggaaagcggcgctgggcagtgccatcggcggcgggtttaaggatgtggcggactgggtgaaatcccgctacgggcagacctttgatgcggtgtatgtgccgccggggcagaaagtcgcggtgcatatcagccgtcagatcccggtggattatgaatcgcagggacgccgggtgaattacggtttttcactgacagagggtgaggaaggaggtctggagtga

SEQ ID NO: 103777 - DNA, 897 bp, Enterobacter aerogenes
atgagcataaaacgtcatctgacggcctgtgctctggggatttcggcgatgttttctgtggccgctctgccgctgccggtgcaggcggtagagctggtccgctgggagcgtattccgttaccggtttctctgcatgtgggggaagagcgcattgtgtttgtggaaaaaaatgtgcgtgtcggttttccaccgtctctgaatgagaaactgcggatccagagtaccggaggggcggtgtacctgcgggcggaaagcgccttcccgcagacccgccttcagttacaggatgtggaaagcggggaaatcctgttgctggatgtgacggccactgccggtaaagggaagctggagccggtgcgggtggtgtacagcggtgaagtcagtacgcagcgtgacagtcagagcgtcagacgcagcgggcaggctgcgggggcagcagccgatgccgtaccggaaagcgtggaccgcaaagcgaaaacccgttatccggcgccgttaccggtcttactgacccgttatgccgcccagagtctgtatgcaccgttaagaacagtggagccggtgtccggcgtacaacctttgccactgaccttaccaaaaacactgacagcactctacccgtctgaaccactgatcgcgcggccgctggccggctggcaggcggcggagtaccgggtggtggcggtgaaactgaccaatcagtccgctcagaaagtcgtgctggatccccgtcagttgcaggggcagtttgtcagcgccacgttccagcatcagtggctggacgcgaagggcacaccggaggataccaccacagtgtatctggtgatgaaaggcaaaccggataaggcgtttcctgcggagccgcctgtccggaggacgggagggaaagcccgatga

SEQ ID NO: 103778 - DNA, 645 bp, Enterobacter aerogenes
atgagtaaatttcgtcatgccctgcaaaaccgggaccagcacattctgacactgcggatgatctgcggggtgctggtgctctgcctgtttgtggcctttgccggctggatgcgggcgccggctaaactgacgatccataatccgccggatttgcgctccggcagtacccgggcatggtgggaagtgccgctgccgacggtgtacgctttcagcttttatatttttcagcaactgaatgcctggccgaaagacggcgaggtggattatccgcgaaagattgcacagctcagtgcctatctgacgccgtcctgccgggcgtattttgagaaagaggccgcttaccgtactacgctcggggagctgaaagggcgttcccgggtggtgtatgagatcccgggacgcgggttcagtgaggataaagtccgggtgattgaccgggataactggatcgtgcgcctggatttggtagcggatgaatattttagcgcggagccggtcaagcgagcgacggtacgttatccggtgaaagtggtgcgctgggagggcgatccggaaagtaatccgtttggtctggccctggactgctatgacgggctgcctcagcgtctggaagcggcggagcagaataaggaggtcagtcaatga

SEQ ID NO: 103779 - DNA, 417 bp, Enterobacter aerogenes; identical to SEQ ID NO: 14567

SEQ ID NO: 103780 - DNA, 369 bp, Enterobacter aerogenes
atggatatgaaatcattttggggacgtggtgtccgtcgtattggtgcgtcagtggtgacgttattcactttattcagtctgatgccggcgtatgccgcactgccttcggtggaacccccttcttccggtggcggcggcggactgatggacaccattaaaggctatcttaatgacggcattgtgattggcgggctggttgtggctgcgacggcttttatcgtggtggccattgccgcggtcaccacgttcaatgaagtgcgcgaccaaaaggctggctggggtaaattcggtacaattattgtagtcggtgtcgtcctgattgtggcggtcgtctggctggccggaaaatccgccactattattttttaa

SEQ ID NO: 103781 - DNA, 240 bp, Enterobacter aerogenes
atgaatccgtcacagcaggcggcatttgaggctgctgccggctcggggatgtctccggctgttctgaatctgttgtgtatcggggcattactggcggtgctgtttttatgggcagcctggggactggttgatgtttaccggggctgggcaaatgaaaatgttcgtactgcaagggtggggcagtttgctgtccgggcagtgatattactggtggtctgcatctggatgtttgccagttga

SEQ ID NO: 103782 - DNA, 327 bp, Enterobacter aerogenes; identical to SEQ ID NO: 14564

SEQ ID NO: 103783 - DNA, 609 bp, Enterobacter aerogenes; identical to SEQ ID NO: 14563

SEQ ID NO: 103784 - DNA, 750 bp, Enterobacter aerogenes; identical to SEQ ID NO: 14562

SEQ ID NO: 103785 - DNA, 2148 bp, Enterobacter aerogenes
atgagtgatcgttatgtgatagaggcctggctgcgaccggccgtggaattgaacagtgctctggtgtccggcggggcggcgtttgtgtgtgcggtagcgccctgggcagtggcattgtctccgtccgtgagttatgtcaccgccggtgcgtttgccggtttttccgcattgcgggcacatcagggattccgggtattacgttaccgccggaatctccggcgtctgccccgctatcaggtgacgtcggcacaggtgccggtcagccggcagcgtctgtttctgggaaaagggtttcagtggcagcaaaaacacacgcaacgcctgctggaaacccagcgtccggaagtggagcggtatgttcagccgccggcacattaccggctggcccggcagtttgaactccgttttgaatcccgttttccggcggtttgccggcttttgcaaaaagacagttggctgaatccggtccgcccgctgacgccggtgggggggaatccggtgttacacggtgtggagccggatgaggtgaatgtgaccatggatttgcgtgaacgggttggtcatatgctggtactggggaccacccgtgtcggcaaaacccgtctggcggaagtgctgatcactcaggatatccgccgggggaatatcacgattgtttttgatccgaaaggggatgcggatttattgcgccggatgtgggcggaagcgcatcgtgcggggcgcagtgaggagttttatgtttttcacttgggctggcctgatatcagtgcccgttataacgccatcgggcgttttggccgagtatcggaagtcgcggggcgggttgccggccagttatccggggaagggaacagcgcggcgttccgggagtttgcctggcggtttgttaatatcattgcccgggcactggttgctctgggggagcgtccggattatgccaaaattttacgttatgtcaccaatatcggggaactctatcagacatattcgatgcaggtgattaaagcacaactacctgatttgtttgcccaaatcgagaatgcgcagaacgcgctgacggtcgaggatgtgccccgtcatctgcaaagtgatccgaaagctgtggctatctgggcaacggagctggcgttaagtagtgagaaagggaaaaaaatctatgatccgattttggacgggctgcgcagtgcgatccgttatgaccggacctattttgataaaatagtggcttctctgctgccgttactggaaaaactgactaccggaaaaactgccgccctgttgtcgccggattacaccaatatgcaggatccccgtccgatttttgactggcagcaggtgattcggaaaaaagggattgtatatgtcgggctggatgcgttatcggatgcggaagtggcggcagcggtggggaattccatgtttgcggatttggtctcggtagccgggcatatttataaattcgggactcaggatggactgccggaggatgagcacgccggaaaattaccgatcagcctgcattgcgatgaatttaatgaactgatgggggatgaatttattccgttactgaacaagagcggcggcgcggggattgaagtgacggcctacacacagacctggtctgatattgaagcccggctggggaatgcggcgaaatcggcgcaggtcaccggtaactttaatacgctggtgatgttgcgtgtccgtgaactgatgaccgcgaaattactgacggaacagttaccggaagtggatatttacaccaaaaccctggtatccgggatcaccgatatttccaatccgaggcaggggagtgattttacctccaatacccaggacagggtcagtatggtggctaaaccgctgctgttaccggcagatattattcagttaccgaaaggacaggcgtttgcgctgctggaaggcgggaagttatggaaaatcaggatgcccctgccggcggcagaggctgatgccctgatgccaccggatttacaaaaaatcgcacagtatatggagaaaaattaccgtaccggcgaaacttggtggactgcgtcatcattttcggatgcgcggcatgacagcggcggtatgaatgtggctgagatggcaccggataccgaagggggcaacgatggcaactgctga

SEQ ID NO: 103786 - DNA, 198 bp, Enterobacter aerogenes; identical to SEQ ID NO: 14560

SEQ ID NO: 103787 - DNA, 555 bp, Enterobacter aerogenes
atgcgaaataatcctgaagaaaagacaacgcgagccttttatcccctgcccgtcttggggatgctgctgttttgcgcagccggcggcagtcaggcggcattaacggtggtggcggattatggcgggcaaccggcagcacctttttatgacgcgataaataatgccccgaatgaatggacagcaaagccggcgtcccgccctctgccgtccgtgatggccccgtcaatggtgttgccggttgagacaccggaaatgacgccgggggaggtggatgaccgcgtcctgcatttaccggggattggggcactgtatctggtgggggatgatccgttatcccgggcatggctcacacagcacgcagcccagctgaatgcaatgaatgcggccgggatggtggtgaatgtgaaatcggaaaccgggttacaggcgcttcaggcgctggctcagggaggactgctctccccagcttctggcaccgatttagctcaccgtcttcagttatcacattacccagttctgatcacggaaaccgggttgacccagcaggtgaagtaa

SEQ ID NO: 103788 - DNA, 639 bp, Enterobacter aerogenes; identical to SEQ ID NO: 14558

SEQ ID NO: 103789 - DNA, 735 bp, Enterobacter aerogenes
atgaaaaacataagatgcgtggttttactgggtgggtgtctgatgtccgcaccgctgacagctgcacagtctgtttccggggcaacccgaccggttcagattgaggcggggaaatcggctgagagtcagacacagtcattgcagtatgaggcgcaggaatggggactgagtgcggaggagtatgcccgttttgaggcgctgatgaaagggcggcgcggtattcagtctcccggactggatcccctgacgacattgggtattgaggcccggtcagacgaagagcgccgccggctggctgaaaagtgggtacagcaggaatttgccagggcagaaaaagagctggcgtttcagcgggaagtagatgctgcctggaagcggctctatggtcaggtattaccggtcagtctgggaacattcggcaggatggaacagggaacagcgcagcgccggcaggcactgtttgtgcaggcggaaaattgtagcgcgtgtgatgcccgtctggctactctgctggccggcaaacagccgtttgatatttatgtgctggggacaaagggggatgataaccgcctgagggcttgggccagacaaaaaaatatcccggcagagcgcgtcagaaagcgggaaattacgttaaatcatgatggcggtctctcgcttcagtacggactgaccaccacaccggtggtgatgcaacagttaccggatgggcggtggcgtccgctcacaccttaa

SEQ ID NO: 103790 - DNA, 741 bp, Enterobacter aerogenes
atgactcattctgaagaattgtccgtaaccccattacataaaaaaatttaccggggggtgattgtgacgggcgtggtcgcctgtgctctggtggccggtatcccgctgtttatccacagtaatgttatcagttcacactcagaggctctgtcacaactcggacaacgattacaggcgattgagatgaagatggctgactctgtcacggatgaccggatgaatgcgcaactggacgtgctccgtcaggggctgacgatgctaaaacaggatgtggcatcacagcgcgacaccctcagaacggtgacagcacagctggcggtggccggcaaaccggatgaacagatcgccgtactgtctgacgggctggaaaaacggctggcacaactggaaacccgccaggcacagtgggcactggcgttacatcagttgcaggaacagcgtcagccggaacaaaaaacggtcaatcccccggttgtcagggcaaaacccgccacgccggaaacttcccgtctcggggcttctgtccgtccatcccggaccgtgccgtttcagttaaccgcgattgaacagcggggcggtcgtcttcttgccgcactggctcctgcggatattcgtcagctggggcaggtacagttactgccggtaggcggacgttatcagggctgggaaatgaccgacattcagactgatcgtgtgacattacgttatcaggggcgcacagtgacgttgcgcctgccataa

SEQ ID NO: 103791 - DNA, 663 bp, Enterobacter aerogenes
atgcgtatgaaaactctcccgatatgtcttgccctgacctcactgttgttggggggctgtgcagacaagccagcccagcctacggaagcggcggcagacatcgcgattccgctcaacgtcggttatgctcagccgctgctcccagatatttatccgtcagccccggaagtggtgcgttatgaccgttaccggctggttgatatttcgccttcacaggcacagcgttacccgctggaacaaattgttcatctgcgtattcctgcttccgtctccccgacagtcggggatgcgctacattatgccctgcgtgattccggatatcgtctgtgcacgtccgatggacaggcgaaccacctttatcgtttgccgttacccgctgttcattatcagatgggatcgatccgcctgaatgtggcgttacagatccttgtcggtccggcctggcagttgtgggtggatgatgtgcaacgggaagtgtgttaccgacttcgtccggaatacacgccatctgcgccggatgcaggaatgagcggcgcttcatccgtctctgtggtcaccccactttctgcgggcagtacgccattaccggtgccaccggtgcttaacacttccactggtcataccgatgtgaataaggttcatcgcggagggtggctgaaatga

SEQ ID NO: 103792 - DNA, 1938 bp, Enterobacter aerogenes
atggtaacagtaagctctgtagctgccacagaacagcatgataatacaataactgttactgcaactaagcgcattcaaagtagttttgatgtaattggtaatgtgaatgttcaaactgatgaacagttaaaaaaatctttagttaatcaaactgatgatttgagcgcagtttttcctgagttgttatctgcaaaccgaagttcgcgtatttataacaatatgactcttcggggccaatcttcggccgatttcttttctccaagtttgggactgtttgttgatggtgctccccagctttctcaatcgtatgctcaatctcttcaaggggttgagcaagttgagctacttaaaggcccacaaggagttatttatgggcgtggcacattgggagggattatcagtgttattaccaaaaaacccagtagtcacgctgaagcatggttaggggggcaatattttggtcaaggggaaagaatcaatacaggaggaagcactggctacatggaaaacggctgggcttttcaggggaatgttagtctcgatagaaataatggttctttgaacaatccagcatgggataaaaaaaatgttgatagcagagatataaaagctggatggttgtctgctaattatatttcccctgatacattatttgagtctaatttaaaagtaggtggagaaaattaccattctcatgaggaatattttgttcctttttcacctctttcacgttcaaaaattgatactgaatggttatatgaaacacctaatcttaaacgtaaattaaaaaatatttcctggaatacaggttatgattttaatgatgaatggaagtttaaaacgatactttcttatcaaaatatggatatagatagattgtttatggacggaacgttacaagatgattctcaggatattttgtattcagaagcaagagctaattatgaggggggggatctaagtggaattataggggtatcatttcaaaagatgggttatagacatgataatttatctgtagggaaagtcggaatgggaggaaaaaaatctgataatgatatttataattactctggatattttgatggtgcatacaggataaatgacaattgggagttaggtgcaggggctcgtttttctcacgaaaaagcaaaaactcgaatgattattttagaaaaaggaaaaggtgagtctaattataataataatgcagtttttaatgcctttattccacgagcaagtatcgcctggcttccaaatgagcagaatcgtatatggtttggagttggccgcggttttaaacctggtggttttaacaaagaaggggttgataaactagctctgacttcttataaatcggaaattgccacggaaatggaattaggttggaaatggcacagtgttaatgataaccatatggccgaaattactttatatcaaatagatagtaaagatgttcaaggatatgtaggtgttattggttatcaggcattatctaatatgggagattcaagaagtcgagggatagaatatctttggaaatcaaagcttacccctaatcatagtatttcactgggtggcatgttcaatcaatcagagtttaccagtggagaacataaaaataaaagacctgcttatactcctagttatagttcattaatttcatgggagggcttatatggcaaggagcaaaagtggtcttctcggattgcagtcagatttaatggaccattttacattaatgagcaaaataatttagaacaagggcattatactgttgttgatgcatcaatatcatggcaccctacaaagcaatatgaacttagtatctatgcgaaaaatattggtgatgctttatatcgaacgtatgcatttggtaataaagcacagctaggtaatccgagagagatcggggttcagggaagtattaacttttag

SEQ ID NO: 103793 - DNA, 312 bp, Enterobacter aerogenes; identical to SEQ ID NO: 16660

SEQ ID NO: 103794 - DNA, 333 bp, Enterobacter aerogenes
gtgtctgatgacagcgccgccgacagccacacagtctgtttccggggggcagattggcagattgaggcggggaaatcggctaagagtcagactcagtcattgcagtatgaggcgcaggaatggggactgagtgcggaggagtatgcccgttttgaagcgctgatgaaagggtggcgcggtattcagtctctcggcctggatcctctgacgacactgggcattgaggcccggtcagatgaggagcgctgtcggctggctgaaaagtgggtacagcaggaatttgcctgggcagaaaaagagctggcgtttcagcgggaagtggatgcagcctag

SEQ ID NO: 103795 - DNA, 924 bp, Enterobacter aerogenes
gtgactaaaaatacacaacaaccggtacatgatgcgttattcaagcagtttttaacgcatcctgagaatgcccgggattttttctcggtgcatttgccggccaacatcctgcctttgtgcgatttaagtacactgcgcctggagccggccagttttgtggagcgccgtttacgtcagctgcattcggatgtgctgtattccgtgcagatgacggaaggggaagggtatatctactgcctgatcgagcaccagtcaaaaccggatcggttaatgggttttcgtctgatgcattatgcgatgtcagcgatagcgcatcatctgaaaaaatcgccggcggataagaccctgccgttggtggtgccgtttctgttttatcagggcagtgtttgtccttatccgtacagcatgaactggctggacgggttcgccgatccggcgctggctcagcagctgtatacccggtcgtttccgttagtggatttgagtgtgctcagtgatgaggaaatcctgacacacaagggtattgccctgctggagctggttcagaaacatattcggacccgcgacggtttaatggcggtattgccgataatcgcgcagataattaactcgcaacacaatacggttgaccaggtgaggagtgtgatagaatatattgcctatcaggggtatattctggatgaatcccgctttttcagccaattgattgcactgtcaccggagtataaaacgatgctgacaacgattgcagaacaacttgagcaaaaaggtatcgaaaaaggtatcgaaaaaggtatcgaaaaaggtattggcctgggtgttgaaaaagtcgcccgctcattattacaacagggggttgatctgaacattattatgcaatgtaccggactgacccgggaaaagattgagtcattaaaacattaa

SEQ ID NO: 103796 - DNA, 468 bp, Enterobacter aerogenes
atgaccagcaaaaataatacaacatctgaaaataaatactttaatctgcatgtgaacgggattgggtatttatcgaatatccgtcaggttaacggccctaaagggcagtttttaaccgcagtgattaatgcactcagtggaccggctgataaccctgtgtatgttcgttttgatacgaccgttgtcggggagaatacggtctcactggtcagacggtgtatcaaagcggtggatgaggacaaaaaagtcctaaccgggtttacattaagtaacctggcttccgatattttcaccctgacaaaaggtgagcatgccggagaacagcgggtcagcctgaaagccaggctgctgaatattgactggattaaaatcggtaaagaagtggtatataaagccgagaaacaccagtcaacaccaccagagactgaacagccggtatccagagagtatgtggctgattctttttag

SEQ ID NO: 103797 - DNA, 546 bp, Enterobacter aerogenes
atgaagaatgcgtcctcctttattaccgatccgacattaaaaaaagtcctgaaagagaatgcggggctggggacagaggcaacccgggcagggatcatcaccacgctggaaaacaggaaattgattgtcaggcagaaaaaaacactccgggcgacagacaccggttgtcagctgattgatgccctgccggcagcctgtacagatccgggaatgacggcgttatgggaacaatcactcgagcaggttgcacagggaaatctgtctctggatgtgtttatgcaaaagcaaatcagctggttggcacatctcattaaaaaaggcggggaaatgccgctggcgctggatctgccaccgatgccatcctgcccgtcgtgtcatggaaagatggtcttacgggagagcagtaaaggccgtttctggagttgtcagcgttatccggattgtaaagggagtgtaccattaccggaaaaaatgcagggggttacccgggggatgaataaaagaaagaaggccgtgaagaagagcataacaggactctttacctga

SEQ ID NO: 103798 - DNA, 1458 bp, Enterobacter aerogenes
atgaaattatttctgtgcgaaaagccgtctcaggccaaagatattgcccgggtgatcggcgctcatcagcggcgggataatttttttcagggaaatggcgttcaggtcgcctgggcaagaggtcatctgctggagcaggctgaaccggaggcttatggcgcacagtttgcggccccctggcggcagagtgccttacccgttattcctgaacagtggaaaatggtggttaaaaaagacgcggtttcgttgtttcagaccataaaacagttgctcagtcaggcgacggaagtggtgattgccacggatgcggacagggaaggggaagtgattgcccgtgaattactggaggcctgtcattaccggaaaaaggtacaacgtttatggttgtctgcactggatgaggcgagtatcaggcaggcattaaataacctgttacccggcgagaaaacggcctctttatattcagcgggattagggcgggccagagcagactggcttatcggtatgaacatgacgcgtctgtttaccctcaaagcccgggaactggggtttggtgggatattgtcggtcggacgtgtccagacgccgacactggccctgattgtccggcgggaaagagaaattacgcactttgtttccaaacccttctggcgggtgaccgcctcgttgcagcatcaggggatcatttttcaggctcactggcgacctgcctcgcagtattgtgatgatgaacatcgttgtattcacgttcaggccgctcaggccgtagagcaactgtgccggcaggcagggaaagcgacggtgtgtacagtgaatgaaacgaaaggaaaagccttgccgccgttgccgtttgatctcgggacacttcagcaggcggcctcaaggcgttgggggtattctgcggataaagtgcttgaaatcgcgcaaagtctgtatgaaaaacataaggccaccacgtatccccggacggactgcgggtatctgccggtgtccatgcgtgccgacataccggttgttttagatgcattatcacaaagcgatccggccttacagaatgtgctggcacaattgcagccggcgcgaatttcccgggtctggaatgatgcaaaaattacggctcaccatgcgattataccgacccggcagacacctgatttgaacgccatgaatgaggctgaactgaatgtctataaacttatccgtgcccattatctggcgcagtttttgccggatcaggaatgggatgcaacagaggtgtttttagatataggcggacaacaatttgttgccaaagggaaagtcgaaagagtgaagggctggtctgtattatttgtgaaacatgaagacgatccgccagtaaaagaagaggcagaaaccgggctggaagccggaacagaaacattgccgtcccttcacgaaggtgaattctgtgtggtacaggaggcaaaggttgtataa

SEQ ID NO: 103799 - DNA, 537 bp, Enterobacter aerogenes
atgaaaaaaagcggattgcttaccttatgcttttctttatggcttttgaccggatgctctgcacaggaaatcgcagaatggaatcagaaaatcagtgacctggggcatcaggtcagtcataccatgaatggtggtatgcagaaacgggaacaacgggagtatgacgtggttatccctgttgatattgatacagccgcagcccgtctgcgccgttattatggttttgaggatgtgaatgccaaaatccgtgctctgtgtcagtcaggtaaagaaagtgatcaatgggccgccacggctattgcagaagaaagccggggctgggaatgggaagtgacgccgggaagttattataaaatgggggcggatatgggaaaacgtaacccgccggcacatatcgtcatcgaactggaaaaaaatggttcgggaacacacatgtatatcacttacagcgcttcgtacagtgataccctgactccggagtttgttcaggaaatatttaaaaccgcgaatgacgttgcagccggaaaaaggaggtag

SEQ ID NO: 103800 - DNA, 705 bp, Enterobacter aerogenes; identical to SEQ ID NO: 14478

SEQ ID NO: 103801 - DNA, 1296 bp, Enterobacter aerogenes
atgcaatttcctccggacagtattattcagttttcattagaaaaaatgcggcagcaactgcatcaccggcaacacagccagcccggcacggcactgcgcagtggattgatttacgccggcaatgttcatgatgcaatcccccggcaattattgctggaatcccgactttccccggttgataaactgacctggatgatgatccgccttcatgctcagcaaaatgagggggccgtatttccgacctatgatgacttacaactccagttagccacaccccacagcgataaagcctcgcgggaaacggtcagcagggcactgttaatgctgaggctgacgggctggctcagtttatgccatcgggtcagggataaacgggggcgtatcagaggaaatatctatatgttacatgatgagccggtgaatgcatttgatgcagagacattagatccacgctggatggatgtactggaaaaaagttgttatcacaaaaataagagtgtgcggtgcgtggcccgcgctgcgctgactgccctgaaaaccgagccgtcaatgcgacatcagcataccagaatgcaactcattgagcagcggcttgaaagtcttcagacaccggaagcgctggcagacaggcaacgccggatactcaatgggcagacggcacaacttcatccgggtaaacataaaaaaaatcgagcccagtgtaaaacaccggatttgaaaatcgaactcagggaaaaaaatgatgaaaaaaaaccgggtacgaaaatcgaactgagtacacaaacccagtctgattcaggggtacgaaaatcgaactgttacgtacgtaatacttttacacagagtgtaaaaaatacgtacgtagatcagggagagcaatatttatcgggtactcaggtgcaggggctgcatcagtggattgatgagaatgatcggcagatgctggaaaaacagttacaggcgttgccggaagaagccgcaatatcgattgtgcagcaactgacacagggggtgaggacaggaagtgtacgtaatccggtggggtatgccttgcagctattaaaggcagcccgtgaagggcgatatcactccgtttccccagcagaaacggggatgaaaagtgcgtctttacagaaaatgtcaggtactccggatgtatcacagcacacgcaaaccaaaccggagagaacggagagaagtaaggcgtctcagggggggatgggtgcccctgatattgcacgtcagtaccttcagcgttttcgccgtacgctcatagggatatccaatgagcaatga

SEQ ID NO: 103802 - DNA, 285 bp, Enterobacter aerogenes; identical to SEQ ID NO: 14475

SEQ ID NO: 103803 - DNA, 591 bp, Enterobacter aerogenes; identical to SEQ ID NO: 14474

SEQ ID NO: 103804 - DNA, 1650 bp, Enterobacter aerogenes
atgaaaacagatttacagcataaactcagtcaggcgcttctcagaggaaatcctgtcagttccccgttatccgataatgcccacgtcaatccggtgtctgaaatgccgatgatattaacacttgagcaacttcagccaaatccggataacccacgtcagggcagaaacccgcgttatgaggaaatcaagagttccattcgggcacgcggactggacagtgtccctaaagtcaccaaagcaccggggagtgagttttatatcttcagtgacggcggaaatacgcgctatcagatcctctctgagttgtggcaggagacacaggatgagcgtttcttccgccttcatgtgttatttaaaccctggccggggcgtttgcagtgtttgattggccatctggcggagaatgaagtcagaggggagttaacgtttctggaaaaagcacaagggatttgtgtggcgcgttctctgtatgaggaaacgctggggaaaaaattatcactccgggcattcgctcagcgcatgacggcggacggattacctgtcagcatttcacacatcagtaagatggaagatactgtttctgttttattaccttatatgccccgtttactggaaaacgggctgggaagaccccaaattgagcaattattgtccgtgcgttcgacattaaaacgggtagcggattcgtttctttttcagtatgacgggccggatccagcctgtgattttctgggatgttttgaaaggacatgcacagaaatagataaccatgatgtttttgattatgacgtgtttctggatgaactgattggccggctactgagggagtgttctgttgccggtgtggattatgaacgttgggtatttgaattgaaggtcaataaaggcagacgcagcacaaagccggaattgcctgcgccggtggagagtgagggtgatacaacaaccgcgcattcagaaaccgtacctaccggtatgacctccggtttttcggcagaggatttgttaacggagcccctatcttctggttcaggtcaggaggcttcagtatctcctgtcgttgaaaagaaaaaatcccgtccggttgtggagatccagacggatttatacggcggggcacctgtgctgagcggggataccgacgaggcggatattgagcctgtcgatggcggaagtctgtttgtcacgaataacccggagcatgtcacaccggtggaggcgcccgtctccggtcatgcggtgacggcactgacgtgtcaggatctctggccggtggcatcacatctggatgatattgaacatcttcagacgcaaatttaccgtactttgtttgaattagggaatgagctggatttatcttccgcctttatggcggcttccggggtgcattctccgggatttattacgttgtcagcacattcggtgctggggcgtgtgatgacggttttctcagaacctgatgagtcccatgatgatattccggatgccctcagagccctgctgacggggggatatcagcccggtatgtcgccggtattgaatgatacccagtttatgacatggatgaaactgatgtacttgttgcgttgtttgtatgccaaacaaagagatgttgatccggatgtgaatgatgaagaggaatgggaataa

SEQ ID NO: 103805 - DNA, 1353 bp, Enterobacter aerogenes
atgcataaaaagtcttcttctgctgtattacctgaaactctgtactcaccggaggcggagcagagcgtgctgggcgggctgatgctggataatgaccgctgggatgaagtggcgccgttattacaggcggaggatttttgttccagagcgcatcaggaaatctggaagaaaatggccgccctgtgtcagataaacagcccgatagatttaatcaccctcagtgatgtactggaaaaagacggcgtgcttgagcgggtggggggctttgcttatctggcggaattatccaaaaacacccccagtgcggccaatattgtccgctatgcggagattgtcgtggatcgcagccgtgcccgtggtctgatgatgctcgggaatctgctggccacccagagtgtggcggctcaggcaaatataccggcgttatgtgagcaggctgaacagcggctgtttcagctgtcagaaaaagggctgcccgcttattccccgtcgttgctcgatattttaaataatgttgttcagcatctggaggaggcattaagtgcaaaagggataaccggtacgccaacggggttcagtgagctggatgaaaaaacctgtggtttgcaggcaggcgatttggtgttactgggcgcacggccatcgatggggaaaacggcactggcgctgaccgttgcacagaatgccctgcgtctggcagaaaaaccggtcttttttttcagtctggaaatgccggcggaacaaatcatgcagcgcttactcagtgatttgggcaatgtctcactgacggctatccgcagtgcgtctctggaagaaaatgactgggagtgtcttggtggtgccatgtcacagattgccgaatggggggagcgtctggtgattgatgataccagtaatatgacaccttccctgttacgtgcccgggcacggcgttaccgccgtaaagtgggtacgccgggactgattattgtggattaccttcaactgatgcgcagtcctgaacaggaaaaccggacgcaggaaatcagtgaaatttcccgtagtctgaaagcactggcgaaagaactcgggtgtccggtggtggccctttcccagctaaaccggcaactggagcaacgtgcagataagcgcccgacaaacggggatttacgggattccggctcgctggaacaggatgcggatttgattttatttttgtaccgcgatgaggtgtatcacgaacactcaccggacaaaggtgtggcagaaattatcatcggtaagcaacgacagggaccgctggggacggtgaaagtgcagtttaacgggatgtatacccggttcagtgattttcctcagggatattatttttaa

SEQ ID NO: 103806 - DNA, 432 bp, Enterobacter aerogenes; identical to SEQ ID NO: 14471

SEQ ID NO: 103807 - DNA, 873 bp, Enterobacter aerogenes; identical to SEQ ID NO: 14470

SEQ ID NO: 103808 - DNA, 141 bp, Enterobacter aerogenes
atgaacgcactctctgttttctcgtttcaggaaaaccaccccgttcgggtggttctggttaatggcgaaccgtggtttgtggctaaagatatctgtgaggcgttatccacaaaattagaggctcctgccgtctcttcctga

SEQ ID NO: 103809 - DNA, 384 bp, Enterobacter aerogenes
atgacctataaatatgaaaatctgtgtgagaaaggcttcgttcgaatccctgtaagcagggctatgcacaacaaaatgctgccaaatcgcaagcagcgttttggagcgaaaatcgaatattactttcatccagagttgcagatatttgaggcgcaatatttctgttctgcatggatgaaggttttgctcatcgttgtcatgtttcttccttcgatcttcatgcaaggcgttcccgaaacaatccgtgaaatcggcaatttaattcatgagcgggaaagagggaaattttcgactgatagatggtttttgaaacataacaagacgacagatggtgcgcttgaatgttacatcgaccagaaacttcaaaccaaaagaacagactga

SEQ ID NO: 103810 - DNA, 573 bp, Enterobacter aerogenes
atgtcgactactgatttttttaacaagctggataatgtccagcttgagaagcttgccaatgacgatctgggtgaactgaaacgacagatagagcgggagattgaacgtcgagcaaatgggccaaccggcgttgtgtatgtcgttactgattggggaagccatcgcgtttttactgattttcgttgtgcggcaatttgtttcgctgatatcgctgaaacagtcctggaggatgcccggacgaaagagggtaaggaattattcgaactgaataagggaaccttgctttacggtatcagaccgatggaaatgagcgttgcagatatcgaggcgaaggttgcccagaaatacttcgatgatgtgtgctttgagaaaaggctgaaggaagtagaaaacaagccgttaccagcaataccgaccggttggcagcttgttcccaaggaaatcaccgtagatatggaatgcgctctttcagctgctgacagctattctgtcgcctggaaacgcgcactggccattgcgccgaaatatgaggggttatttgccaatggccagaggggtaagcatgacctataa

SEQ ID NO: 103811 - DNA, 915 bp, Enterobacter aerogenes
atgatccgaatcgatgaactttcaggcggagcaaaggatacgctctttgcacttttcttccgtggagcacttccgtcaggagatttaccggcgaagagtggcgcagcagaattacgcgagcgaggtcttgctgaaagcgggaataccgcgctcgcatataaaggggaaaattacttcacctggttgacgcctgcaggcttgaagttctgtgttgagcattttgttacgccgcgctcttgtgccatggatattagttacatgttcaagacaccgcccgacgacacagttaccagctatgaagggcaactttgcggtaatagcatcgagcaagaaacgctttcggcggtgctagtgcatttcctgcctactactaacctggataaagccagagagcacgctgtaaagcttgcgtctgcggtaaaagcttcgtttaacgaactgaatgctactaccagtcataccattactgaccagaacggtgcaaagcgtgttgctgttgggcctttatcatccggggataaatcggatacagctagcggtcgcttgtcttcgaactggttcatcaagacaacaggcggaacccaaacgcttgagtgtctaaattttgtggtaggtattgaccctgctgataaaccagattcaaccgtgaaggtaaagctggaactggataccagcgaagcgatgaagtcacttgatgaacttggcactatggcgaagaaaatcgacgctattgtggcagaagcgcttcaacaaaacggcagtatattcagagcgattaagcaacgcgagcgtgatgcagcttctctcgatgatttgtcggcgcgagtgagtcagctggaaaacgtagtcaactctcacggcgctaagattcaaggtttagatctccgtgtgcttcatgctttatcgggcagatag

SEQ ID NO: 103812 - DNA, 1419 bp, Enterobacter aerogenes
ttgcactgcgtcccaattggcctgcagggtttcgacgctgataccctgattcaccacggagaaagacgtcaggaggatgccatccggcggagcctggttacctggcggaataacactaatcgggcgctggtcgatgatcgcaccggtatcgatacgagggaatttatccgggtcgtgagccacgccggtgatggtgagcgtgccgttgttgttgtcctttacaccgataacacggtactgctgcggcaccaggtcagtatattcgacgatccagacgcactccgcctctggtgtctcgctgtatgccgttgtgaccgtcacctgccgacgaccgttcaccgactgaatggtccgggcctgcgagatacccgacggcagattcagatgcaggcggtcgccctcttttgcatcgatatcacggtcgagcgtgatgacacgtccattcaccgcgctgatacgaccaccattaactcgcccggccagccgttcatcgcccagcccaatgatgtaacccggctgcgggattctgccgtcaaggccaacatcaatttcgaccatgcggtccttgttgttggtcagaatggcccacaggcccttacggtgggcttcgctctgccgcgtacatccaatggccgtgacttccacctgattaaagctgtaacgggaaaccagttccgggataaatgcgggttccatcgcatcggcataggcgttatccgggtcagaccacgaaaccagggcattggtgtaccgcgccttactggtgctgctggaatagcgcgggctaccgataatatttgcgcgcgtatagttgaaatcgacatcacgcggcatatcagcctgcacaataatctgttcgccactccagcaggtcatcccccggaaaatagcagcgaagtcgcgcagtacagtgtaggcgtcgttgcgctcctgcacataaacgttacaggtatggcgaggctccataccatcgccgcccctgccatcgggtatcagctgatcgcaatactgcgcaatcgggtaaagcgcccatttggagatattcgcgctggtcagacgatcgccaagaccgaaacgatcagagacaacaatgtcgtaataaatccatgccgggttatcagtccatgcccatttgaagccccctgtccatgtaccggtatattcgcgcgtttccgggttgtagttatccgggacacggataacacgcccgcgcggctcgcaggagatttgcggaatagaaccattgaactggctagagtcgaattcgatgtacagcagcgcggtgtgtgggtaacgcagtttcgcgtcaataacttcggtgtagctctgcagcgtcatgacgtcgccgattttgacgctgttcgcgtccggcgataccttgcgaagacgcagtgtccaggtgctgcctgcctgcggtaa

SEQ ID NO: 103813 - DNA, 168 bp, Enterobacter aerogenes
atgagtgagaaagagattattgaagcaattcgcattctggggcgttatgtcgttgatagtctgccaggggggatttttgttcttaccccattagaggatggggaaatcataaataccgaggaatctcacaagcaatgcaaaagcttcttccggaagaagaaaagctga

SEQ ID NO: 103814 - DNA, 819 bp, Enterobacter aerogenes
ttgaataaggcggtaaattaccctgcctaccatctcgccagcccagagaatgcctttcacggtaccggttattgcgccttcaattttcgggaagttttccagaatttgtcgacgcagcctgtccagagagccagcaaggccatcagcgaggctggagcctattttatcccgcgccatacctgccatcagcccaaaggagcgcagcgaggtcatgaatttattggagctgacggcggccacatcggcgttatagccgatcgccttcgccatcgcggtgtattcgccactaaactggccgataccgcgacgcattgccatcagggtgttttcatccagacccagcatctgagcgtactggttcgcgcggtaatacggcatgctgctaagacgctggccgacgccggtaaagatcgtagccatatcccgcatgttgccgctggcatcacgcgtttgaacccccagccggttcagaaaaccctcagcgccgggattgttacgcatgaacctggcaagattttcgagagagccgcgggccccgtcgacactgccgccaacctgactaaccgcatacccaatctgcttaatgccctccaccgtcgcgcctgtgcgctgagaggcccagtacaggtcgtcgagaccgctggcaattttcgcggtgaatgcaacgacggaaagcgccgccgcctcaactttgacgcccagatcaatcgctttaagcgttgtcccggcaacgacggcatcgaattttctggcgccagcctcatctactttgaacccaagcgagatcagaaagtccttgagcgtttcagcgttcattag

SEQ ID NO: 103815 - DNA, 462 bp, Enterobacter aerogenes; identical to SEQ ID NO: 16667

SEQ ID NO: 103816 - DNA, 219 bp, Enterobacter aerogenes
atggacacagtggctatggaatatgctgaatttgatcccagttttttacagcatactcaagggaagacgacgttagatattcatcgtttcaatcaaggaaatccaactccagcaggaaagtactatgctgatgtttatcttaataataaatggaaagggctctgccttagtgtttcttacgccatttgtcacattaacatttttggtgtttacacctga

SEQ ID NO: 103817 - DNA, 2082 bp, Enterobacter aerogenes; identical to SEQ ID NO: 16663

SEQ ID NO: 103818 - DNA, 2370 bp, Enterobacter aerogenes
atgaaaaaaagtaaactctctattattttacttatacttttgtcgtctcctttatatggaaaagagaataatcaagataaaagccaagaaaaagaaacatcaaacgatgttattactgttaaagcaacatcaataaaaaacaaagagacattctcctctttattactcaataatcgagaagagataaaaggaaaacaacttgaacaaataaaaacaaatacgattggtaataccgtttcaaaagttgctggtgtacaagtggaaggttttggcccaaatgcggcaaggcctgttattcgaagtctctctggcaatagagtcgggattttagttaataatcttccgattaatgatgtttcatttattagtgggaatatgcctattcctgttgatatgaatagaattaacgaaatatcaattagtaaaagctccgaagcactactttatggtggtagcagcagtggtggtgcaattcatttgtgggatgatcgaataatgacacagtttcctgaaaaagcaatttcaggtgccgtgacatttaatggtagcactaataatggtaacggtggatcagtaaatattaaattcagtaataaagaaaactggatttttaatctttccggtgctactaaacgagtctcaaaatataaaattccaacacgctctaaagttggtgcttgctatagctatcaacagctaaaagaccactctgcattacgtgatcaatgccaagtggatatgaaagtgtttactagccgtaaccctgaagcgtatccttacattagtgagttttggaaaaaatatcaggttgaatatgagttaagcgaggatgataaatatacctttaaagataaggactatttttcaggtattggttatgtagataatgaacctaacttacgatataaacctggtagccccacatctattgaacatgtcacacctccaaagcattatgttgaaaataataataacgaaattcccaatagctttttaaaaagccaaagtggtaacgcatcactctcttatatcggagatgacggttacttaggtttttctgtcactgattttcaaacatcgtatggagtgccaggctatgcttatctcacaactaaaacaactcgagaaaggtataaacctgtttcggtttcaaatagtaatcgaagaatagatatacaaggaaaacatgatcatttagcaccatttttaagagacagtgctttttattattcttattctgaatctaaagatgaagagttagtcggccaaattgcttcatcggtatttaatacaaaaagccatcagttagctttagaaactgcacatactccgctatttaatcgacttaatggtgcgtttgggatcaacggtaattatcgtgatctgaaaacgtctggttatgatgcttatttacccagtgtattaaccaaagagtacggaatatattgggttgaatcgctaaatttatctccttttgagctcactgctggatatcgtaaaggttacactcaacataatctcaatattccagcgaattataatcgtggtagagggcaaggttctaatttacaaaaccgtcattttgatacaagtgcaaatacactcgctctatcttttacaccaattgatgaatggacattaaaactacaacaaaatatttcttatcgagcaccagaaattaatgaactttatacacatggccctcattatgcttatttaattgaagaacaaggaaacagtgaatttaataccgaaaaaagcaaaagtattgaattatcatctgttattgagattggcaatttctctaataaacttaatttgtataaaacagactacagtggttttaaatttagacgattaacgggtatcagtcgtggtgctggtcctgttatggaatgggatgacaccgatcttgaaacaaaaggattagaatatgaatttaaatatttatatgaaatgcctcatgatcacaatctaacatttacactatttggtgattttgtcgaaaataaaagcaaaagaaaactgtttattgcaggtcactatttgccaaatttacctaatgaaaagcatggtatcagtatttattaccaacatgatgaattaactgcatttagtagtgcaacttactataaaaaacaaaaagaaagcggtgggttaatgtatggtggagatatggcctttccttcctatacgttagttgatgcggggattggcaaaaaataccaccttgataaggtagatgtttcggttgattttattattaataatctcaccgatactgaagcaagacctgcatcttctcaattgaaatatttagtcccattaccgggtcgaaattatgggataaatgtcaaaattgatttttaa

SEQ ID NO: 103819 - DNA, 177 bp, Enterobacter aerogenes; identical to SEQ ID NO: 14595

SEQ ID NO: 103820 - DNA, 348 bp, Enterobacter aerogenes
atgaccgccattttttataccatcctggagaaggaaaacgacaccggagaaattgaccatatcccgatgctgaaaacctttgtcgtgtttaatgtcgaacaaattgatggcctctcattgacggcagataccgttgccctacaagcgacgtttgacgcgttgccacaggctgaaaatctgttctgtaacagcggtgctaacatcattgagaaaggacaaaacgcctttttcatgccatcaacagatgaggttttgttacctgaacgtcgtttttttccgatgccgctagcttttatgccacggatctgcatgagattgttcactggagcgatggcaaaagtcgcctga

SEQ ID NO: 103821 - DNA, 1065 bp, Enterobacter aerogenes
atgcaaaacgaccgccaatcttctgaaaccgtgattctgggtgtcgatacccatcttgatattcatgtcggcgctgttatcagtcaggcaggtaaactgcttggaactcacattattcaaacaaatcaagcgggctatctggaactacttgattgggcacgttctttcggtagcctcgaacgagcaggcatcgaaggaacaggaacatatggtgccgcattaacacgctatctcatcaagaatagcatttatgttgttgaagttaaccggccagatcgctcaaaacgccgccttgaagggaagtcagatccactagatgcagaaaatgcagcccggacagtgctttcagggagcagcaaggccataccaaaaatgcagtcaggtgcatgtgaggctctccggattattagtgttgcccgacgtagtgcagtaaaagcctgtacgcaggcgattaatcagcttcgtgcactgctggttagtgccccgcaagatgttcgcgacaaactctggaaatcgaaaccacacgaatgcgtaactgcctgcattaacagcgaagtgtcagagcactcaccgttacgtatagccttgtgcagtacgcttcgaagccttgcgaaacgatggatggccctgactgaagagttgaatgaactagacgaatcactagataaactgacccgcaagtatgccagtaaccttcgtagccagtttggcgttgggccacagacggctgcaacactgctggcagttgcgggtgataaccccgaacgtttaaaaaatgaagcggccctggcatcgctctgtggcgtaaatccactgccagcatcatcagggaaaacagtaaggcacagattaaaccgtggtggctcacgtgaagcaaacaatgccctgtggacaatagcccttgtacgtatgcgtagcgatccgcgcacgagaatctatgtcgacagacgaactggtgaagggctatcgactaaagagatcctgagatgcctaaaacgctacatcgtccgtgagctctatccattgattttatcggacctcgcatatgccaatcgccgctcttga

SEQ ID NO: 103822 - DNA, 534 bp, Enterobacter aerogenes
gtggccacgctttgccacgtgtttggggttcaccgcagcagctataaataccggaaaaaccgtcctgacaagccggatagcaggctagctgtattacgcagtcaggttcaggaactacacggcctcagtcatggctccgaggatgcaagaagtatcgccacaatggccacacacaggggcttccggatggaacgatggcttgccggccatcttatgaggaagctggggctggtgagttgtcagcagcctgttcaccgatatagacgtgggggacacgaacatattgctatcccgaatcacctcggacgtcagtttgcagtgacagtgcctgaccaggtatggtgcggcgatgtgacgtatatctggacaggtaaacgccagacttaccttgctgtggtactcgatctatttgcacggaaacccgtggggtgggcaatgtcgttctctccggacagcaggctgaccaccaaagcactgaaaatggcatgggaaagacgcggtaagccatccggggttatgttccacagtgattag

SEQ ID NO: 103823 - DNA, 135 bp, Enterobacter aerogenes
atgattccgtctctgaattacgccgtattaacagatgccctgcgtgcgctgaaagaagacaatattcaccatcgtgaatctctgggactcaccttcgacgaaatgaataccctcaggacaacactggtgctttaa

SEQ ID NO: 103824 - DNA, 189 bp, Enterobacter aerogenes
atgacatcacatcagttattacgcctgaaacaggtcgaagaaaaaaccggtctgaaacgctcgcaaatctatctgtatatgaaagggggctcttttcctcgttcaataataaaggttggccctgccagcgtagcctggctcgaatctgaaattgatgaatggatcaacctcaaattagccaaccgctga

SEQ ID NO: 103825 - DNA, 1728 bp, Enterobacter aerogenes
atgattaaagaattaattaaatcaggttatttgctttctaataaaaaagataaagatttaatggtgggtctatgccttgccgtagttgaaggtctttttgctactattccgtatattctactctattttttattaattgatctttttgccaataaaatcacactagctcagttattttattactttttatcaatactcttatctattgttctgcgtattgtcattggtacttatagtatgccaatgatttttattggtgcttataaaatgatgggacaagcccgtctaagaatagccgatcatttacgaaaaatcccgattggctggttttcttctcaacgcagtggtgatcttgcatcacggcttactgctgatttagagatcattgaaaatatctggtcacatttcttaggaatgtttatcagtactttagcgatgcctgtttttctctcactattcttagtatgggtagattggcaactcactttaattatattattttctattccaatcgctctgttcgcattatccataagccataaaataatgttaaaagctgcacaacaggcagctgatgctaatgccaatgtacaatccgaattactcgattatatccaaggaattatggttattcgtagttttgggcgacttggtcctgcatggaaaaaactaaaagcagccttagaaacacaaaataaaacccaaatagttctagattccaagcctgccccttggattgcactttatggttttattcttgaatcaggttttattttattaatgataataggaacaagccgtttaattagtggctcactttctccttctcaattcgtttttttccttgtattagcactccccatttatcgacaattctttgatttaggattatccagtatgttgttaaattatgcacaaaaatcattacaacgcatagaagaagtaatgaaagtggttccactttctgagcctaaatatactcaattaccaataagaacagatatctattttaacaatgtaagctttatttatccttataatagtcaattaacattagataatatatcttgctgttttcctgaaaaaagctttactgctattgttggccctagtggctcagggaaaagcactttactacagcttatttctcgtctatgggatgttaaccaaggtgaaatattgctagatgatattaatattaaccaaataaattccgataaactctgttcatatgtatcttctgtttatcaagatgtcgttttattttcaggaacaattaaagataatattttaatgggaaaaacagatgctcacgatgatgaaataataactgcagctaaattagctaatgcacatgagtttattatacaaaaaccacaaaattatgatactcctattggttacggtggtatgttactctcaggtggagaacgtcaacgtctttctcttgctagaactttattaaaaaatgcaccaattttactgatcgacgaagcaacatcgagtatcgattgttcatcagaagtattaattcaacaagctttatcattgttatcaaaagataagacaatcattatgattgcccatcgattaaatagcattaaaaatgccgataacattatcgtaatggaaaatggaaaaatagcagaacaaggaaaacatgctgagttacttgcaaaaaatggcttatatgcacatttatggttacaacagaaagcgttatgctaa

SEQ ID NO: 103826 - DNA, 186 bp, Enterobacter aerogenes
atgatcactcataacctacatactattattaacgcagataaaattattgtgcttgataatggaaagattattgatacaggtacacacacccatttattaaaccaatgcccaacctatcaaaaattatggaatgattatagtcacactattcattggcaattaatccaggagaataataatgattaa

SEQ ID NO: 103827 - DNA, 447 bp, Enterobacter aerogenes
atgcccgcgggcgtcggtaaaaataagggaaaacgccgaagcatcagccttaactttgccggtggccacatcccaccaggcgacagcgccgacgatttgcgtctggcccagccacatcgagcaggatcggttcgcatagcgaatttcaggctggacgttgtactcgcggatacggtcgggatcgagacgaacctcgccaaccggtttactgtgcagctggtactggctgtcccattcgttaatggtgcgcgtttccctgcggcgctttgtcatttcctccggggtgaaccgttctggccattcgcaatcggcgtaacagtctacggtggtaccgggagcctcggcaaactcgataccatcttcagtcagtcgataatcaacgcattcaacgagcagtcgcgcgccaatgtgaataccgacgaaaacatattccggccggaacggtaa

SEQ ID NO: 103828 - DNA, 255 bp, Enterobacter aerogenes
atgcggtgtgccgataaacagctttcgtccgccgggtacaagaatgtgtgtttgttcaccgagacgataacgcaacttttcccgcgcctctggcgtctggatattgcggggtacttctacgtcatcgttctggcattcatcggcgcgggccgaggtaacgttagagaggatcccctttgcgtacatgctgccgttacgcatatccagcgaaccattaacccaccactgctcaacggttccctgtccgtccggtag

SEQ ID NO: 103829 - DNA, 297 bp, Enterobacter aerogenes
gtgctggtcgctgaaaaagacgggcatgtgatcggttggcttggcggcggtatcgcggagcagtttttttcccgccagttgatggcatttgaatatggcctgttcgtcgctccggagcaccggggcggcagtgctggcccacggttggcccgcgcatttatcgaatggtcgaaagaacacggcgccgcagtgatcaacatggggatcactactggcgtcaatgccgagcgtactggccagctttattcccgcctcggtctgcaacgtaccgggctgctttattcgatggaggtttaa

SEQ ID NO: 103830 - DNA, 270 bp, Enterobacter aerogenes
gtgatcggctggcttggcggcggtattgccgagcaatttttttcccgccagttgatggccttcgagtatggcttattcgtcgcgccagaacatcgtggcggcagcgccggcccgcgactggcacgcgcgtttatcgactggtcaaaagagcacggcgccgccgttatcaacatggggatcaccactggggtgcacgcagaacgcaccggccagttgtattcgcgtctcggcctgcagcaaacaggcctgctttattcgatggaggtttaa

SEQ ID NO: 103831 - DNA, 486 bp, Enterobacter aerogenes
atgactaaaaagacgctctgccgtaatcttctacctatggtagaaaaaacgaataaacatcaagacttcgcagatcgacttaacttagagatgagtaaaaaaaacttgtctgttaagcagttaagtctggcgggacaagtaacttacgaaatggctaggcggtatacgctcggcacggccaagccacgcgatgaaaagctgataagaattgcggagtggctaaacgtacctcccgcatggctggactacggggctactgaggctgctactgaatccgacactgttcaggaaatcggcacagatttccattacgataagcctgatgaatcagagttcgccaaccttagcgatgaggaaaaacgcttgctccgggtatttagaaaattccccgatgcagaagctaacaacatgctcctagcctttgagatccgctataagaagctcctagaattttacagcgagtacgctgatcctgacaaaaaatag

SEQ ID NO: 103832 - DNA, 255 bp, Enterobacter aerogenes
atgtgtaaccagtctgctgctgaattgattgcacgccttaaaaaggcttatccggcgtatgtgccatccgaaggggattgcgcaagtaacgggatacccaaggcgggagcacgctttcagcacagacacaaggggcacatggtgacggtactcacggcaaatgagaaagacgtttcctatcggagagactgcggaactgttggctggatggggttacgtgagtttttacggctacacaatgaggttttggtatga

SEQ ID NO: 103833 - DNA, 3018 bp, Enterobacter aerogenes
  misc_feature (1601)..(1610): n is a, c, g, or t
  misc_feature (2985)..(2994): n is a, c, g, or t
atggggggaacttatgttccgattgatgtactacaaccagaagaacgtataaaccgcattgctaaaaatgctcagctttcattactcatcgtatctgatagcgatccatcctattcaatctatgctacattttgtaacagaattgtttggcaaaaagttcaaccctccgagaataaaccactacacaatatagatatatctcctcatcaagcagcttatgttatttatacttcaggttctactggagagcctaaaggtgttgttgtatcccatgccagcgcaatgaatacctgccttgatctcaatcggcgatataacatttcagacaaagatcgggtacttgccatatcagcactacattttgatctgtctgtttatgatattttcggtgttttaaatgccggagggactcttgtattagttaaagaagatgagcgccgtaatcctgatgcatggttacgacttattaaccaacataaaataacactttggaacagcgtacctgcactgtttgatatgttactaacctatgcagaaggaatagggtcatccattccacaatcgctgctattaatctatctctctggagattggattgggcttgatctcccgacacgttactataatttctgccctgatggacaaatagtcgccatgggaggtgccacagaagccgctatttggtctaactattttaatgtcacaacattagacccatcctggagctcgataccttatggatatcctttatccaaccaacgttatcgtattgttaatgctagaggagaagattgccctgattgggtatcaggagaactttggattggtggtgcaggcgttgcgttaggctacctaaacgatcccgaaaaaacagcacaacagtttgtaaaacaaaatggtgaaaattggtataaaacaggtgatatgggaagatatctccctggcggtatacttgaatttttaggaagacgtgaccgccaagttaagattggcggataccgtatagaaccaggggaaattgatgctgcattcaataagcttcagggtgtgcaaaatgcgattacactatgccttggtaatggtaataaagaaaaagcattacactcttttgtgatactaaattcgggtaattaccaggatattatcagttcaaatagcaccttttctcccctctactatctgcgctcaaccccaataaatgtacaacaacaatcccaagaaacggcaatcatagctggatttttatatgattatcttactgaacaaaatattgatttcgacaacctcttgtcagaaaaaaaatcagcagatgaccatagcattatcgctagctatcagtcattaatggctaattggctaaatttaatagcacaatatccacaaactacactcaattcccccccaactaatagtacccagcgaacgctaatagaaaatttgcagcgccacaaaaacaatttaacagacatactcaaaggtaaaaaatcagctctaacactatttgatgatccctattggtcaccagaacaagtcactatgcgtattgatggaatgcactactccttagaaaatttactacaacaaataagagaacttcatcnnnnnnnnnnacttcatcattcactaaaaaggccaataaaaatcattcaattaggtgctagaagcggtatttcagcaaattatattctgcaacgattacccactaatatggttaccctactgctaactgatgagtctctttcaatggtaacgcaagctaaccaaaatttatcagattatcaaaatagttatgctgagcctcttacagaagtatttcttcataaaaatcgatatagtgcagatatcatttggatgaacaattatcttcatcgattagacagcccacaaaaagagatacaaaaattcgtttcactctgtgctccgagtggaatgatttttatacaagaagtgttacatgcccctgcacaatcactgataagcatctctttattacaacaaaatggtagtgatcctgctgatgaattattaacagcaaaaaaatgcaaagatatctttagcgcttctactgcgacttataaaagtgaaggagttaacggcgaaatattgacacagttataccaagcaccagaaaaaatttatttaccagataaaaataagctagagcatgatttgcgccaatttttaccagactatatgatcccaaaacatatttattttctaactgagttccccttaaccgcaaatggcaaaatagataaccaatcattaaaattgtattgtcaggaataccaagaagaatacctaaatcaacaacctatcaatggtaaagaacagatcatcataacaatatggcaaaagctccttggcaccaacaagatacaccgtcacagtcatttctttcgtgaagggggagatagcctagttgctattcgattgatctctgatttaaaccatattggctaccaagttgaactggagcatatctttgcttatccgatcctttctgattttgcacaaaatataaagcagagcgaagttttcgaaaaacagccagcaatttcacataacgaggcgtatagatacaatccatttccactcactgatattcagcaagcttacttagttggacggcaaaataattttacacttgggggtgttggtacacatttttttgtccattttatagcggaaaatttagatgtacctaaattagaacgtacaattaatcagttgatttctcgtcatgatatgttacgtggtgtcattattaatggacaacaacaagtacttaaaaaagttccttattattccgttaaaacgcattatatccctacagaaaaaagtgacgcttttctagtattacgagctcaacttgctaacattgtttatgatccagaaatttggcctttatttactattcaagttatcaagaccaaagaacaaccagatcatatttttattagccttgataacttattccttgannnnnnnnnnaaaaatggttgtgtagtcaaataa

SEQ ID NO: 103834 - DNA, 1281 bp, Enterobacter aerogenes; identical to SEQ ID NO: 92759

SEQ ID NO: 103835 - DNA, 216 bp, Enterobacter aerogenes; identical to SEQ ID NO: 92760

SEQ ID NO: 103836 - DNA, 282 bp, Enterobacter aerogenes; identical to SEQ ID NO: 92761

SEQ ID NO: 103837 - DNA, 195 bp, Enterobacter aerogenes; identical to SEQ ID NO: 101698

SEQ ID NO: 103838 - DNA, 219 bp, Enterobacter aerogenes; identical to SEQ ID NO: 101699

SEQ ID NO: 103839 - DNA, 225 bp, Enterobacter aerogenes
atgaagaatttgccggatatagcggcgggaacttcgtatataacatccaccgtgagcggcagctactggttgctgcaacttctcgataaggtcagtcccagtcaatgggcggcaatcggcgtactggccagtattgtttttgggttacttacctacctcaccaatctgtatttcaaaatcaaagacgaccggcggaaggcgcgagaatatgagcaacaaagctaa

SEQ ID NO: 103840 - DNA, 258 bp, Enterobacter aerogenes
atgaatggcacagaaactaagcaggttgattatctgtatcgtgggataattgattactttagcaatatatcaggtctggatattacgaccgagcagatcaaactacgagacaagtttattaccgaaagtgcgatagtgtgtgatgattctttggatgcacaggtgattagcctgcaagatgaattcattgcagccggtggaaatcctgagcaagaaaagctagtgatcgaaaaagcacttaaattactaagcctgtaa

SEQ ID NO: 103841 - DNA, 1095 bp, Enterobacter aerogenes
gtgggttccgatgtcccgccgaatacaccttcgtgttatgacgtgaaaattcataatatgcgagtcattaaagccgatctcgttagaacttattacgctggctttttctttgcaaactcgacaaattgtgaaatatcagatggctctcttgaaacaccactgactgcgggcaccagaaacggtagttttggggcacttaatttcacagaagactgcgttataagagatattaacgtcccaaaccttgggcggacggtttcctccgaaggtattttaatcaacaactccaaaggttgtttggttaaaaacataaaaatgggtaatgctaaatcggccgtcagtacattttatgtcgatgcaacaacgaatgatgcaaataacccaaactttatagatggggttgaggcgaacaattgcgatcaagcgctgggcgtaaccggtaagtatgcggtgttttctaacatcaaagcgaccaactgcctacaagagttgtttttcagaaatgctaatgcaacgggaaaccggtttaagagcaagccggattcaataactataagcgaagccagtgcaaacattaaatactggtatctgatcaataatacgattggtgggtggcgtcgtaaatttacgtggttgcgcccattggatatactgcgaacgccgttcacttctctttcatcatggaattctaataattctgtgaaatttaacaacggtgctactgcaacttttttatataagatccctgaaggtgctatcgctgtttcaggatttacagcatacggtgattttagtgtgggagctgcggcagcggctacggattcggtatgtacgattgatgtaatttcaatgtctgctgtggacgggaatggaacagaccctatagtacttttatcggcatcggtttccgcccgtgcaaacggggatggtatctggtcagtctccgcagatgttcaatcatcttcgccaggatatttacccgtagagggggctagctcaggcgttgataacacgatgtacctgcgagttacatactcgaacggtgtggcaaataatacccttaaagaaatagggttaagaatgtacgggaactaa

SEQ ID NO: 103842 - DNA, 168 bp, Enterobacter aerogenes
atggcagaagaggagagtctggtaggtttgggattttatttttccaatattgatatgctgattctttgttttcatactgttttttatcttgtaaataatggtaaaagtcatagtgctcatctaactgaggcagtatttctccgctcaataataaacaaagttcagtaa

SEQ ID NO: 103843 - DNA, 699 bp, Enterobacter aerogenes
atgtatgatattttaagcgaacctcattgggaaactcgtaaagatacatttataaaatccttgaagtttatgggagtaaaaacaggcaactggttaaatataggttccggcactggccaagaattaagtataattgcgcaaatgtttccagacatacatatttttgcaattgaaccgtctgcatctatgcgtattggcctaatgacaagaattatgatgttacctgaaatacaacaccaagtaactgtgattgctgatacatttcaaaataccattctaccaaaatcattttctgccgctattatatgtggctgtataggatattttaatcagaatgatagaaaaatattatggaataagcttgcaaatgggctagaaaaaaaaggtgctattttggtagatacaatgccgtttaatacgccttgtaacatttctaagatactattaaatagtaaaaaaatagggaaccatatctatgaaatttatttaagtggcaaacctatagatcaagaggctattcgttggaatatgaattttaaaatcatagaagacgataaagtcatacgaaattttaatatagaaagagattggtatacttttggaattgaacaagtaattaaggaggcatcaagagaaggattggtccatgaaaacattagctcaagtactgtaccaatggcaatcctccgccataaataa

SEQ ID NO: 103844 - DNA, 630 bp, Enterobacter aerogenes
gtgatagccagattcacgtacaatgagcttgccgctcacttccacgttgtacgatgcaaagcgcaggtttttagccaggcgcgcattcaccacgtagttttcacgcgggaaaatgcagtgcaggaagtcgaatttgtcatcgggctttttggcggccgcatcgcgaatcttcttgctgaccttatccgcgccaaattctttaatcgcctgctctgcggtgagctggtagcggcgataaatcgtatccacgatgccgtcgcggcgggtggatgtgacgtagcactgcgccagcggccactgctggaacgagaatccgccctcttcgcggtcttcgtcgatgtacaacgcaaaccagccagcgcataccacatcgagattcgcctcgtagccttcggcgtcgaagttggcggcgtggatgttttcccataccagcgttgcgcaggtggacaaccacgcggcggcatcatccggcagcgattcgctgtcgaggttcagccactgcgcgtttgccggggtcataccggacatgagagccgacgccagcatgcgggcgctgtcggtggccgtgccgtcaagcagccgtgccaccttcgattttgcgctctgtgcgtccagcacctcatcagatag

SEQ ID NO: 103845 - DNA, 225 bp, Enterobacter aerogenes
atgtgtgggggcggtggaccaaaagtcgtacagcaggatccgcaggctgaggcagatgcagcagccgatgcagcagcgaaggccgcgaacgccgacgccgcagcgcgtaagaagcgcaagaaaggttcctcgctgctggcaagcggtgccgaaggcgcaacggatacaggttcatccctgctttcctccggcgctcaggcagcaaaaaacaccttaggggcataa

SEQ ID NO: 103846 - DNA, 702 bp, Enterobacter aerogenes
  misc_feature (682)..(691): n is a, c, g, or t
atggcatggtgttactggcaggatctattatctgatttaccttctgccccatatttaccgataaagaattcatccattactgaacaacctcgttttacgactttccaacatcatgtttctatagcgcaatgggacaaattaaaacagaggtggaaaaagcatggtattacaccatcagcagggcttttaacactttttgctttagttttaggtcgctggacaaaatacccagcctttacactaaacttaactttctttaatcgtcaaccatggcacccagatgttacacaacttattggtgattttacctctgtactccctatagatatttatctagataacgactgtacattaaatgagtcaatggcaaaaatacagcgcagactttggcaacatttaagtaagtcccaagtaaatggtgtagagattttacgtgaatggggacgctataaaggggatagtagccaatctctgttacctattgtatttactagcatgttaggtatgacactagatggtgacaatattgatgaagcattaaatcagcttttcggccaacccgtatatagcttcgcgcaaacacctcaagtttggttagatcaccaagtaatggaaggaaaagaggggctaacattaaattggttctgcatggatgacatctttgctgacggtttattaacannnnnnnnnnatgttctctga

SEQ ID NO: 103847 - DNA, 135 bp, Enterobacter aerogenes; identical to SEQ ID NO: 34870

SEQ ID NO: 103848 - DNA, 198 bp, Enterobacter aerogenes; identical to SEQ ID NO: 14615

SEQ ID NO: 103849 - DNA, 402 bp, Enterobacter aerogenes
atgaagacagaaacccagcatgaatcaggcgcaaagccacaaagcacgcttgccgcaagacttgatgagttgatgaaactgaatcattggtctcgcacagaaatggcgaggattgcgggagttagtcctacctctgtaaccaactggtttaagagggaaaccattagcaaggagtcagcagccaaactagctaaggccgctaaaacctcgctctcatggatacttacaggagcagaggaactcggcgggacatacaccgaagacgaaattgcacttattgaagttttccgcgaattaccgcctatcgaaaggcgcaacatgctagctgcattccagatgcggctacaaaaactcaaagatttttactctgacaacgtagatccgactaccagagaaaaataa

SEQ ID NO: 103850 - DNA, 270 bp, Enterobacter aerogenes
atgccgtccgtttcgataaacgtcattcccctggataaacatgcttcggacttcctggcctggcgctttgaggttaatcccatcttcgccattatcacggatggtattgctgtcaatctggtattcgccgtctcgctgctcagtcgtgctgttgtaatagacgccatgtttagcatttttggcgataatattgcactgaagacgcccgcgcgaaccgggatatgccagcacagttcccggactgataatcacgccataattattttctga

SEQ ID NO: 103851 - DNA, 387 bp, Enterobacter aerogenes
atgctgtttctcaaggaatatgccgaagttcttaccgttgcggcaaaagtttccagcaacatagagcggttcactctgcgtgccaccagcgcccaaaccaaggccagatgccccggcagggttatcattaccggatggtgccagccgcccaaagttctccacaacgcattcggtaatcgcggaatcgcgcgcaaagtcgatgccgatcccagtcgcgccagagtttctcacccgcaggcggtgcaggtggccgcggcggtagaagttaaaatacagccccttcgtccgtgggagataaccttcatcaggcaacacctggtcctgacaatccacctcaaaatcggaatacacaaaatccgtcaattccggaacgggattcgtcggtga

SEQ ID NO: 103852 - DNA, 213 bp, Enterobacter aerogenes
atggcgaccattgcggtaaacgtcattcccctggataaacatacttcggacttcttgtcccggcgctttaaagttaatcccatcctctccgttatcgcggatggtattgccgtcaatctggtattcgccgtcacgctgttcagtcgtgctgttgtaatagacgccatgcctggcatttttggcgataatattgccctgcaggcgcccgcgtga

SEQ ID NO: 103853 - DNA, 591 bp, Enterobacter aerogenes
atgggcgagctcggctatgtcatgtggccatgccgcgacgagtccgacgccgaccaggggacgtcgtatctgtttaaagagaagttcgatacccccaacgggctggcgcagttcttcacctgcgactgggtcgcgccgatcgataagctcaccgacgagtatccgatggtgctctcaacggtgcgcgaggtcggccactactcctgccgttcgatgaccggcaactgcgcggcgctggcggcgctggcggatgaaccaggctatgcgcaaatcaacaccgccgacgccgaacggttaggcatcgaagatgaagcgctggtgtgggtcaattcgcgtaagggccgcatcatcacccgcgcgcaggtcagcgatcggccgaataaaggcgcggtgtacatgacctaccagtggtggatcggcgcctgtaacgagctggtgtcggagaacctgagcccgataactaaaacgccggagtacaagtactgcgcggttaacgttgaacggattgccgatcagcgcgcggcggagcagtacgtgatcgaggagtacaacaagctgaaagcccgcctgcgcgaaagcgcgatgggttaa

SEQ ID NO: 103854 - DNA, 270 bp, Enterobacter aerogenes
atgggagaaaatcccctgaataagattattcagaccttcaacatgcatgtgtttaactggttcgttattatgcagagcgcacagcacgttaaggttaaaacgatcttcttcttccagttctgtatcacggttattcaggttatccagataatccacaacctgagaataaagatggccatcaattgccgcggtactaaacagcaggacggcagcaaagcgttcgccaggagaaacagtcatcagatcgataatatcatcaccagcgggtaa

SEQ ID NO: 103855 - DNA, 273 bp, Enterobacter aerogenes; identical to SEQ ID NO: 100134

SEQ ID NO: 103856 - DNA, 447 bp, Enterobacter aerogenes
gtggagaacctcgaggaactgaaacgagagatattcagctgggcagctgaaagcgggcaggagctggttgctatcgagataagccgtatgtggtttcgtctcggtggtaacactggcgtgctgaagctgcaccagattgaagatgcagacggaaatgcagactggcgggccatcaacaataaccgccaacagatttttcgctggctgcgtggtgagacgaaagcggccagaactaaaacccagacgctggctaaagcgatggaagctgcactgccggcagaacgctacgcgcgcctggacatgtccacccagtatttgatctgcgtggccatacgcgaatttgcggcggccattatcgcgttattgctcgaggccagagacggcccgcagcaagtagcgaaggcattgcaagcgatgcgagaaacacagcgcctgaccagcgtttaa

SEQ ID NO: 103857 - DNA, 297 bp, Enterobacter aerogenes
atgccgctggttgccaccttccgaacagactggttccgcgtcattaccgacctgaccagaaaaaacctcaccactcagcaaatcgccgatgaacttggcgtttcgaaatctgccgttcttggctggaaatccggatcagaacctcgccacggtcacggtgaggcgctaatcgctctctggtgtctggctaccagctcagaccgtaaaaaactccctactgtgctttaccggcagtggtggacgtttcgtcgccctgtttttggtcgggaaactgaccagaagggcaacacacaatga

SEQ ID NO: 103858 - DNA, 243 bp, Enterobacter aerogenes
atgggagaaaatcccctgaataagattattcagaccttcaacatgcatgtgcttaactggttcgttattatgcagagcacacagaacgttaaggttaaaacggtcttcttcttccagtttggtatcacggttattcaggttatcaagataatccacaacctgagaatagatatggccgtcaatctgagcggtgctaaacagcagaacggctgcaaagcgttcacctggggaaacggccattag

SEQ ID NO: 103859 - DNA, 345 bp, Enterobacter aerogenes
atgaataaaaaagttaatgtatgcgccattaagcctaaggcaggttacagctttgacgttttcattgaagatcttaatgaagatttaaagcctgatgatggcgtattagatgcggtacaaaactactttgaataccacatgaaaaatggtaataaagattataactttactgattgggactacataccacgtgacattgaacgattaactgaagccggctacttaatcggcgcgccaataaccattttcaaaagatataatctgctggataaagatgggactttcactgataaagggaaaaagattttcacctatctttctgataagtatgaaccaataaattag

SEQ ID NO: 103860 - DNA, 258 bp, Enterobacter aerogenes
atgaacggtacagaatcgagaaaggctgattgtttatatcgtggaattattgaatattacagcaacataagtggtatcgatattacacttgagcagattactcaacgtgataattttataacgaaaagcgccattgtctgcgacgactctctggatggacaggttatgtcacttcaggaagagtatattgccgctgatggtaatatgttagagcagaagggaataattgaggaggcgatcgagttacttagcaattaa

SEQ ID NO: 103861 - DNA, 687 bp, Enterobacter aerogenes
atgattaacactcaatacctccagtatgtacgccagcagctgatagtggccaccgccgatttgagcggcgcgacgaaagggcaactgacagcctttgctgagaatgctcaattcgcggcgacggtgcgcagccggggacggaagaaagtagccgatccggtcaccgggcgcatggtaaacccatcaaacccgccaatccacgggcagcagtcccgcgccaaaggttccgcaatcgccctcgttatgcccgttgagtactcgacagccagctggcgacgcgcgctgctgtcgctggaagatcatcagaaagcctggctgctctggaactacagcgacaatatccgctgggagcaccaggagacgatcaccaggtgggcgtgggagcaattcagcgagaagctggccggtgtgcgcattgcaaagaaaactgttgatcgcctgcgtcagcttatctggctggcggctcaaaatacaaagcaggaaataaccggtagagggcatcattacgctcccgcctctatggtgggaataaagccagataactggtgccacaattattcggattactggcagatcatgatggacatctaccaggaacttgatagccatgcgttactctctgtttctcgatcacgttcacaacaaaaagcgactttttcgcagcaaggtattgcaaaagtcaattaa

SEQ ID NO: 103862 - DNA, 282 bp, Enterobacter aerogenes
atgaccaataaccagttaaaaccggaaaacgtcacccgttacgcccagtacggcgcagacatgatggaatggccagatggtagatatgtgaagtatgaagattatgccgcgctggccgcagagctacaggaacgccgcaaggtaaacgcagatttaacaatgtgggttaagcgattgggttattcactcaaaagagcgaaaccagatagcaagttacctggcgaagcaatgtcgtatttaagcgctaaagggattatcagcgtgggggatattttgcgatga

SEQ ID NO: 103863 - DNA, 426 bp, Enterobacter aerogenes
atgagcaagcgacgctacaccaacgaaaaaccacgcattgagaaaaaaattaataccgctgctatgaagattttgattgctctcatgccacgccaataccgacaggaggaatggtcgcgtggggagggaatgatttattcaacttgtgaatcgtatcagacctgggaagttatcaccgttgactattggggagaggcagacagcaaggaagcgttttatattctccacgaacagctaatcctcgaaaccactgattgggatagcattgggcatgcgtatgacgccgaaaacgcaactggtgaagaacttaataaagagcagttttattcaccgtggaggcttggcgacaaagttggccgcgctgagattattcgtcactgccgtcagttggtgaaagaaggcgtgaaatgggagcgtgcagcatga

SEQ ID NO: 103864 - DNA, 294 bp, Enterobacter aerogenes
atgacaggaaaagacgcaattctgaactacctgaaaacgcataaaacctgtagctcgccagatgtagccgcggcttccggaatgactcacacctgcattaaccaggccgcgaacatcctggcaaagcagggagtactggtagcagtagcgaaggtctggcgaacggttcactaccgtctggtcactgaggaagaaatatccggccagaagagcaccaatcagattttcaacgagtgccggcagagcccggtgatgaaacgaattttagcggtctacgggagagcgcaggcatga

SEQ ID NO: 103865 - DNA, 852 bp, Enterobacter aerogenes
atggaactggaagaaaaaatcactgccattgagcggatgcttgatcagctgagtaagccaccggaagacatcccgaattgcgaggtggttatcgagcgcgtctgttgcgaaaaacatggcgagtatgagcagcgcaagcggatcctgaccagcagcatcatcaatctgccatcgccgccgacacgctgccctggctgcctggaagacgaactgaattttctgagggatgaaaaggttcgctgggataagcgagttcgccagcaaactgcagaaaggctgcttcgccagctggacataccagagcgcttctccacgtgcactctggacagctacaagcctgttgggaaggattctgagcgagcactacgggtatgccaggcctacgcatcgaaatggactgatcgcctccagcagggaggtgggttggttatgtgtggcaagcctggtaccggtaaaaaccaccttgcactggccattgcccgtcatgtgattgagcaccaccaaagctcagtcattttcacaacggcgctgaagattgcccgggagtttaaatcgacctggtcaaaaacagccacgcgcactgaggatgaagtgatccgccacttcacgaagccagacctgctgattgtcgatgaggttggtgtgcagtttggcagcgaagccgagaagatgatcatgtttgaaatcatcaacacccgctacgagcgactgaagccgacgatcctgatcagcaacctgccgaaggatgagctgacgcagtttatcggcgagcgtgtcatcgaccgcatgaacgacggcggcggctgcacgatttcgtttacctgggacagctatcgggagagccggtcatga

SEQ ID NO: 103866 - DNA, 855 bp, Enterobacter aerogenes
atggcaaatactgccgaagtaatcaatttccctgtgcctgtcgtggcactacaggagctgcgcgtggcagatctcgacgatgggtttacgcgcatcgccaatgagctccttgaggctgtcatgcatgcaggtttgtcgcagcatcagcttttggtgttcatggctgttatgcgcaaaacatacggcttcaacaagaaatctgactgggtcagtaacgagcagatctcggagctgaccggcattcttccgcataagtgttcagctgcaaaaagcgccctggttaagcgggggatattaacgcaaaccggtcgcgtaatcgggattaataaagcggtcagcgaatggtcatctttacccgtaaaaggtacagaaaaaaaaccttacctgaaaaaggtaacattacccgaatcaggtaagaaaagtttacccgaatcaggtaacgcctattacccgaatcaggtaaacacaaaagacaaacatacaaaagacaataaagacaatattaataacccccctaaatccccccgggcggtttcgttcgatgcgtcagctgttcagttgcctgactggctttctgcagagatctggtcttcatgggtggcataccgtcgagacctgaaaaagcccatcaagtctcagcagacggtcacccaggctatcaacctgctggaccgctgcagactgaacggttactcccctgacgaaattattaaccagagcatcgctaatggctggcaaggcctgtttgagccaaagggcgccaagcctcaaccacgtcaacaagtgcgagttgccgaaaatttcgcaggtaaggactacggccagactgaaatcccatcatgggcgagggactga

SEQ ID NO: 103867 - DNA, 222 bp, Enterobacter aerogenes
atggagagttcaacgacacgcaacaaagtggaggctcgcaggatagaaagctggttacacagccagatagctgaactgggtaccacaactatcgccaaagtggccggagtgaataagtcgacggttagtcgctggcgggaaagtctgttgccgaacatgtcgctactgctggccatcctgatttctaacaggccgggagagaaaggtgactttgaagcatga

SEQ ID NO: 103868 - DNA, 228 bp, Enterobacter aerogenes
atgacgaacaaaaccatccagaaggcaattgatatcgctggcagtcagaaaaaattggccgatctgtgtggcgtagcgcagccgacagtttggcgctggctgcatggcggcggaattgatgctcgctatgtaatgaaaattgtgtctgcgactaacggcaagattaaggcggcagagatccggcctgaccttgcgcagttgctgagcgcgcattcaccggccgcctaa

SEQ ID NO: 103869 - DNA, 468 bp, Enterobacter aerogenes
atgattacagccacctccccatactatccagcatttgtaggaaatgtcgttccgcatcccctttttgatggtatcattgagaacatggatggtggcatgatgtacgccgctgaagttataacattagatcttggggaggcagaaatgagcaatagtaactcttatatcgatgagctgcttcgagcgctgaagattacttggccactactggttgtagtcattgcgtcctcctacggattcttctcccttactcaatcgagaattgattcccaaatggcagaagtcagggctcagattgcttctgatagaaaagatgcctcttctgacaacgctactctaagatcagatttaaacaacggcttcaatagagttgctgacaagcttgatgaattgaacaaaaccatttcaagcattcaagttgagcaagcgactcaaaaagcaaaagctgaaacatcaagtcataactga

SEQ ID NO: 103870 - DNA, 144 bp, Enterobacter aerogenes
atggacagcaaagaacttatgcacgtaatagcgcttctgcttgaggactcgaagcggctgcaggagttggaaccaaatgcaggaaccgaggcccgcatctggatagctaaacaagctctggagtcaggcgatcaggaaggttag

SEQ ID NO: 103871 - DNA, 396 bp, Enterobacter aerogenes
atgcaacctttaccgcgtttaacttctgaacgtctcgcctctttgcctgcaggcacacgcctgaaaatgggtgggcacatcgtgaagcttgtcggtcgtggggtgtttaccaacgatgccggcatcacccagaacatggtcgattacgtcgattcccgcggcgttcccggcagctttgaggagaagattttcctctccaccgcaacggagcacctcaacgcagtcatgtgcgaacactgctatgcacttcgccaccctaacgactgcgtggttcgcaacatcacgaactacatgaccagccgccaggcgcatttctgcgacgacaaagggtgcgccgagaaatatttcattaaacacccggggcgccagaagtcctcacggagaacgagatggtaa

SEQ ID NO: 103872 - DNA, 156 bp, Enterobacter aerogenes
atggtaagtcaggaaagcggaatgctggctctggccatggtgattattgcctatgacctgcagccagaagatctcgataacgcggccaggcaactggccgaatatgacgcagtaatcgacgccaatacggagatgaaagatgttgcgcgtaattga

SEQ ID NO: 103873 - DNA, 177 bp, Enterobacter aerogenes
atgaagcacgctcaggacgatatcagggttggcgcggtgcgccttccctttctgaaagaagtgaaaggctggcttatgccatggggtgaagtgatcagtaaccctttaaaggctcagcggctggctgaagagctcgatacgaatgaagagctggacacgaaaagaggtgcgcaatga

SEQ ID NO: 103874 - DNA, 135 bp, Enterobacter aerogenes
atgtgggtaatgatgaagcttaaacgctccgagcaagagatgtacttccagtattacgacagcagggaagcggctgaaatggcggttaagattatgaactccgtcgccagtagctgggaattctatatcaaataa

SEQ ID NO: 103875 - DNA, 240 bp, Enterobacter aerogenes
atgttcaagctgatacagcgcggtcagatttacgctgattgccacggatggccggtaattatcgccagcagcgacgacaagacggttcgctactggcgccaggggcggatcaacaccgcaagcatagaccgctttaacaatgactttgagccgctctctcacgaagaggcccagcagataaaggcagagctggagcagagcgaacacattaagaaactgcgcgcccagcgggcggcgtaa

SEQ ID NO: 103876 - DNA, 591 bp, Enterobacter aerogenes
atgttaaaccagctggaaaacctgacggaacgtgttggaggcaataacaaactggtcgatcgctggctgcttgtgcgtaagcatttgctcgtggcttactacaacctggttggcctgaaacccggcaaagagtcctttatgcggcttaatgaaaaggcgctggatgacttttgccaaagcctggtggattacctctcatccggtcattttaatatttatgaacgtattatcggagaaatggaagggagtacccctcttttagccgccaccaaaatctacccgcagctggaagccaatacccagcagatgatggactattacgatacctgcctcgaaaacgccatcgatcatgataactatctcgaatttcagcaggcgctgtcagatatcggcgaatcgctggaggcgcgcttcgcgcttgaggacaagctgcttggcgctggtcgtcgctcacgatcagaaagacaacgttggcgacaatatcgcgccgaccgcttgagttgtgaaccgttaacgagtaatttacatacattatccctctgcggagggatttcatcttgtcggagtgcctattttccacgcgaacgctga

SEQ ID NO: 103877 - DNA, 252 bp, Enterobacter aerogenes
atgtacgtgtttttagggggtcggatgtacaaaaaaaagggggtcggatgtacaaaaaaagggggtcggatgtacgagctagggggtcgcatgtacgatcattgggggggtcggatgtacgtggataactttatgtttcaacagcttttttacaggcttattcaccttatccataacttgactcaaagcggaggtgtggcattaacccgaaataaaaaaggcccgcatgggcctatttttttgcttccttga

SEQ ID NO: 103878 - DNA, 252 bp, Enterobacter aerogenes; identical to SEQ ID NO: 92529

SEQ ID NO: 103879 - DNA, 192 bp, Enterobacter aerogenes
atgacgaaacaacagaaaacagcgctgaacatggctaaattcatccagaatcagtctctgctcctgctggagaagcttaacgagcttgatctcgatgttgaggcggacctttgtgagaaactccacgatgatgcggaacatcttttccgtacactgtcctcgagactgaatgcatcacaggatggtaactga

SEQ ID NO: 103880 - DNA, 438 bp, Enterobacter aerogenes
  misc_feature (382)..(391): n is a, c, g, or t
atgtcaaagggtgtgatatttattaattcaattgtggtattgctattagtatttgttgtttataacattgtttttaattttggcgatgctaaattttcatttttgaacttactacggcaccggcgaagaacgttttctaccatttccgccattatattaggtggttgcgccatatttttatatggtggttttatcaactactctttttggatactcaaagagcaaacaatacgtacaaatattggacatgtacagatttataacagcacctactttgaaaccgctaacaaaaataagagtctgatatctgattatattacactgaaaaataaaattttgcagaacgccgatttttctgatgtgatttcaacaatctccggannnnnnnnnnatctaattatttttcagcacagggcgttgagccattaccggcgctga

SEQ ID NO: 103881 - DNA, 531 bp, Enterobacter aerogenes
  misc_feature (481)..(490): n is a, c, g, or t
atgaataagtccgacgcgattctcccactggcgcaggatgccgatccggtttctgacatggtcgataatgaacgggatgaggctgaactggtcaaatcgcgccgcttaattctcctgctggcgctgctaatggtagtgaccggcgtatgggcgtggtttgcgaccctggacgaggtttcgaccgggacaggtaaggtgatcccaagctctcgtgagcaggtgctacaaacccttgatggcgggatcttaaccgagctcaacgtccgcgaggggagcagggtggcggccgggcaggtcgtcgcgcggcttgaccctacccgtagcgaatcgaacgtcggcgagagccaggcgaaatatcgcgcttcactggcagcaagcattcgccttaccgccgaagttaataaccaaccgctgatttttcctccttctcttaaggcctggccggggttactggcggaagaaacccgcctctatcatagcnnnnnnnnnnggaaaaaccccgcctctatcatagccgacgggaccagctaa

SEQ ID NO: 103882 - DNA, 1461 bp, Enterobacter aerogenes
  misc_feature (1369)..(1378): n is a, c, g, or t
atgccgattcaggttctaccgccgcagctcgccaaccagattgccgctggcgaggtggtggaacgtccggcgtcggtagtgaaggagctggttgagaacagccttgatgccggcgcaacccgtatcgacattgatatcgaacgcgggggcgcgaagcttatccgtattcgcgataacggctgtgggatcaaaaaagatgagctggcgctggcgctggctcgtcacgccaccagtaaaatcgcctcgctggatgaccttgaggcgatcatcagccttggctttcgcggcgaagcgttggccagtatcagttccgtcgcccgcctgacgctgacttcgcgtaccgcggagcagcacgaggcatggcaggcttatgctgaagggcgcgaccaggcagtgacggtgaaaccggcggcgcatccgataggcaccacgctggaagtcctggatctgttttacaacacccccgcgcggcgcaagttcatgcgtaccgaaaaaaccgagtttaatcatattgatgaaatcgtccgccgcatcgcgctggcgcgtttcgatgtaacgattaatctcagccataacggcaaaatgatgcgccagtatcgcgcagtggcggaaggcggcccgcgtgaacgccgcctcggctcgatttgcggcgcggcgtttctggaacacgcgttggccattgagtggcagcatggcgatctgacgctgcgcggctgggttgccgatccgttgcataccaatccggcattagcggaaatccagtactgctacgtcaacgggcgtatgatgcgtgaccggctgatcaaccatgccattcgccaggcctgtgaagacaagctgggcgctgaccagcagccggcgtttgtgttgtatctggagattgacccgcatcaggttgatgtcaacgtgcatccggcgaagcacgaagtacgtttccatcaatcgcggctggtgcatgattttatctatcaaggcgtactgagcgtgctgcagcagcaactggatgtgccgttggcggaagaagacgaagcgcccgcgtcgcggccggtgccggaaaatcgcgtagcggcgggcgctaaccatttcgctcgcccatcgcctgcccgggaaccggcggcgggttatgatatccgcgtgccgcgtgaatctgccgccgccggcggcggctatagcgcaggcggcgccaactggccccacgcgcagccgggctatcaaaaacagcagggggcgctttaccgtcaactgctgcaaaccccggcggcggaaaagccacccgttgcgccggcgcctgcggaaagcctggcagcccacagccaaagctttggccgggtgctgactattatcggcagcgattgcgcgctgctcgagnnnnnnnnnngagcgcggcggcacattggcgttgctggcgctgccggtggcggagcgttggctgcgtcaggcgcagctaacgccgggcgctga

SEQ ID NO: 103883 - DNA, 1284 bp, Enterobacter aerogenes
atgtctgatgctaaagcaaaaatcaccctgggtggtgacactgctattgaacttgatgtgctaaaaggcacgctcggtcaggatgttattgatattcgtagtcttggttcaaaaggtgtcttcaccttcgaccccggtttcacttcaacagcctcgtgtgaatctaaaattacttttatcgacggcgatgaagggatcctgctccaccgcggtttcccgatcgatcagctggctaccgagtcaaattatcttgaagtgtgctacatcctgttgaacggcgaaaaaccgactcaacagcagtacgacgaattcaaaactaccgttacccgccacaccatgatccacgagcagattacccgtctgttccacgcgttccgccgcgactctcacccgatggcggtgatgtgcggtattaccggcgcgctggcggcgttctatcacgactccctggacgtaaataacccacgtcaccgtgaaatcgccgcctatcgtctgctgtccaaaatgccgaccatggcagcgatgtgttacaaatattctatcggccagcctttcgtgtatccgcgcaacgatctctcctacgcgggtaacttcctgaatatgatgttctccacgccgtgcgaaacctatgaggttaacccggtgctggaacgcgcgatggaccgtatcctgatcctgcacgctgaccacgaacagaacgcctcaacctcaaccgtgcgtaccgctggctcttccggcgctaacccgttcgcctgcatcgctgcgggtatcgcctccctgtgggggccggcgcacggcggcgccaacgaagccgcgctgaaaatgctggaagagatcagctccgttgaacacattccggaattcgtgcgccgcgcgaaagacaagaatgactctttccgcctgatgggcttcggtcatcgcgtgtacaagaactacgatccgcgtgccaccgtaatgcgtgaaacctgccacgaagtactgaaagagctgggcaccaaggacgatctgctggaagtggcgatggaacttgagcatatcgcgctcaacgacccgtacttcatcgagaagaaactgtatccgaacgtcgatttctactccggcatcatcctgaaagcgatgggtattccatcctcgatgtttaccgtcatcttcgcgatggcgcgtaccgtcggctggattgcccactggaacgaaatgcacagcgacggtatgaaaattgcccgtccgcgtcagctgtataccggctaccagaagcgcgatttcaagtccgatctcaagaagtaa

SEQ ID NO: 103884 - DNA, 858 bp, Enterobacter aerogenes
atgcatgtaaaacgttttcgagcattaatcgcgctatgcgtattattggtcgcgcagtggcaatttaattttatcggttatcagttagctttttacattctgatgggaatactgggagcctttgcaatatatgaaatattgcgctttgtcgtcattctgcgtctgagaaaacaagtccctgatttaaaattgagttatctaaccaatctgcatccgcactacacactgaacagcgagagtgaacgacgcgccgcgatggcgagcgcgttatatttgatttcggaaactactactaatggtccttcaacgtcctacgttaattcactggaaacactggatatggagaacgccgatctcgtcaaactgaaccggttggatattgaagctgcgtgggatattagtaacggcgatgcgatgcgggagatgattaatgaacttatcgagcgggctcagacctatgaggcgacgtcgctgcaggtgcttggcaaacaagaacgttatcagcgctatttcgcaggttatgggttagttttgtccgatattgaatcacatcctgtaacggggtttgacatcgtcagagcggcatggatggttcgggcgggattttcaatcggctttttaaccgaagaggctgctcggggttatttagcattaatcggtgaactgctcgcaaaacagtttgtttcttgggagtcgctggcggtgtcatatctcgtcacctattcagaatggaatggaggattgcaggatgacgtgggaatgacaatgaaagagtatatgctaaaggagcgcattattggcgttaaattactgcttgaggatagtgattcgccattacgccaagctgcttttgactaa

SEQ ID NO: 103885 - DNA, 744 bp, Enterobacter aerogenes
atgaaaattgatttaaatgccgacctcggcgaaggctgcgccagcgatagcgcgctgctgcagctggtctcttccgccaatatcgcctgcggctttcacgccggcgatgcgctgctcatgcagcagtgcgtgcgcgaggcgctgaaaaatggcgtcgctattggcgcgcacccgagcttcccggaccgggaaaatttcggccgcaccgcgatgcagttaccgccagagacggtctatgcccaggtgctgtatcaaattggcgcgctggcggcaatcgtgcatgcccagggcggcgagctgcggcacgtcaaaccgcatggcatgttgtacaaccaggcggcgaaagagccgcctttggccgatgctatcgcccgtgcggtgcgcgatgccgacgccggactggtgctggtcgggctggcggggagcgagcttatccgcgccggacagcgctatcagctgacgacgcgccaggaagtcttcgccgatcgcggttatctcgccgacggtagcctggtgccgcgcagccagccgggcgcgctgattgaaagcgaagagcaggcgctggcgcaaacgctggaaatggtgcagcacaatcgggtgcgcagcctgagcggcgaatgggcgcatgtgaaggcggaaacggtctgcctgcatggcgatggcgctcatgcgctcgatttcgcccgacgcttgcgcgccgcgtttgccgggcgcaatatcgacgtcagcgcggacatcgattaa

SEQ ID NO: 103886 - DNA, 483 bp, Enterobacter aerogenes
atgaattacatgaaaacattaatgttaaatatttttatgtttgttgttttaattataagtggttgcgctagtgaaattaaaaaaaacacatttaaaagatacgaagaagatactaagggttctgaaatgaaacggagtagccaaaatctcattgatactgataaaattgaattcgcccgtacagatgagtctggtatgttatctaatttaacctcatctttcatcctcgtgctaagtgaaaaaaatcccgaaaaacagtttgttgatatatttattaaaggaaaaactaatgaagcaaaaatttatgctttattagggttgttttcattaaatcgagaaaaatactatacctatatggaacaattaaatggcgatggaatagtgctggttcaggaaggatgtttgatttttgaggtgcgtgtttcggatattctggtcaaaatcgaggatggtagcttattacaaaaggtaatgtcttattga

SEQ ID NO: 103887 - DNA, 411 bp, Enterobacter aerogenes
atgacgatgattggttttgataaaaaacatggggcatttaatttttatttcgataatgcgagtgttatggatttggttgagcgattgcatcttgaggaggacggcgtgctgactggtaaagtcgttaagtacgacaatgaaatgcaatcgtataaaatatcaataaaacttcatgacgaaaatgactatgtctattttaatagacgagagcttgttttttggttatcgacagaaacattagattatgccttttataagatgaaagagtatctacgcagcggtgactttatcccctctgagttctgcgactttgttgtggttgatgaaggaatgaatccaaagagaggcggtagggtgaaaatagcagttttttttcacgtgatgtcagggccactaacaaaattacattag

SEQ ID NO: 103888 - DNA, 129 bp, Enterobacter aerogenes
atggcgctccatggcatgacgctgtggagactcatcatccgggtcaaaattaagtttggaatctatcgcggacgccgtctggtgcagtacgtcgcactggcaatcattatcgccacgattgtgggatag

SEQ ID NO: 103889 - DNA, 1029 bp, Enterobacter aerogenes
atggattttgttaaaaaactcgagtttggaaattacactctccgttttggtgatgatgttttattagactactatgatgaaatcgttttcccatcttttttagaaatggcaaacattcgcagaatatctgataaatcagagttctttttcattgatactgaatgtgtcatacttgatgaagaagcaacgcccccagtactaggaattaaagggcggattattaaaaacacattactaaccagagaacaggtatttgatggtgctgatttagtcgaagatcatgatgaacttgaaacagcacctagctctttctttcttctaatattaaatacgcacagattgattctttgtaaggaagttagtggtgcacctacaattcaaaacttccagtcaactagtcagtgcttcttaaatatagaatatgagaaatacatatctcatttatacgaaactgcacaaagagaacgcgaagaaaatcctgacttacctcgagttactaaaaaagccttacggagtgaaatcgaacgacctaagctaagaatcacacctttaactgatgaacaaagcttagaacaattcattgaaaactttagaaaaatccaaaatgtctcagtaaagctactccctacgaatcaagaggaaattgataacgacgaattttgggagtcacttgaaagcgctggagacgaaatgggcagtatttctacgtcaattcgtttttcaaacaccgattcgggtttgaaccatgatgctgttttagaacaacttacatcagcaactagattagcaaattcaggaataaatattaaaggatatgataacgaaggtgatataatcaaaggcagtaatgatgattttgttttattaagtgagatgaatgaattatcaaaaaacacggaagtggctgcaaatgaaagttatgagcgatatgaagttcttgtaaatgaaggtaagatatcgctacccagatctctttcacaaaagacgattagaattattagcaatatatatgaaaggtttggcagatga

SEQ ID NO: 103890 - DNA, 594 bp, Enterobacter aerogenes
atgtcagcaataaagtacccaaatgagatcccgctaaattttgagagcggagggcgagaagctatcgaaaggctagtttcagcatatggctttacaacgcgccagactctagctgatcacctgaaagtatctaaaagtactttggctaatcgatatcttagagatcccttccctttggactggatcatccaatgtgccatcgaaaccggagcaacactcacttggttaggaactggacacgggcaagaatttgaaagcgaagaaagtgaagttttaaaaatttccaaagtaacacttattgataataaaattttcgatgcaggtcatttatttgtagataaaaccctgcttcctcactttaatgatttacttgcaatagaggacgaagattgcacaaatattgcacatgtaaataaagaaaatattgaagatggcagatggttggttcaataccaaaataactttaagataaaacaaaattttctattgcctggaggtaatcttcgggtaacagacgatgatttaacatttgattgtaaaagagaagatataaaattagttgcaaaaatcttctcacaatatcgtactatttaa

SEQ ID NO: 103891 - DNA, 375 bp, Enterobacter aerogenes
gtgaaagggaactggctggccagtgtcagcggtaatgctgaaagcagaattgccggtaatcatacagtgcaagctggcggggatctgaccgagcagatagggaaaatccgcaagagtgttgcggcgattcagcagcagataattgcgccggtagtgtggattggttccggcagtatcaacgtggcacagctgatgctggatacccttgacgtattgaaggagctggcggaacagacggccagccatacccacagtaacacgggtgcccccacgaatgctggcgctatccgtggcgctggccagaaagccgatcagcttaacggtaaatactcgccggtgattggccagtatacgtcctgccccagccagaattaa

SEQ ID NO: 103892 - DNA, 234 bp, Enterobacter aerogenes
atgaacaaaattgtgaccctcatttatgcctctggggctaccaaaaaagtctccgtgccagataacgtaacttctgtgactatcccgtcagataaatcgacatatccacctgaagatactcaggctcaaattgaacaattagcacatgaagaaaaaatctactggtttgcgcgggaatcacaggacgcaatcagctttgaccgagtgaaatgcattcttctcaacattgtataa

SEQ ID NO: 103893 - DNA, 690 bp, Enterobacter aerogenes
atgatctgtagctccctatatctttgggttttttggttacattttgatatcaatatacttcaatttatagatgcagcagacattataaaagcagccgctataccatccatcccattaatttcaataatgatttttaatatagctttacaacaatataatgttgtagacgctgaaacgcgcgaaaaatataaggctgcagggggtgggttcaaagcttactcatatgcagcaactgcttatattatttttatagttttatttggattgggtgtattaagtttttctgtctataatttgtttacaggtactgtccctactaagtatgccagtgcagcacttttgataggctgtttttttacctattacctaataagtaaagaaaaactatttgaagatttcggaaaattgcgtcttttagtaatcgtctttctatgctacttcccttcgcatttaatgcatcaggcgattggagatgctaaagatatcattgccggcaaggatacttttttagtttctagcaacctaagctgctcaaaaaacaaacgcgacaagttccgatacattgcaactttatctgataaagtattctcactaaatcttactgatcaatcgctatgtattcaacattatgagttcttatcattgatacgagaaaatgcacaatctttatcagatactgatgctaagtag

SEQ ID NO: 103894 - DNA, 396 bp, Enterobacter aerogenes
gtggcatcagagagaaaatccaagtacgattctttaaaccttcacgttcctgaagacctaaagcagtctttcattgatggttttgacgaagttggtttacatgccggcactgtgcattgtttctcctccaaaccaacaaccatcaaggaatatctaagtgttatttttgagcgtgggaagacttatgccccattagttcttaaggtactggatatgctacaaagaaaacacagtataaaaattgaaattgctgctgatcgtaagttatttgatttgaggggcgtttctacagaagatgctcttaagcttattgaagcagcaagttccgttcgtgtatcacattctgagaatgttgaaattgtgaatgctgagtcaaccaccgaaatttccaaataa

SEQ ID NO: 103895 - DNA, 453 bp, Enterobacter aerogenes
atggctgaatggtgcgaaattgacttcgaaaacagtctgtgggaaatacctaaaaataggatgaagatgaagcgaacacatctcgtcccgctatccagccagtccctgcatgcccttcatcaacttaaacaactcactggaagctatcagtttattttctctggacgaaatgatgttaataaaccgatgagtgaagccagtgttaacatggttttgaagagaattggatatgataaaagagctaccggccatggttttcgccacactatgagtaccattcttcatgagcaaggttttaacacggcctggattgaaacacagctagcacatgtagataaaaactcgattcgtggtacttataaccatgcccagtatctggatggtcgtagggaaatgatgcagtggtatggtgattatattcaaaattgtgaaatgcgtttccataaggaataa

SEQ ID NO: 103896 - DNA, 7509 bp, Enterobacter aerogenes
atggctaaagcgcactccacgccgctcaacgatattgcgattatcgctgcgaatttaaaagaccgttataaaaacggcttccctgttttgaaagaaattgtgcaaaacgcggatgatgcgcaggcatcatccttaatctttggctggagcccgggcattgccggatccgatcatccattactgggtgatcctgcgcttttctttatcaataatgcgccgctgacacttgaagatgtagaggggatcctctccattggcattggcaccaaaccgggtgacgaaaatgcggtgggaaaatttgggctcggtatgaaaagcctgttccatctcggtgaagtattcttttaccagtcatttgactggcataccgcttctgccaaatcagacgtttttaacccctgggacagttacagacctgcctgggctgaggtgagcgagcaagataaagttcgtcttgaggatgaagtccgcgcaattacccaaaatgagtgtgatggttatttcgttgtctgggttccgctgcgttcagagagtatctatcaggcccgccaggatgatgaaaattttattattgttggcgaagactatcgttatgaggtgcctgattttatcactgactggcgattaggggataagctcgccagcctgttaccgctgatgaaaaccttgcaggacattgagctggtcgtgaaaacagggcagaggtatcagcgtcaaatacatatctcgctgccagaaaaggcaactcgcccacaatttaccaatcttaatggtgctggggaatggcaaggccacattagcgttcagcgtgctggattgccggaccctcagcaaaaatactacgtcgggcatgaggttttgctgaatacgcctgagttttctgccctgaaatcacaacgcacctggccattcagttattcacgagaaggtaagaagaccgcggataaagcgcttcctcatgccgctgtggtaatgctggcggagaaagtacctgaaggagaggcaacgctgacggtggaatgggcggtgtttttacctttgggtgagcaggacaccgcgcagcatgcgcagaaacaaacattctctctttctggtcagtactcgtatcaaattattctgcacggttactttttcattgatgccgggcgagtgggtatccaggggctggctacactcaccagcgccacgtcgttattcaatgccccagattctccaggccaggaacaactggttcaggaatggaaccgctgtcttgctactcagggaacgttgccgttattaccgaaagcgcttgcctctcttatgtcgcttattcacgccggggatgcggaaaaagcggcaatttcggatggtgtgcgtagaactttacgcaacaataatgcctggctccactgggtaacgttgtaccatctgtgggtatgcgaactaacgcgggatggaagtcagtggtgtttagttgatgcgaacactcccgttcgtctattgcctgccacaccttcaggtgaagcgcatcgcccctgggaagtgctgcccgctctggaaagcctgggtgtaacgcacaaatttatcgatgaaacgcagcagaatatctacaacgaatttaaaagtaagtggcagttgtctgagattcaggcgttgctacaggccataccgtcaatggtgtttacggcaccaaagctcacgaactatctcaaccaactgctgaaaacgttgccgattcaatcagacagctttgtgcatgacctaattgcattgctcaggaaaacgttttttaacgtgccgctggtggagctctcacgtaaccagactgcgatcggtgagttgatggcgcttattcgcccgacctggcgttacaggattgccattgatcgtcaggagcaagccctgtgggaagcgcttggacgtactactatggatacgctgctggtgcccgcttttctcgataacagtaaagagcccgccagtgcttctttgaactgggagacggttggcagcctgctacaggcgatgcaggcgcaggcttctgccagcgatgactttgaaaaactggtacagaattttatcgacaaactctcagttcccgatcaacaggaattgtaccgccggtttgatacgttgaagatctttaaggtttcacagccaacagggaaaccttacctggagacgcgccgtcacttgcttgaactaaaacaaaagcgaaggatcttcaaacttggcgggagcgccaactttggtatgggtttaagtgcattgttgcagcaggcactgtttgaaaaagaaatcgtactgatcgctaataaaactaaccagaccctttttggtggttctgaatattctgaagcacaggagtgtgacagcgcaggcgtggtccatttgcttgagcttcatcctcgcctggattttccggcaaaacgcattgacctgctcaataaaatggctgccgatggggacaaatttggccccagagagcggcttgcgtatcgctatctgatgcacggtaattcggatgatactggtgaagctgaattgtggaaggcgggtaaagcgcatcccgtatgggcaaaaattctttctgatgccgattcgcagcaggttaagtggactattatttcgccagaaatagagcagaatcttgggctgactcccggattcgagaaggctctaaggcttgatagtgttacgccggatcatgtgatccacagcttcaaagaaagccttgaatatctggagcttgatgacttatctgcagaagatgcggaagaagttctgatacacattggtcgctctatgggcgaaacaatgtggcggaagatggcacttcatcgtagggaaggcaaagacgggtatatatcccttgatgagcgttgtttcttgcgtggggggcgcattgagctgcccgctaaattgaacggcaatgtcacgttcattcaatccgccagtcagccagaggtgcaggaacagcagcgtaaattcctgccgatggtgaacgctgaacatgcggtcatgctggccttatctgagcttcacccggagcgatactgcgactttatcctgcagttgctaatgcagccgacgaatgacttgtcttcagagagagtattcaacaacctacgcagtcaaaaatggcttttgcaccgtggtgttgcgatagctccagaaaatattctggatatcaaagcggcagactacccggagatagcgaagctgacggaagccacaccgctgatagcgctgcttgaggatattgctctaccagaagacgctaaccgcgcgctgagccaatttatcttgcagggtaagtctgcgttttataaagcgctcaatgttgcaggcacacttccgctttatgctatcggcatcagcttacgtctcactgatacggttattcttcaggccagcgacaggtcttacgcgtttgagaactttgaaggctggcggcttttaattgagtgccttaaaggtgctgagtcacttgagggaaatgaggccatcaatgcgctgagttttgcgcatccagtgacggacaagatagttgcaagctaccggcgtctagtcgatagcatgagtccagcccaaagcggtgaattgcgtaaagcgctgttgagctcgttgtgtcatacccattcagcacctactagtgtattgcgttcaatgtcgctcagaacggcagcggacacctgggcgctagccgccgatctctgttatggcgtaacgggggcagagcgtagtgctgtactgcatgaagacgactgggcgtatttgcatccttggctgcaggctaatgatttgacggtagacagcactgagtctgaagggcatctcactcatgtggagcattcagccaatgtcttaagggactactttgctccatgggaacgctgggttccacgtaaggcaatcgctgcgctgctggctttattggcggggaatcgtaaggttcgtacactgtgtgagagctatctggggctgcaaagttatgccctgtttgtgaaagaactgtcgcaagacagtaaacctttaactaaccatgaagctcactttgcggggttaacgctcttacagtgcattgagaaatatgcctttgccgtgaaggtttacgaagaaaacacgttgcaggttcattcactgttccaggaacgtttgaccgtggcgctggcaactgatctggatacaatctttgtgggtcagcacggctacgctttttataccggccaggcaccgcaaatcttcattcgccgattttccccagaccagtacacctctcagcagctcctggcaattttaaagcgcagtactagctggctgcaggaaggcatttatctgcagcgagcaaggctggatacgctctggcaatcctttgagcaggccgagcaacttgacgtgaatatcgcgcgagtcactatcctgaacagcatcgttgagcgcctgaaaacgctgggccttaaaaactctcagcttaacgttttaatgagagcctatgagagtgagcttcactctcttgctgaaagtagtgacggcaagtcgctccacagcccgaggctcactgaaattgtctatgacattgcgaatgccatccgagatcgccctgagctgcaggctgaaatattaacagcggtcagaaagcgtatagaggatgctcagtatcagccatcaagcgttccttttgagctgttccagaatgccgatgatgcagtagaagagttgtttaagctggatagcgatgcccgtcatgagcgggtgcaccagaaatttatggtgaaagagcaaaacggcgggttgtcgttcttcaactggggtcgagaaataaaccgcttccagagcgtgaaaaatgagcaagtcgagaatgttcatgatggctacaaaaacgatctgaaaaaaatgctggcgctttaccagtcagataaagagcagggcgttaccggcaagttcggtcttggcttcaaaagctgtctgctggtgtctgataatccttacctattgtcggggcggctggcgactaaaatagcgggtggaattgtgcccgagtcctgtgacgctgaaagctataaacaactaaatcaactcactgaaagtgccgcgataaatggcttgtcaccaactcttgtgtatttgccactgcgccagcatatgcaagcggaaatggtgttaaaagattttactctgtatgcaggtttactaagtctttatgcacgtaacttgcgccagattgtcattgatgagcatgaatggcgctgggagcctgctcagtataaacgtattcctggtctgtcattgggcaaggttatgttgccgaacagcaagggtgttcagtcaccagtgcgagtggcggtttaccagaccgaaatcgatgatgaacgctgccatctagttttccaggtcacgcgcaggggcctgagaggttttgacactcatattccgcgactgtggaatttgtctccgttgatgagtgatacccggcagggttttttgattaacgctggatttgaggttgatattggtcggcgccagttggctattgaagctgaacgtaaccggggcatcattcagaaagcaggggcgaaagttcattctctgctggaattgctctggcgtgaaactgagtataactgggaggcgctggttgctgagtggcaactaagcccagaattaactcatagtcagttctgggaaagcatctgggacgtgatgtctacaggcatcagtaacgacgctaccgcgatggaaaatgaaaagttgctacagcaactttacgaaagcgaaaacggcatcatgagcttctatcgctcatatcccgcgctgcccaacggatttaaagagcaggctgccgggctgataaagtggagcgacagagtgcgttgtgcggatgaactggtttctcgtctggcgagttcactgattcatctccctgcgtttcaggcattgcacagtgcacagtgcctggtagcagacacgacgggaggcaaacttaaagtcgaaactaaactgtcgcttgaatcgttattaagtgcgtcattgccggataaacagggcgttgatatccaacatttggttccacgggatgctgagaagctggcagtcgtatttaacgaagagttcgataagcgactaggtgaactgacaggctggcaggataaaattgaggctttcagaaaacagctggcgaaccttcatgtgcaaacacaagcaggttccacacgtccgattagccaaattttgctcggtaacactccttgtgccgaaaaaaatgaacggttgatatctgggtttgcacctgccggtaccatcatttcgtcatcatattctaagcaggcctgtgaatttattgtttattgcaaacgcagaagtcagggatatggttttgacgatttacttgaatgggcaggtcgcaatgacctggcggctgataatcaaaagcaacaagcattttgtcgttttctgattgaaggtctggaaggagataaactggcgggtaagctaatggaagaaatacctccaggctggttacttgaacttaaactgcgcccaggcgcgttcccggcagactggcactggagcaataatgatattgcctctctcctgcagggaaggttactgactaatagcgacagaacaagggcattggagcgcgaaatttgcgagacaccagaagaatacaaaccgttggtgactcctggtgaggcggtgcaaaaaatttaccgctggtgggaagagaacaagcaggaagagttggcgaaatacaatacccgactctacccagaaggttggtttgactgggaggctttgagaaatggctctgacgatcagcgctcacgcatggcgttattgaaactgctttatcttggttcgtgccagaccattggccggactcaggaggagcaacaccgtgccgcaattgagcattttgaagacaaaggctggtgggaaacgtttatcaatccagatgctgcgcagcagtggttagatgtaatggacgattaccttgaggattctttgtacggagatacgtatcgtatctggttgcagatacttccgttgtatcgtttttccagacacttagatacctatggcgaactgctgaatatgtcggaagcgttccttggagatattagtgatttactgcgaccggcatccagtccgaagctttcggggacgggtagatggaccctggctcctgagttacgtgcgaccctggggaccggagtgaatttcatcttccgtgaattggtgcgtaataacgtgtttaccgattccagcattcatcgatattgtttttctgcgccggaacgcgtcaggcgtctgttactggcgatggagttcgacgaaatagatgttaggcaatccacagccagtgattcacttctgttgtggacgtttttcagcgaacaccttggcgaggaagatgcgacctttaatcattgtttcgacataccgctacgcattttaaccagtgacgggaaacgctcacttcgtattgagatatttggacaggatcccctggattacgtatga

SEQ ID NO: 103897 - DNA, 1101 bp, Enterobacter aerogenes
atgccggttcatcatgctatctggcgggtaggggagaatcctcagccgctgaccatcagcaaactcgccagcgagcaactgctggagaagatgattttaaacgaccctaccatcctctctgatcagtggatgatcatcggccatcaggaaaatacgctcgataaagggcgtatcgatctgctggcgattgcgccggatgcctcgctgatcctgattgagctaaagcgcgaccgcacgccgcgcgaagtggttgctcaggcgttggattacgcctcctgggtggatgatttaagtgctgagcgtctgtcgcagatttacgatagattttccggtggtggaaacttgggtgacgcattcagacaacgctttaatgcagaactggaagaagagtcgctcaatcagtcgcatcaaatcattatcgtggcggcggagctggatccctccaccgaacgcatcgtcgactacctgagtaagaatggcatctccattaacgttctgttctttaaagtattccaacacggtgacgaacaattcttaagccgtgcctggcttatcgatccgagtgaaacgcaaaccaatgccgcacaggccacagctaccagcgccaacgcgaaagaaccctggaacggcgagttttacgtctcgtttggcgattccaacagccgtgtctgggaagaggcgcgccgctacgggtttatcagcgcgggtggcgggagctggtatagtcagacgttaaaacagcttcagcctggcaaccgcgtctgggtgaaaataccggcaacgggttacgtcggcgtcggtattgtacagagcggcgttgagcctgccggtagcttctccatcaacactgacgacggtgaaaagcgggcgatggatgtgcttaagtacagcgatctctatcaccggaacgcagatgaccccgacaagtctgagtattttgtcccagtgaagtggctggaaacccgcagtgagcaagaggcggtaaacgaagtcggattcttcggcaatcaaaacacagtgtgtaagcccaccacgccgaaatggcgtcacaccgtcgaaaaattaaaactctattttaaaagctgggatattcaagtgtaa

SEQ ID NO: 103898 - DNA, 1758 bp, Enterobacter aerogenes
atgactgttgagaagctgattaccgaccatatcgatatctggtcctctgccctacaaacccgctccacggccgggcgtggtagcaacggcaaaatcgacctctacggcattaagaaactgcgcgagctgattctggaactggcggtgcgcggcaaactcgtgccccaggatccgaatgatgaaccggcatctgagttactgaagcgtattgctgccgagaaagctgagttggtgaagcagggtaaaattaaaaagcagaagccgctgccggaaattagtgaggatgagaagccgtttgagttgccggtggggtgggaatgggtaactttagcaacaattggtgaaattgttggtggaggaactcccacatctgacaatccacagtattggagtactgagggtataaaatggttaacgcctgcagacctcaacggattcaaaggaaagtatatatcatctggcgctagagatattacagccgctggacttgctagttcatcagcaaaactaatgccgaaaggaactgtgcttttttctagccgagcgccgattggttatgttgcaatttcaaatgctgagctgtcaactaatcaaggatttaaatcttgcgttccgtacatcaaagaaagtgctgaatatatatattatttcctattgagtgcggctaagaaaatagatgaaatggccagcgggacgacattcaaagaagtgtcaggcgcgatagtgtctaaagttttgttgcctcttcctcccctgaatgaacaactaaaaattgttgaagttactgatgatttaatggtcctctgcgaccaactggaacagcaatccctgaccggtctgaacgcgcatcagcagttagttgaaactctgctggcaacgctgaacaacagtcaaaatgccgaagaactcgccgaaaactgggcgcgaatcagccagcatttcgacacgctatttaccacagaagcgagtatcgatgcgcttaagcaaaccgttctgcaactggcagttatgggtaaactggtgccgcaagatcctaacgatgaaccggcttccgaattgcttaaacgtattgaggaggaaaaagcgcaactggtgaaagaaggaaaaattaaaaagcaaaaaccgttgccgccaattagtgatgaggaaaaaccttttgagttacccatcggttgggagtgggttagattagggagtttatgtgaattcattacaagtggttcacgaggatggaatcaattttattccgatgatggggcaatatttattagatcgcaagatataaaatttgaccgtttggaatttgataatcgagcttacgttaaactaccattgaacacagaaggcactcgaacacacgttgagttcggcgatctattaatgacaattactggtggtaatgttgcaaaagtagcaattgttgatttagatttagaggatgcttatgttagccaacatgttgcattaattagattggtttataaaacaataaactcatatatacatgcttggctaatatgtgaacatggtggccgaaaacatcttttagatattagttatggggcaaaacctgggctaaatttaaaaaatattaatgatctacttattccttttgctcctcaaaaacagcaagaaaatatactaatgagggtcaatgaactgatgtcactgtgtgacaatctcaatatggttttgcaatccgcccaacaaacccagctccacttggcggatgccctcacagacgcagcattaaattaa

SEQ ID NO: 103899 - DNA, 2442 bp, Enterobacter aerogenes
atggctggcgtgaacaaaacgcacctgactgaaacagacatcattactaaattcatccttcctgcggttaaggatgcgggctgggatgtgatgtcgcagattcggcaggaagtgaagctgcgagatggcaagattgtcgtccgtggcaaactggcctcacgtatcaaagttaagtctgccgatatcgtgctgtatcacaagcctaacttgccattggcagttatcgaagccaaggctaacaagcacgccatcagtaaagggatgcagcagggactggactacgccagtctgcttgatgttccctttgtatttgcctccaacggtgatggatttatcttccacgataaaaccaacccgcagcagctcgaatccgaaattgccctcagcgacttcccaacacctgaacagctctggcaaaaatactgtgtctggaaaggattcactcaggagcagttgcccgttatcagccaggattatttcgacgacggcagcggaaaatcaccccgttattatcagatgcaggcgatcaaccgaacggtagatgccgtatcggctggaaagaatcgcattctgctggttatggcaaccggtacgggtaaaacgtataccgcgttccagataatctggcggctgtggaaggccaaaaacaagaaacgcatcctcttcctcgcggaccgcaatattcttgtcgatcaaactaaaaacaatgatttccagcctttcggcgcggcaatgaccaaagtcaccggacgcactatcgatcccgcctatgaggtgcatctggcgctgtaccaggccattaccggatcggaagaacatcaaaaagcctataaacaggtggcgccggatttctttgacctgattgtgattgacgaatgccaccgtggcagcgcgtctgaagactcggcctggcgagagattctggaatatttcggcagtgccacacaggttggcctgacggcaacaccgaaagaaacggaagacgtctctaatatcgactacttcggtgagccggtttacacctattcgctgaaagagggcattgaagacggtttcctcgctccttacaaagtcgtgcgcgttgatatcgacgttgacgtccagggctggcggcccattaaaggccaactcgataaatacggcgaagagattgaggaccgtatttacaacctgaaagattttgaccgcacgttagtgattgatgagcgcaccatgctggtggcgcagaccatcaccgattacctgaaacgtaccaatccgatggataaaaccatcgttttctgcaacgacatcgatcacgccgatcgaatgcgccatgcgctggtggtactcaatcctgaacaggtgttgaagaacgaaaagtacgtgatgaaaatcaccggcgacgacgatattggtaaggcacaactggataactttattaatcctaagaaagcctaccccgttatcgcgacaacatcagaactgatgacaaccggcgttgatgcgcagacctgcaaactggtggtactggatcagaacatccagtcgatgaccaaatttaaacagatcatcgggcgcggcacacgtatcaacgaaaaacacggcaagctgtggttcaccattctcgacttcaaaaaagcgactgaactgtttgctgacccacgctttgatggcctgccagaaaaagtgctggtggtaaaacccggtgatatttctgacaaagattcagacttcaatgaacaactggatgcggaaaataactcagatggcggtgataatgatgccagtgaagcgcgagaagacgtcgctgactatcaggtcaatcgtgacaggcaggcgggcaacggtgagttccatgttgacgatgaaaacaaagtccgcaaattctatgtgaatggcgtggatgtaaaagtgctggctaagcgcgttcagtattacgattctgatggcaaactggtgaccgaatccttccaggattacacccgtaaaacgatgctcaaagatagcgaatacgcctcactggatagcttcgtgcgcaaatggcaggatgcaccacgcaaacaggtgatcatcgaagaactggagcaacttgggattctgtgggacgtgctggccgaagaggtgggtaaagatctcgacccgtttgatttgctctgtcatgtggtgtacggtcagccgccgttaacccgtcaggaacgcgtggccaatgtgcgtaagcgcaattacttcactaaatacgccgagccagcacagcaggtgcttaacacgttgttggataaatacgccgatgaaggcgtgcaggaaattgaggatgttcaggtacttaaactgaagccattcgatacgctgggacgtccgatcgaaatcatcaaaacacgctttggtgacaaaaaggcgtatgagcaagccgtcaatgaactggaaaacgaaatctaccagttaccgccacgctcagcctga

SEQ ID NO: 103900 - DNA, 1023 bp, Enterobacter aerogenes
atggctaagagggtgatttttgccgttgctggctcaggtaaaaccacactactgatagacagactcacggtaaacagtcgtacactaattctgacgcataccatcaataacgagacacatctgcgatccaagatcataagtttgtttgggtttatgcctgaaggaattcgtgtaatgacttggtttgaatttcttcacggtttctgttttcgcccttttctccaggaacatttggcttctcgaggcctgagcttttcccaaccgccacagaggatcccacgcactaatagactgcattatcaggataatagcggccgcatatatcatcggcggcttgctcaattattaatggctagaggtatgctgccggatatatgcgatcgccttgaacgatattacgacgaactattagtcgatgaagtgcaggattttgccggaaacgattttaatttcttattggctctttgcgaggcagaaatatcagtcctttttgccggtgatttttatcagcatacctatgataggagcagagatggcaatgttaactccacgcttcacgacgatattacccgatatgaagcccgcttcactgctgctggattggtggtggatcgtgagacgctcagtagaacgtggcgttgctcaagcacaatatgtgaatttattactgagaaactggatatccgcatcgatgcacatgactttcgtgaaacatctattgacatcgtaaccgatactgagcgtgtggccaccttacattcagacgatagcgtcattaagcttttctatagtgagcaccatcgttatggttgttactctctaaattggggagccagtaaaggactggatcactttcaggacatatgcattgtgatgggagctacgcactggcgtcttctaaataaatcgaatctacagacacttccaccttcgtcgcgcaataaactttatgtagcttgctcccgggctcggggaaacatttatttcgtttctgaagcgaatttcaggaattacaaaaaatga

SEQ ID NO: 103901 - DNA, 447 bp, Enterobacter aerogenes
atggtaggtaactcattcttcaaaggtgttgatgaaaaaataggcagacaaaaacaagagcagattgaagaaaaagaaacgttagcccaggaacgagaacgcttatcggaaattattgaatctctcgtaccagaagttgaaacgtacaaaaatggtttacttgaaagaggaatccacgctgaaatttctacatctgcacggcatataagcttcaatatgaagtataaagacggcgggaagcatgaacttttattatcagaaactgagcgatttgatggccgctattcgataacgacattttctacaaacgataatggtcgtacttttagttctacaaacggtgcatcttatagttcaactacttggtcgaatgatgatttctttaaagctttagaacggcatatcaattatttcttgttctatgcgaatcgtcatggtggtctttaa

SEQ ID NO: 103902 - DNA, 939 bp, Enterobacter aerogenes
gtgcaggtaaacaaacttacggatgatattgatattagttctcatgagcgtttcctcgcggcccgtaaaagcacatgggttagtgtgcttgttaattgttttctgacatccgggcaagtgattactggcgtattttccggatctcaggggcttattgcggatggtatccattctctgtctgatttagtttcagactttgtggtgcttattgctaatcataaaagtaaaaaaaatcccgatgatgaccatcactacgggcatcatcgttatgaaaatggtgcatcattaattctggggacaattttattcattgttggcatcgggatgttatggtcagcagcaaataaaatgcaacaaccagatgatattcctcaggtacatattgttgctctgtgggtggccttagccgcactggttatcaaagagcttctttttcgctatatgctggcagtagcaacccgagtaaaatccactatgctggttgccaatgcctggcatgcccgctctgatgccgcctcatctttggtggtggctattggtattattggtagtttatcagggtttaaattgcttgatccggtagctgcactggttgtgggactgattgtgaccagaatgggatattcatttatgtcagattcgcttcatgacttgatggacagggccgtggatattgaaactgaaaatagtataaaaacaacattattgtccacgcctggggtcgaaggcatccatgacctcaagaccagaaaaatgggggaccttgttgtggttgatgttcatctggaaattgatggtgatttatcagtgaaagtaggacatgacattgctgttttggccaggaaatcagttttagataatcatcatgttttaaatgttatgacacatgttgacccttattttaaaggtgataatagtcctggttgcgggggcaaataa

SEQ ID NO: 103903 - DNA, 375 bp, Enterobacter aerogenes
atgagaaaaattatgcgtactgttgtgataggagccacccttcttttatccccctgtgtaatggctggttctgacggtgttgaacatgccatgaagatgatgaataaaagctaccgcgcagcacttaaggaggaggacgttacatccttcaggaaagatatgcgggaactgaaagcaacagcagagtccatcctgaacagccctgtagaagggtatgacagggaaacgtatgttgcaggcatgtcacttctaattgatgaggtaactgccgttgaaagtaccgctgagaaggaaggtcttgacgccgggaaaattgcagcacagaaactaggcagtctgatgagaaaataccacaataaactaggtgttgactga

SEQ ID NO: 103904 - DNA, 582 bp, Enterobacter aerogenes
atgaacgaaaatttacgtaatgctcttcctcacaaaaacacaccatttctacgtgtgctgcatatcatcgtagctgtattgattttattgcagattattaattcaaaccttaccgaaagcgatgcgcttagtgactatactctcactgggttcgtaacatggttccatgttatcactgggttatcactgattgtccttgggtttgtcatgcttgcatggatgctgacacaacgaggatttcgttactattttgcctgggtggtccttgattttcgaggtgtggttgaagatatcaaaatgctgatatcattccgtcttcctgaagctcatgctggtgggattgctgctctggttcaggggcttggtgtacttgcactattgggcgttgcattatgtggtggattctggtttgctctcaatactgctcttggcacgtcacctgtgctgacagaaaccgtcctgcatgtgcataagtttctgactgtatttattgaaacctatttctgggcacatggtgcgatggggttgctgcatatcttcctcaccgttcgtagccaaaggaaaaatcccgttaccgaatag

SEQ ID NO: 103905 - DNA, 690 bp, Enterobacter aerogenes
atgcatcttgaacgacatagtatcgaaaaagtgggatggctgagggcagctgtactgggggcaaatgacggaattgtttcgacagcgagccttgttcttggggttgcatctgcaaatagcagtccttccggtgttttacttgcaggtgttgcaggactggttgccggagctatgtcaatggctacaggggaatatgtttccgtctcatctcaggcggataccgaaaacgcagcacttgcccaggaaaaaagggagctggaaactgattatcagggagaggtgcgggaactgacttcactttatatgcaacgtggactggagccagagcttgcccggcaggttgcggagcaacttatggtcaaagatgccctggatgctcatgcccgtgaagaactggggttgacggatataaattctgcacagcccctacaggcagctgtcttttctgccctgagtttttccgctggtgcggtgttacccttaatcgtggcatggctctcccctctgaaactggcttttttgttgataatcctttccacccttttttcactggcggtccttggctatatatcttcggttttgagtaaagcctctcctgtcagggcgatcataagaattacgttctggagtaccatggctatgcttttgtctatggggattggtcattttgcagggcaggccctgctttaa

SEQ ID NO: 103906 - DNA, 597 bp, Enterobacter aerogenes
atgaaatcaccctatgaacgttatattaaaatagcagtcataaccgtcgcaatagcctacggcatcaatctcctttacgggctgacgccccccccatatcagcctaaaacccccgaagtgaaggccaaggtaaatgctgataccgtaactcagcaacaacctgagcaaccatccaaaccatcgataatcgatatacttccgcgaatgtatacaacaggggaagtttatgcgcggtttgaacaacatgaattcagggcaacaaatgacttcaaaaaatgtcagttaatggtaacaggaaaaataactggtatcggtactgttactttcagaaaaaatcctgtagtaacattgggtattcccggttcagatgaaggcctgaagttcatatttgaagatacgaattacaataacgataaagttgctgcattgaatattggggatctgattataatcgccgggaagaatgcacgacctggaacctttggtggtatctttcttgatgactcgaagataatgactgatatgatttcaaagaagaaacgacaaattttggttgtcaatggtggcgtttacgaccgggaaatttgccagaagtag

SEQ ID NO: 103907 - DNA, 369 bp, Enterobacter aerogenes
atggaaaataatgcactgactttggttttaaaaaacgattgggtagcatcgtcttctggtaatacctataccggaaaatacacagttggacggtttcacctgacagatgcgttcatcgttgtgtatatgaagctgatacatggaattgaaatacccgatttatgggtcagtagcagtttcactaacataccagataccgatacccgtagggttatgtatatggaaggctgtgatatgttatcgaaagatacaatgaacgaaatccgtaatgcagtgaagtccccgcctgacaagctgaaaatatatcgtaatggagagcgtattgttaagatagaagttatggaagaacgaaatgaaatcaccctatga

SEQ ID NO: 103908 - DNA, 654 bp, Enterobacter aerogenes
atgggtgtcgccagcagcgacaaaaacgcactgatgtttctcgggatggacagggatgtaaatctgaagggaatatgcttcgcgatgacaaagcaatcatcatcaatcgttccgctggtagatatcactgctacaactgataacggcagattcacgatgcacgggttacgccctaatgtcagtgattctaaagaagtcgcttgttccttcgggtccgaagctggtgatttcttgactgccatttcgaagtcaacaaccgttaacgtgaagctggacttcaatggcgagatccgcaattacagtttcgacactacagagttcggaaaggtattgactgcgaatgggcaagccgtgggggaaaaagcagctaaagactacgctcagggagtacgtgcacccgttttctatagcagcggtagcgaagctcccaaaaacaatgcagtaacctcaaacgtcgatacacacagttataaagcaagcgatgagaaacttaattcggtctggaaaagccttagccctgaaacccgaaaacgattgcttccttctcaaagagaatggataaagcacaaatccggctgcaataatgaacagaaatgtcttaccgacatgacgaacaatcgcattcgtgaactggagtctgaatatggaaaataa

SEQ ID NO: 103909 - DNA, 1770 bp, Enterobacter aerogenes
atgtctgcacatgttacaatcttaagaaatacagtacttccagtgaaattcaataccatgaatcgtccacgcttatattcatatatccgttactccagcgaacgacaaggtaaaggtagttcgattgagcgtcagaagagctacattgctgaaatggcaaaacagattgctactgagtacgatctggagattttcgaggaataccaagatttaggggtatccgcgtacaagggtaaaaacgttcaggaaggagctttatcggatttcatagaccaagttgaatccggtttgatcccaaaggggtctttcctcttgattgaatcccttgatcgcttctcacgccagaacgccatgcaagcggttaaccttttcaccagcttattacttaatggcatcacggtaattaccgggattgataaacaggtttacagacagactgaagtaaacaccgagacattgcagcaactgatgtttagcgtgatgttgttcagccgtgcaaacgaagaaagttcaaccaaatcacaccgcaccattgcaagtgctctgtccaagatcagacgtcaccaggaacggaaaccaggtgatcctgtagtcgcaattaaagagttaggctcggataaatggtggacagattcaagtactggatatgtcaatccgcatccagtcctgttccccatagcaaaaaaaattatccagttaaaacaagacggttggtcaaatcggatgatccttcaacatctgaaaaacaactacgatggaccggttattggcaacaaaaaatcaaaaggtatatggaatatgcagcattgttccagaatccttgaacctgccatttatggacgaaaagtaatcactgtaaacaatgcagaatacgttctggatgattattaccctgcgatcatcagcaaagatgaatatgaagcgttaaagctccaagttggaaacaaaggatttgccccgaatcgcgagagtaatccagaaataccattactttccggtattggtattttgcactgtgcgcactgctcatgttacatggttaaggctaaatcaacccttaaaaaccatccacatgcttaccgttaccaatgtgcatccagagatttacatcaagattgtaataagtggggattcagggcaagcacccttgaaaggacgattttacaactaatagccgatagaatattcttacagacgaaatatcaaccatctggtttagaagggaaaatagcggacatacaatcgcaaattgagaactatgtattggctataggttcagctaaaagccctgagatcattaatagcctcacttcgcaaattgatcaactagaacaagaaaaacaaagtctgatagtggaaaaaagactatacgatgaatcaatcgtgcaaatgaacactgaaggttgggacaagttcaggaagtttgacattgatgacgcacttaaccctttacgcacaaaaataagagcaaacattaagaccgttattatgcgcgtagattgctccagaatagataagaaacacaacttgtttaccatcacataccgcgatcagcataaacagcgtatcgttatcgaaaacaactcaggctggaagaagggtaagatttatgttgaagcgcagactatcaacgatattcaaattcttgaatctgaaggtttgatactgcatgaccatattgacatattgatcaaccgagacaagttcatgacggaagcgaaaaaacgactagatcatccccgaacactgatcgatgaactgacggaataa

SEQ ID NO: 103910 - DNA, 315 bp, Enterobacter aerogenes
atgataattaatgaaagtaatcattctataaatataaaaggtgaagatgctctgattgtattgggtgagattgattttattcttatttcattgcgtaatatcgcacgctactattttaatgattctgagggggagggtattgattcgcataaattactctcttattataaagaaacaacaaaattcattgataatgagaatgtcacctttagattggccgagataagaaaaataattacgatgcggttcaacctgtccattggtgacgataatatggatgatattgaacgggcaatgaataaaattaaatattag

SEQ ID NO: 103911 - DNA, 441 bp, Enterobacter aerogenes
atggatgatattttaattgatgtagtaaaaaaaacgctttctgatcacccatcattgataggcactcccgctacagaccagcaaatttctgatgcggagtccgctttaaacctcaaatttaactcgcaatacactcagtttataaaaatttttggtggttcatgggcgggaataagcattcatgcctttaataatgcccctttattaggcaaggagacggtcaccgggatgacgctaaattttcgacgttataacccgttctatcatgatgatgagtccctgctgaaaaactgctatgtactttcctcagacggcggggaaggatattatcttatgagtaccagtggtgagatatatatctactatcagaactctggtgaaattgaattgttgtatgaatcactggctcagttaattagaaatgagcttttgattaaataa

SEQ ID NO: 103912 - DNA, 480 bp, Enterobacter aerogenes
atggcgataaataaaagaaggaaaaaacaagtttggacagttggagaccttttcaccattcctttggccgatgggagtttctgtattggccgggtcatcgaatttgaaccaaaagccttaaatagtgttatctgtgcattctacacacacagagtggataagattcctaatgaagaaccagtattgagtaatgatgagctaatttctgttttatttgtcacaagagatctattggactcaggtgcctggaaagtgttttcatcttcatctgaagatttttcattaagcaaatattttgatatatcttctctaagaaatgtgggttttgttggcgttaaaatcattggttctggattgataatcgagttactaaatgcatactatatgctttctctatggaatgattacgcgaatccagattatttggactccttattgctttcaccagataaaaaaccaaagaatgttttattaaaataa

SEQ ID NO: 103913 - DNA, 174 bp, Enterobacter aerogenes
atggccagatactattcacaacaccccagcctgcatttaaaaggcgacaggctgattgaggcggggtttggcacggggacgtttgtggcagtaaaagtcaccgagggctgtctggtgctgattgccgataacagcgaggagcagcaactgcgggaacaacttattcaggtgtag

SEQ ID NO: 103914 - DNA, 291 bp, Enterobacter aerogenes
atggaattggatatgaatatcttttcaaggatagaacaatatgatgttgactttgatgaaaaagagtctgcggatgaattgtttttgaaatttaatgagatatccgagcatcctggatatgtatttcttttttttaatgaaaaacatttatgtattacgccatattatcttttgcaaaaatattggaaccattattttttgccatctgatgaaacaagtgtagttattacggcaaaaaacgattacttccttttctcttatgaagaacgcttttttatcgtgactagatga

SEQ ID NO: 103915 - DNA, 345 bp, Enterobacter aerogenes
atgaaaaagattattttaggtttggcaatgatggctgtaattgctccggtaatggctgatcagacaatgattcttactggcaattgcacagatggacgccattattcaatcaattcaggtgataaggaccgtcttactttcaatggcaatatttatgattttaaagctatttcagtatcagacgataataagttggtttctgttgattatggctatcagatcgaagggcatcgtgcaacattatcaattgacgaacatggaaaagaaaagatcgtattttctgactatgccgccgatggtacgcgctatcgctgtgtaaccggaatgacggtgagaaataactaa

SEQ ID NO: 103916 - DNA, 204 bp, Enterobacter aerogenes
atgaaacgtcacattaaattaggaattgctggtgtgttctgttggctgctggcttacacaattgatcttgataatcactttggcctgtgggcgatctttgctctagctggtctgatcttgattattccaactgtttggatctatggctggcgtttgattggtgtggctgttcgtgtcgctcgttctgaagtggagaagcattaa

SEQ ID NO: 103917 - DNA, 168 bp, Enterobacter aerogenes
atgaataaaattattagcagtgttatcaccgggattgtatttgcaattgtagcaatgttgatttcatggatcggtaatgtggctgaattctttgatgctcgcaaagagaacgttaaacacgatgaaattttaatgagcatgaaattacaaaggcagtttaaagaatga

SEQ ID NO: 103918 - DNA, 486 bp, Enterobacter aerogenes
atgaacatcaatgatctgtgtaatattgaaattctcggaaacgttaaagccaatcaatatttgaaagagaatggtaaatcatatattcaggctaaaggtgaacaagcctacaaagatgtagcatgttctacagcggatcgccagaaagaggcaatgaaactgaagccatatattgatagtggtaaaactaacattgctaccatctgcaaggctgtaaaagcagcgggtggttctctgtcacctttacagatcaaagagtggatcaaaggtgaaactgaagctgtagaagttgctaaacagcctgatggtgattctgtgacaattagccgtgttgaatgggaatattatcaagtgatggctgaacttacagatccagataagaagcagaccatacgtgaattgacagcacagcgattgatagagaagcagacacaagcgtttatagatgctgtctctaaacaaatggacggaataacacttccataa

SEQ ID NO: 103919 - DNA, 210 bp, Enterobacter aerogenes
atgaccacgcactattcatatcaccccagcctgcatttaaaaggcgactggctgactgaggagggatttgacaccgggcgcggcgtcaccgtgaagatttcacagaggtacctgaccatcattgctgacaacaacgagatgcaggaactgcgcgagcagctttatcaggctaagcaggtggttaagggagtgaagaatgtgcttgcttag

SEQ ID NO: 103920 - DNA, 210 bp, Enterobacter aerogenes
atggccagatactattcacgcagtcccagcctgcatttaaaaggcgagtggttgaccgaggcgggatttgagaccggacggggcgtgaccgttaagatttcggacgggtgtattgtgctgatggcggataataacgaggtgcaggagttgcgtgagcagctttatcagttgcagcaagtagttaaagggatgaaagaagtgctggtttag

SEQ ID NO: 103921 - DNA, 228 bp, Enterobacter aerogenes
atgaccacgtactattcatatcaccccagcctgcatttaaaaggcgactggctgactgaggcgggatttgagaccgggcgcggcgtgacggtgaagattacggacgggtgcctgaccatcattgctgacaacaacgagatgctggaactgcgcgagcagctttatcaggctaaacaggtggttaagggaattaaggacgggatgtttagtgtgctgaacgagggttaa

SEQ ID NO: 103922 - DNA, 444 bp, Enterobacter aerogenes
atgaaccaagaattgcttgaaagagttagaaaagagataacatctgatcaagatatggtcctgtatggcgttcctgcttctgatgaagaaattattcgcgccgagagtattttaaatataaaatttaatgatcaatatattaagtttataaaattatttggtggagcttttgggggaatatctatacatgcattcaataatggctctttgataggaaatgctaccgtagttgatctgactaaaaaatttagagaaacctatagtggccttgataaggaaattttgagttcattttacgtcgtttcagatgatggttctggtaatcctattcttatgaatacagacggtgaaatatttatctttttacatgactcttgcgaaattgaatgtttatatggttctttagaagagttgcttatgaaatcattcccatccaagaactaa

SEQ ID NO: 103923 - DNA, 330 bp, Enterobacter aerogenes
atggctgaacgcgattctaacacagcgccggatctggctcattgtgagttttactcttacgttgactgccgttcgctctgtttacatggcgaatggatgacacgggccgggtttgttgacgggatgcccgtcaagatccgggtcatgagggattgcattattatcacaccacagcacactcgcgaactctttggctgtattgaaggaatgagcgttacccgcattaataagcagaaggtgaaagcgtggctgaagacatttccgggggcgctgaatgataccggggatattccggtgattaagcgcgacaggatcgaaggcggggtttaa

SEQ ID NO: 103924 - DNA, 240 bp, Enterobacter aerogenes
atgaaactgtggtttgtcgaaccccggccgaacgttttcgtctctggcgtcaaagattcggtcgcgcaaaccgtcgttgattacctgatgcagtacacgcccgcagaatcaggcctgatgctgtttcgcagtattcctcaaccgcctggctatgaaattcgctacaagggtgagatcaggaagccaattattgaggtcagtgggttacagcttattattgaaaccctaaaactgccgtaa

SEQ ID NO: 103925 - DNA, 876 bp, Enterobacter aerogenes
atggcccagggagagaggctgtttgttaaggtcacccgcgaactactgccacaggtgaaggataaatatccttttttataccttgagcgtgggcggctggagatcgatgacagcagtgttaaatgggttgatgccgattgcaacgtggtacctctgccggtggcgaccatcaacgcgctgctgcttggccccggaaccacggtgacgcatgaggcgatcaaaaccgcgaccgccgctaactgcgcggtgtgctgggtgggcgaggatagcctgctgttttatgccgccggttttttgcccactgcggatacccgcaatctcaaagcacagatggcgctggcctgcgatgagtcgtctgcgcacaaggttgccacggcgatgttcgctaaacgctttccggatgctgagctcgagggcaaaagtttaaatagcatgatgggcatggaggggagccgggttcgcgcattgtatcagcagaaagtgcaagagtatggcgtcggttggaaagggcgccagtttacgcctggaaagtttgaactgagcgatctcacaaaccaggtgctgacctccaccaacgcggccctgtacggcattttatgttcagtggtgcatgcgatggggtactcgccgcatatcggctttatccactcaggtagccctttaccgtttgtctatgatctggcggacctttacaaagagcggctctgtatcgatctggctttttcgctgtcgagggaaatggcggggcgatacgataaacataaagtttctgaggcattcagaaaacgagtgatagccctggatttgctcaacctgattgctgccgatatcaatgagctgatgggagggaaacgtgctcgtcgtactggcaaatga

SEQ ID NO: 103926 - DNA, 717 bp, Enterobacter aerogenes
atgagccaatctacacaatatatgctgctgtggcttgaagggccgctgcaggcctggggattcgattcaaagttcggcgtacgcgatacgctgaacttcccgacccgctcgggcattctggggctgatttgctgtgcacgaggcgccgcggggccagaagtcgagtggctggcggagatgaataacctgccgatggaggttcgcgcctacgcccgaactgacaaccagggccagccgcgggggcgcgagccggcgttgtgcgacttccagatggtcggcagcggttatgacgacagcgatccctggcaaagtctactaatacccaaaacaacagatggaaagaaagccgtcgggggcggaactaaaatgacgtaccgccactacctccaggatgcggttttcgccgtggtgatggcgcttggccgccagcaggccgagtcgttgccggaggctttacaaaaccccgtctgggatttgtatctggggcgtaaaagctgcgtgcccagcgagctgatctaccaggggatatatgacagcgccggggaggcctggcagcaggcgcagaagttagccgacagcaagcagcgcacgctaagctatacggttattgaaggcgaaggagagggtgatatcatcacgctaaacgatgtcccggtgcagttcggtaggcataagcgttatcgcgatcgccaggtgaccgtgctggagtaccgctaa

SEQ ID NO: 103927 - DNA, 1035 bp, Enterobacter aerogenes
atgactaccccgttcaaaaacacccgtatcgagtttcatattttgcagtctttcccggtgacctgccttaaccgcgatgatgtgggggcccccaagtccgccatcgttggcggcgtttcgcgcgccagagtgtcatcgcagtgctggaagcgccaggttcgtctggcgctgcctgattttggtattcgtctcggagtgcgtagtaaaaaaattgcctcaatgttggctaaagcctgtaccgcattgggggcgagcgaagaacaggccagcagctgcggtgaggcgatggccgcttttttctctgaggataccctgctgtttctcagcgaggctgaggccgccgctttcgccgcttacgcgcaggaaaaagattttgacgccgcgagtctgaaagacaaagaactggtcaaggttgccaaaaaagcagttaacaaaacgctggatgccctggatattgcgcttttcggccgtatggtggctaaagcggcggatatgaacgttgaggcggcggcctcgttcgcgcatgcgatttcaacgcataaagtgagcaatgaagtcgagttctttaccgccgtggatgattacaaaacggacgatgaaagcggttcggcacatatgggcagcctggagtttaattcggcgacctattatcgctatgtgagcctggatctggggcagctggaacagacgttgggtgagggcgccgatctgaaaaccgccgtcgcggcgtttgtgaaggcgctgtacgtcgccgtacccgctgcccgacaaacaacgcagtccggggcctgcccgtgggattatgcccgcgtgttgttgcgtaaaggccaggggctgcaggcttctttcgaacagcctgttaagagccagggcgaaggcttcttatcacccagtaaagcggccctgaaagagtggctgaataaaaaagaaaaactctccggctccctgtttggcaaacaagacgattacgagtggggtgaggatctcgactacagcattgaccgcctgatcgctgacatacagtcacatctgtaa

SEQ ID NO: 103928 - DNA, 663 bp, Enterobacter aerogenes
atgaggcggggaatccacatgactgaactttttgccagtgctttacatctcgatcgcgccgccgtgaaagcgctgaaaatcagcgacgcctattccttacatcgggtggtatacagcctgtttgctgacatgcgctcagaccagcagaagtgcagtcatatttcgagcggcatcgcctacgccgaccgcggcggcgattttcacggtcgcaaagtattgattgtctctgatagacccccggcagcaaaggttgatgggcggtacggcgaggtcatcagcaaatcgattccggctgcttttctctcacattcgcgttatcgctttgaggtacaggtgaatccggtgcgaaaagataaacaaacgggtaagcgcatggcgattaagggccggacggatatcgcgcagtggtttattcagcgcgccggccgctggggctttgacgttgaccttccgagcctgcagatagaggcgatggaagtgctgcagtttaaagataaagccggcaggcaggtgacgcttggcaaggcaacggtgcaggggctgcttaccgtaaccgaccgccagcagtttcagcatagttttcatcacggcattggcaaagggcgagcctttggctgcggcctgctgcagattgtgcccgttgttgatgcgcttttttcctga

SEQ ID NO: 103929 - DNA, 567 bp, Enterobacter aerogenes
atggatcagtttcccgcagacgttagcgccgaaagcgcgggtagcgaatcgcccgccaaacgatttgtcggttatgtgattgagcgtatcgggaaggacaatggttttgctgcccgcctgaaacgggcggacaacccggcgaccgagtatcagagttgggaaattctggcggggtttggcattgacctggaaaaagaatggcaacgcctgccgtactgcatcgttggcgcggctctggccagggcgaaacccgcctgtaacggtacaaccgctctgggggccgctattgcggggtgttatcccgagggcaaccagtctgaacaggccaaagcccgcctgcggcggttgctggcatgttcctcgacgggcgaagcgtgccgtattttgcgcccgctgctggcattaatggcaggccgcaatgtgacgccggatttcgccaggttactcaacgaattgcagtggttctccggcaataaccgcgaacggatccgcgcccgttgggcgcaacaattctatcgtcgtgccgaagaggccggcggcaatgaggcggggaatccacatgactga

SEQ ID NO: 103930 - DNA, 1524 bp, Enterobacter aerogenes
atggaaaaccgtttcaatttgattgatgaaccctggattgcggtcgtggatgtggggttggtcagtttaaccgatatttttagtcagccggaattgcgcgctttagggggtaacccggtacaaaaaatcgcgctcaccaaattgctcttagctatcgctcaggccgccgcgacgcctgcggatgataacgactggcaagggatgggctggcaggaaatggccaatcgttgcctgcagtacctcgctaaatggcacgaccgcttttatctgtatggcgaaaagccgttcttacagatgctggctattcaagcagctgaacacaagccattgggcgtattatcaccggaggtaagtaccggtaataccaccgttttgaccgaaagccagcaacagcagcaattaaccgatgcggacaaagcgttaacgattgttacacagatgggatttggccttgggggcaagaaaaccgataactccttggtattaacgccggactatcggggtaaacaaaacgaaaagggtaaaccgagtagtggtaaggccggtgtttctgtcgggcatatgggattgctgcattcatactggctgggggattccatcgtacagagcatctggctcaacctattcaccgccgaagatattgcgcagctggcgatgtaccccacgctgggggtcgcgccatgggagcaaatgccgacaggagaagatgatgacattgcgcgttcgttaaaagcgtcgctgctgggtcgcctgatcccgatgggtaaattctgtcttttagccaatgacggcattcactatagcgatggaataagccatgccggctatcttgaaggcaaaaccgaccccacggtttccgtcgatttttccgcaaagaaaccgaaggctttatgggttaaccccggtaaacgcccctggcgcgaattgacctcgttacttcagtttatcgcccaggataatagtaggggatttgaaacccgccagcttagccttcctttacggcggatcacccgtaatacggcacagtttgcggtatggtcgggtggattaagggtgagtagcaatgcgggtgagcaatacgcttcagggacggatgattatgtgcagtcagaaatatggttgtcatccgatctcatcaatagttcctttcttgaatatttaaaatatgaaatgacgcaacttgaggctgtgcaaaaacaactttggggggcggttgcgcgttatttccgccagctatcagatattgataaatcagcggcggggaaggctcagccctttgtggcaaagcaggctgaaaaagccacggcgctattctggcatctctgcgaacgtcaggctcaggcgttaattgatgcttgtcttaactccgggggagatcgttccacatgtcttccgctacgaaaaatttatgccagctatgccgaacaggtttttgaccgactctgccccgccgacagcgcccggcaaatagatgcctgggcacagtcccggccaaatttttgtcaatatcttaccgttaattaa

SEQ ID NO: 103931 - DNA, 2397 bp, Enterobacter aerogenes
atggctgccgcttgtcatgatattgggaaggtcagcccaacgtttgtcgcaaagatattttcagcctgcggcatcagttatcggcagtaccccgcgctggtcggggtaagccctgaactggaaagccaatggggtgggcatgctggcgtcagccaggcgagcgcagaagcattcggtgttccacgatatgtcgccgaaatactcgggcaacaccatggtttcaatccgcgtgttgatggccggcgcggcaacgcggatatttttggcggccctttgtggttcgatgaacgccaaaaattagtggctgagttaagacaaaatctgcaaaccgattggccaacgtttgattcgccagcccaggccagggtggttgccggtttaacctccgtcgctgactggataggttcgggcgaatattttgacaatccggaagaagattggcgacagaatataccaacagccttaacgcaggcgggttttatcaagccgatcattcgccagaatctctcttttactgaggtatttgatcctgtaaatcggactatgcagccgcgtacgccccagtcgctgtttattgaacaggttaccgcgcctggcgtttatattcttgaagcacaaatggggatgggcaagaccgaggccgcgttatatgcggcttatcagctgttggcgcagaacaaagccagcggaatttatttcgcgctccccacgcagttaacctcaaataaaatctacgatcgcttcaatgcttttctggcgcagattgtcgataccaaaacgcctgaacgcgctttattgctgcattccggcgcctggttactggataccgaattgggcgaagagggctgtcccggcgggtcatggtttaatcaccgtaaacgcggtctattggcgccgtttgccgtcggcaccatcgatcaggcgctgatggcagtgatgaatgtgaagcatggttttgtcagagcgtatgggcttgcaggcaaggtcgtgatccttgacgaagttcatacttacgatttgtataccggcaccattctcaatgcattggtcgaatttctgcgtcaaatcgactgtacggtgattattctcagcgccacgctgagccgggaacgccgcgacgccttgctgcagcaaacgtcaggcagtgaggcgtatccgctgatcaccgccgcgcccacctgcgcgggagagccgacgctggccgaggttgccgttcctgtttcagagcgcaccaccttcgcgctccattgctgcggtaaagatgacatcgcgctggaagaggcgctgcggcgcgcagaacgtgggcaacaggtgttgtggattgaaaataccgttgctgaagcgcaacaacggtatctggatatggcgagccgggcggttgacgctggctgtgaaatagggctattgcattcccgttttacgcctcagcaccgcaaccggcacgagcagcgctgggtcgcgctttatggccaggccggctggccgcaacgtcagcggtgcgggcgtattttagtcgggactcaggtcctggaacaatcccttgatattgacgctgatttcctcgtgagccgttttgcgcctaccgatatgctgctgcaacgtcttggtcggctgtggcgacatacggagactccccgccacgtcagcgcgacagcggaatgctggctattatccccgggtcttgactgcgcattaaccaaccccggttctgcattcggcatgagcgtgatggtctactcgccctatgtgttatgccgcagcctggatgtctggaaagggatccgctctatctcgttgccaggcgatattcgccccctgatcgaccagacctatagcgcgcgttctgaagaggggccatgggccacattgttgcatgaactgaagaatggcagccgctttcgcgcaggtgaacaggcgctgcagtcgctggcgaagctaacgttatcgaccggcgggaaaacgctgccggagcataaggctgagacccgctatagcgaccgtgacaccactgacctgttgctgctacgtggcctgcgttcacatgacagcgctacgtatttccgcctgcttgatgattctgaaatcattcttccgcatggccgacaccgtttaagccgggcccagtggcgacagctggcggtggcgcttaatcagcaactggtgcgcgtgaacccggcttattgcccgcccaaaatagccaggaatgagctggaaaaattacacctgcaggaggtgttctatcttggccgtcccgaagatgacgaggcgcttttgcgcgttgccattgtcagccccgcaggcgaactaaagacgctggatggccggccagcaggcgataaatacacccttgaatacagtgaatatcttggcttccgggccatttccagaaaggaataa

SEQ ID NO: 103932 - DNA, 282 bp, Enterobacter aerogenes
atggaagattacttagtttttggcttgggtcatgaaggtgatataaagaacgatgaggtgggtcttgataagataagcgttgtaacaaaggcggtaatgtgttccgcaaattccagtaaaccagtaccttaccagatgactgagttcaaagaatttaatgttgtcaggcagcaagcgtttgatggcgaatactacaacatcgcattcgatgttttaccttctcgcgatcgtgtcgatgccgcaatccgaaaatatcatcccaaaaaatcatctacagtttag

SEQ ID NO: 103933 - DNA, 183 bp, Enterobacter aerogenes
atgatctgtcctgattgtggctcaagcgctattggaaaagaggttactcgtagaggatggagtggcgactatgtttgccatcagtgtggatacaacaatgcgaaagatgtatttgtaagtgatggtaagtctaaggagaaagtgtccatatggaagttaaaaaagaaggtctacactccttga

SEQ ID NO: 103934 - DNA, 438 bp, Enterobacter aerogenes
atgaccaataaccagttaacagagcagcaaatcgatctgctaatcgaaaatggatacgacattgcacacacactggagaatctcgcagaaaacgaaatcaatagtgactgctttgaggtattcagttattcagaaaatgggcgagaaactgagtgggacgggaaaatcactgagtttgcacaacgcgccgcaaaagccattcgacaccttacagatgcgacaaccgccttgcaggcagaactacaggaacgtcgcaaggttggcgaacctgaattaaatctcgctaacctcgccaataaattctatgagcgctacccgctggcgacgtttaaaagcgacagcgaaagggctgaggcatttgggtatttcatggctggcgcagaggtccagtgctttggtgagtttattaaatatgacgatttgtgcggtgatgaataa

SEQ ID NO: 103935 - DNA, 129 bp, Enterobacter aerogenes
atgtctgacttggttatccccatactaattactttactgattatcgggctggttgggatcgtgctaaggctggataaagttttcttcaagcggaaggatgagcgggatgattttgaccaagataactag

SEQ ID NO: 103936 - DNA, 189 bp, Enterobacter aerogenes
atgaccaaactcattgctgtagacgactgctgcgcgctcaatctgacgcttgtactcctggcgttgccatactgcgtcctgagcaacgaatttaattggggtcgcatcttcgattcgctctggtgtgtggtgtttacccttggcctgaacctgagctcgactgagggttgggcgatgcatagtctctga

SEQ ID NO: 103937 - DNA, 843 bp, Enterobacter aerogenes
atgacatcagaatcactaattaagcacccagcgattcgttaccacggaggtaaattccgcctggcgagttggataattagtcattttcctgaacatcgctgctacgttgagccatacggtggaggtgcgtcggtactattaaaaaaagagccgtcagatgcagaggtatataacgatctcgacggcgatgtggttaacctgttccgtgtattgcgcaaccatgaaacggcgcagcaactcatcgacgcttgcgccctaaccccgtattcacgcgtagagtttaactgcgcctacgaaaacactgatgacccgatagaacaggcccgtcgcctgattgttcgcgcaaccatgggattcggtagtgctggtgcaacgaaggggaagacgggctttcgcctagataccaagcgtaacagcgccacagcgcagcgtatttgggcgcgacagccagataacctcgccgccgtggccagtcgctttgctggggtattgatagagaatcgcagcgccattcagtgcatgcgagaccatgacactgcgtctacattgcactttgttgaccccccttacgtacacgacacccgcgtcgagaccgctaaaaacagcgcctaccggttcgaaatgaccaatgaagagcacacggaacttcttaacgtactgaaggagctacgcggtgcggtgattgtatgcggctacaacagcgacctctataacaacgcccttgccggatggaagcgggtaacgcgtaccactgctgcaaatggcagtgccggttcggtgcagcgcacggaatgcctttggcttaacccagcagcacagcagaaacaggagcgtgcagcatga

SEQ ID NO: 103938 - DNA, 222 bp, Enterobacter aerogenes
atgacagtagaaatcatcgatcaggccaacgagctagcgcagcagcgaatcgacatggcaatcgctgcgcaccggataaatcacaacgccatatcagctgagtattgcgttgaatgtggcgagccgatacctgaagcacggcggcaagcttaccctggctgcaccatgtgcgttagttgccttgaagagtctgagttgagaatgaaacaagggcgcaagtga

SEQ ID NO: 103939 - DNA, 495 bp, Enterobacter aerogenes
atgttttccgtggcgcagggagcgcacagagggcggccagtcgccgccgccctctgtactcccgggctctggccgccaaaatcgccacttcgtggttccttcgacttatcccggaaggcttcgggtcgggccgaggcagcgtccgtgcaaaacacggccctcagcccgcatccatgcgggctgccccggcctgccgggaacgtctcagcgattttgaggccaccaacaccggcagtttcagtcagtgtggtgaataaattaacggcaggccgcacggaccgtaggccggataaggcgcagccgccatccggcgcaaaagcggcgccttatccgcggatattgcccggcggcgctgcgcttgcgcgggcctacagatccagtgcaatgggtgggcccagtgccataggtagcccggataaggcgcgcagcgccgctatccggggtttacactcccatcttgcacgcttcgcgggcgacgttatccatctcgtctaa

SEQ ID NO: 103940 - DNA, 537 bp, Enterobacter aerogenes
atggcgcagggagcgcacaaagggcggccagtcgccgccgccctctgtactcccgggctccggccgccaaaatcgccacttcgtggtgccttcgacttatcccggcaggctgcgggtcgggccgaggcagcgtccgtgcaaatcacggccctcagcccgcatccatgcgggctgccccggcctgccgggaacgtctcagcgattttgaggccaccaacaccggcagtttcagccagcgcggtgaataaattaaaggcaggccgcacaaaccgtaggtcgggtaaggcgttagccgctacccgacaaaaaaaaagaggttcgaaatctgtcggctggatgaaaggatcaataaccgccgcgggcctgcgaaaccgccagccccagctgccagacagccatcgcgtagtgggtgctgtggttatatcgggtgatagtgtagaagttcggcagaccataccagtactggtacccggtgccgatatccagccgcagcaggctggcctgctgatggttgcccagcggctgcgttggggttaa

SEQ ID NO: 103941 - DNA, 150 bp, Enterobacter aerogenes
atgccctgtctgttagtaagtttctggtttaatttactgctaaaagcatctattgcaacgcaatatattgtcatgttgcaattgtcagttgctttattttttattctcgtggtgaatattcttgatgtcaatctaaatatggttcattaa

SEQ ID NO: 103942 - DNA, 570 bp, Enterobacter aerogenes
atgataaagcatattcgtattttgcccggcgggctggcggcgctggccgccgttttgctctgcctgctgacggcctgtcgcgatcacagtcgcgacggcatgagcggcgctgatataaacgtcttaaaccacggtccggatgccattgtctcgttgcaggtgaacggctacgggggacctggagctaatccctacggcggcggcggcggcttctgctgcgtcatggtgccagatatctggcgcccgggtctgacggcaaaaatcacctggacctccgatcctaattcatggatgaaatcgagtgatatgtcgaacgattatgaaactcactatcagcgtcatggaccgattaccgtccccattgagcgctgggagaagggacaggcctgtggttttgaagtgcatattttcccgtgcgacaaggtaagaattgttcgttcttgtcacgatcgctcatctccggaatatccgatacatcgtgcgtccgatgaggatgaaaaggcgaaaaaaatattattcgaccatgttaaggagaacatcgtatgtccgacgccgcagactccacgctga

SEQ ID NO: 103943 - DNA, 4305 bp, Enterobacter aerogenes
atgattgaaaggacatttagagacatccctgatggaaaagttagtgatgccgatcaacaaccttatttggtcagtctggggtgggcacgaggatatacatgggatgatttacttcattcgaaacgcgtactgataatttctgaagcgggagcggggaaaacctatgaatgccgtgaacagtcgaagcgtctttgggcggcgggagaacccgcattctttatcgaattgaccgcgctcgcgactgacgaacttcgcaacctgctggatgtcgatgaagaagcacggctggacgcttggatcgcctcacagtccgaggtagcgacatttttcttagattcaattgacgagctgaaattgacgttaggttcgttcgagcgcgcgctcaaacgattgagaaagtgcattggaaatcagcttcaccgagtgcgggtcgtcatcacaacacggccgataccctttgacgaaaaggtggtccgaagcgtactacctgtgccaccggtaccgtccaaagaatctggtgaagagatatttgcgaacatagcaatgcgtgagtctcgggagcaacaaggtaatagaaacaagaaacaatcaccggattggcaatcggtagctttgatgcctctatcggacgagcaaattgttaatttttgtcggaaccaaggcgttagcgatccagagtttatttttgaggatttaagacgtcgcaatgccttggagtttgcacgtagacctcaggatctcattgagttatgcgccgactggcgtgagtacaagcgcatccgaacgcatcgtgagcaggttgctacgaatgttcgcgtgaaactgcttccgagcgaggacagacttgagccagcggaattgtccctcgacaaagcgatcgaaggagctagtcgactagcccttgccattcagatgagtcgtcgcctaaccatccgtcataatgctgcatccgacgatattggcggagaggctgccctcgatcccgcgatcattctgtcagattggctaccgaacgaaagaaaagcattgctggagcgcccattatttggcttcgcttcatatggcagggtgcgctttcatcatcgttcagttgtagagtatcttgctgcgcataggctaatagctcttcgaagaaggggtatgccgtttcgagcccttaaacgccttatctttgcggagaccaaaggtaaaacaatcgttcgcccgtccaagcgacctatagcgggttggctggccttgcaagacgatgggatatttgagctcttgcgtgacaatgagcctgctgtgttgctggatgagggcgacccagagtcgctaactcaaacacagcgtaatcaagcccttcgcgcttatgctgagtgctacggcactggtgggtggaggggccttcaagtgcctcatattcaggtccatcgatttgcatcgaacgagttggcagaagaaattgtcaggatttggcatagtggaattgaaaatccagatgtgcgggaagtcctcatctgtcttatagaggcgggtcgcataggagcctgtgcagacatcatattcgacatcactcatgacattgaagctactgaaaccgagcgcataatggctattgaggcattagtagcccttgctgatgagagattagaaataatttctgcctgcatagctaatgctgaggatctgtggcctgaaggagtagtacgtggtgccatactacgccttttcccaaaatacatgtcggttgagcagctttgtcggactcttcgatggttaaaacaagagaagcggaatataggcaacctcaattggcaacttgcacgcctgatagcagcagcatctcttgctccccatgttcttgaggaacttcgtgatggcctcctcgcgttagtatcagaggggcttaaatggagaaatgaattcccacatattacgagtgataggccacatctcagcggaatactagcagcaacatgtgaacgcggcctcgatatagatcaaggcgaccagtggctgtatggtggtgtaatcgcattgagattacaccacatagaccattacgaccatgagccaattaagtctcttcgtaaacggctactcaatcttaaagcagtggaaaatgagcgtcttttctgggtcgaaaacgctttgctgcagtcgctccatgagatcaaagatccctggatgcggctcgcagaaataattattcatgatggaccggtgcagttaaaaccggaccgagatcttacttgggtgaatgaagctcttggtaacacgacccgagatgtgggtgaacgcgcaatgctattggaggcagcaatccgcctgtctccagatcgccatacatcgaaagaacactatgaggggcttaggcctctcatagtagatgaacattcattagtgcaaagacttgacgactggctgaagccatcggagcacgacaaagagcatcatcgttgggaaaagatgcaggctgaacgagagaagcaagaagagcggcgaaaggctaagaaccgcgcgagctggattctgttctggcgagaagttgccaatcagcctgaaaacgctttttcgaaggagcaaagctggaacactgcttggaacttgtggcgcgccatgagtcatgatggtgcagacagccgatcgtcaggctggaaccggcgattcattgaagagcaatttaatcaagaaaccgccgataagcttcgccgggtgctgatgaagatttggcgtgatgaccacccaactttacccagcgaaaggcccgcaggcgagcgtaatacgtttcttgtacgttggcaacttagtctggccgcaatttacgccgaagcggaggctcccgactgggcagctaaactcagcaatgccgaagcagagctagccgcgcggtacgctccgattgaactgaacggcctgcctcagtggatagacggtcttgtacatacacatccaaacgctgtggaccggacgcttggaaatgaattgtcatgggagctgaaccaaccgtcagatgagcgtggacaatcgagcctgcttcaagggattgattatgcgcctgagggggttgccagtttatttttaccacgactggtatcttggctagatgacggtggtgacttgattaatggcgccgataacacgatcggaatgaccgaaaggattcggcaagtcacacgagttatcttgaagcatggcgatgctgcggaaatcaagagacttcaagaacaggcgctacaaagattagaacaacaattgccgttttcgccgcgtcttgtttggttgtcgaccttaatgcgaatagatccgcagattggtgtcgaaaagctggcggatcagattgagaaagtagaaccatctgagcgatcagatgctgtgacatggctggccagcctctttggtgatcgccaagacggaattgggttgggtgacgaacgattcacgccgcaactattactgaggcttcttcgcttggcctatcgccacgttcgaatacaagacgatgctcaccacgaagaagcctattcaccagacactcgagacaacgcggaacaggcccgcaatagcattgtcacggcattacttaacgcgaaaggcgaggagggtttggctgccaagcttgagatggccgcagatcccttatgctcacatttcaagaatcgtattttggctgtggcagaagagagttgggcgcaagagattgatgctgaggtatttgatgaaactcaagcggtggcgcttgatcgaagcggggaagcgcctgcctcaacgaatgaagccatgtttacgattttgaaggacagactgtcggacctaaacgaccttcttctccgtgatgcttcaccgcgagaggcttggtcaggaatatcagacgagagggtcatgcgtcgagaaattgcgcgtgagctacgccatgccgcgaactcgatatacactgtggatcaggaagctgtgacagctgacgaaaaggaaactgatatacgtttgcgctctgttatttctaaacatgaagctgtgattgaactaaaacttggtgatgggcgtacagcaacagacttgcgagacaccatagaaaatcagcttgttaggaaatatatggcatcagaatacaataaagctggagctttgctgctaactcttgcaaaagaccgtgaatggaaacatccagatggaaagcgaatgatcaaggcggatgagttgttgctgctgttgactgcggaggctgacagagtgcaacaggccttgggaggcggagcctatatatatgtacaccttcttgatttgcgtcctaggttacccattgagtctcaggtaaagccttga

SEQ ID NO: 103944 - DNA, 423 bp, Enterobacter aerogenes
atgcctgtagctatcaactgtttcttggagatggcaaaaagttcacttgagaataatggtgagcaatggactcgtaatgctattagcagagcatactatacgatgtatcattccgcgttattactcactgatggctttatacccacacatgatgaggatggtgaaaaactccttggtggggtgcatgctagacttgctgaatacctttgtggcgatgtcgcggcagagaaacatagcttggatataaaagcttccaaaaaggtggggctcaagcttaaaactgcacatcatcgcagggttactgcggactataaccttgataagaaagtaaatcgtatagatgcatgtagcactatcaaggatgctgaagatttgcaaactctaatcgctgatatgattaacactaagaaatcagctagctaa

SEQ ID NO: 103945 - DNA, 732 bp, Enterobacter aerogenes
atgccagtagcgcaacctaaaactagggaagtcgtcgctaagcttggtccgtccttagaagcgggtagactcttgcttcttgacctcgaaaaacagaaattgttaagagaagcacgagctttacctgtaaagtatcagtccttagcacttgaaggcctgattcttttgctggatgggagagtggaaagtggcattgctgcaatagagcaatctttaacgttatgcccgacagatcctgtgacgtggggaaactattcgagcgcactcagcaatattggtctttactctaaacacagagaggtgctgattcgcgctctcgattatggtttcccctgcatggctgatcatgctttacattttgcggccttctgggctgatggggacattcttgatatggctatctcgaagattgagaaattcgatcaagctgaaaaagagactaactttttgccgcttcaaaccgcgtcaatcttgaacagctttagtgagtcaatgaaggatgggttacaaaaggtggcagaagttctaatgtacattgttgagaatgaatctctggttgctaagaactcgagtcttcttactgacggagaaggttatgtttctttctctgtaggaattgagactgaagatgctgattatctttcatacctcaacgataaggtagtcgatgagatgattgatagaggtcttgaaagtgggtgtagtgtcgcatacttcgaggcggtaaactga

SEQ ID NO: 103946 - DNA, 897 bp, Enterobacter aerogenes
atgaaaattacaaagcaccttacactttcattgcttataggattaagcgtaggtagtgctactggttgtgtcgatggtcggttggttcttaattctgaacaagccaaaatggttcaagccaacgccgatagatataagcttcggcctggttggcatgcttttgagttgttggcaaaagatgactgccagacttggaaagatggtggtagttcgctgattaactggcaaggaaaggagtgctccacttcagcattgctcgattttataaatgccgatagtaagaaagtagcgattttttatgcatcttatttcgagtacggcactccaggtgtaagggcgattgacgttactgacagttcaaaagtgaactatttgtcgtttttccatgacctttcattaaaactgaaatcccctaaagaagtatccaaggtatacggaagctatgctgaagactataagagaatagggctaaaaaaagtttcagaagcagagttctcatcatatttggttgattttgcagctaaatctgaatctatacagaaagaattgtacagtgaatcatcacaaacaattgagacacctcaacataatgaaaagctgggcattgattaccgggctcagtgtggcgtgcttttgctggacctttcgaacactgacgggtgggccagagttaatggtgagaaggtaacatcacagaagattagacctcttgggtcaaatggtagtgattcattcaaaatggatatggggctgatgccagcgcgagacggtaacaattatggcttcgagtttgttaagcgtaacggaaaagctttcctgaacgtccaactgctgcagaacagcatggatgcggcgaagctgataggctctttcccatgtaagaaagtggctgagtaa

SEQ ID NO: 103947 - DNA, 582 bp, Enterobacter aerogenes
atgaccagtaaattaaccataacggatgaacgtattacctcagtaatcgagcgtctggagcatttctccagtaatctcaagtggacagatgtacgtggagctcaagacatgctgactgctgctgatggattacgtgagctacaggaacgccgcaaggctgacagtgagccggtagggagcatttctatagatcgattgttacagttgttgtatcagtttgatggggaaaacgaatgtgccgcctctatcggcgatcaagagtatgccattgagtgtggagacgtagccagcgctttgcgcgaactgctgtcttgtcgttccgctttaccagtagcagatgtggttgcgtggtctcatccgactgaggagcggatgtgtgacattcgctggcgtcgtcatgatgtcgagccgggtcaactctatctccacgcgcagcttgcggctgtagtgccggatgccgcgactgcgatacgtgcgtgcctatctgagttcccagaaagcgcacgcgatatcgttgaggaatgcgcagatattgcagaaaacgcctgccgcgctgccatgcttaacgggggtaaatcatga

SEQ ID NO: 103948 - DNA, 312 bp, Enterobacter aerogenes
atggcaaaccttcagcttgcagttaacggtgagtattttgacgcaatgaagcgaggcgagaaaacagaagagtatcgcctcttcaatgagtattggtgtaatcggcttgtctgtgaggccggggaagattttccacgtaaatttgaccgcctgattattacacgtggatacccgcgagcagacgaccacgaccgccgcattgatatcccgtatgacggatacgaaatcaaaaccattactcacaaacatttcggcgaccagcctgtgaaggtattcgccatcaaggtgaatattgagggagccaaccaatga

SEQ ID NO: 103949 - DNA, 321 bp, Enterobacter aerogenes
atgagcaagccactcagttttattgataatcattttcttagtgttcgtgtcgatgaaatttgctcctcagttcctacttttacgactaaacaggcggcactcaatgccggttcattgttcggctggcgctcagctgttcgcattgagagacgtttcgagaaggtttgggttgtcggtaagcaatgctttcagggcgaccgtgccgcaggccttaatttcgattcctggcggtttcctctgcttaagtgggtgcaagaaaacggcgtaactaaatgcccggttcttaccgtccgtaggtttaaacaggagcgtgcagcatga

SEQ ID NO: 103950 - DNA, 552 bp, Enterobacter aerogenes
atgacagatatcaatagactgattaccagcctcaagcgccgctcagctcatgcaaaagatttcggcgacgatgttacgtttgtaaagcttgaagacatcgacgcgctggttgcagttatcgagaagagcaaagaggcatcaggctgtccggctggcgtagacctgcaggactgggtgaagcaactggcggctgaatgcgccacgttgaaatcggctattgaattcgctgagccatggcttccaacatgcgatgacgaggtaatgcatcgtattgagatggcgaagcatactcccgccaccgatcgcatcttagccgggattaaggctgatgggcgcgttgaaggtgcgcactttgtggctaaccgtatgctggctgcctgggatgcgggttttatcgaagactcagccaaaaacgccgccgatatagcccgtatgattctcacctcaaccgagtttatggcagatgcgccagagggtgatttcgaccgttcttttgctgatgacatcttggcagatatcgccaagcagttgcgcgagggggccgacaaatga

SEQ ID NO: 103951 - DNA, 360 bp, Enterobacter aerogenes
atgtcagcatgtatggctgtagttcttaacggtaataccgaaattaaatatttcccgttccacaattgtgctagcgctgaagtagcaaccgatatggcagacgagtggcgttatgccgccatcgaggcgataggttgggatgaagcgcatcgcttccatcttcgcgccgtccgtccgaaagtcgtcttgcggctaccgtctggcgcagtagtggagtgtgacctcgacgacgtggacatcgatccgccagtctgcgctgacctggattatcatctttgcgcattcgggttcaatcgtggtcttgggcatggtggttactgggacctggatggcgctgaaattatcgaatacatcgcgtag

SEQ ID NO: 103952 - DNA, 1188 bp, Enterobacter aerogenes
atgggctacttgtctttggataaagaacctcggaccaggacgttctcattttcaggtcagggtggacattatttctgtatttgtattgtgaatattctactcactatcattactttaggtttttatttgccatgggcattaatgcgcgctcgccgttatatttatggcaatatgtcattggatggccacgcttttatttataaagctactggcggcagtattctattgagcctgtttattattttcgttatctataatattggcacgtttctgatcatgaattggtttattattcctgggctgattatattagcgctgctgttcctatccataccctttatgatggtcaaaaacgtgcaatatcaggcctcggtgacctcgctcaacggcgtgcgttttggttttcagtgttctatgctcagcgcctggtggtatacctttgcgcttccgttgttacttattctattgcttagcacggtactttatttcctcggcatggtcagcgcctcgtggggcaacggaatgccgcgaacaatcatgcttattgtatgcggtgctgcaggtgttggcgctatttatgctatcagttatggcaaatgggttacgctgtttggtaatggtatccgttattctggatatcgttccgcggtgactgttcggctggggcagtgcatcaaaaatggtattttatcttatctgctatatacgccatttatcgttaccataatattacttatggatgatgtatttcgtcaggttatggtgagtagtctgataggcgatgaagagcagattgtcgcggcttatgcccaaaattatagccgtattgcactctgctatatattgtttatcgctgccacggtcatttcattttcttattttcgcgctatgctgcgtaaccagttcctcaataatctgacgttggccgatggcgcgattgctctacgttcttccgcgacggtgacgggtattgtactaagagagttagggctgttgctggtttctgcgatcacagcaggcctggtctacccctggcttaagatgcgctacgtgcgctggctggcagaacatactcatgtggatggcgatctggatgcgctggagctaaaagacgacccaaccccgccgcaaaacggcccggcgatgtggatttcgcgcggcatgatggcctatatcccattcctgtaa

SEQ ID NO: 103953 - DNA, 927 bp, Enterobacter aerogenes
atgactaaagttgttcgccaccaacgaattgaagggatacgccttgcagggatcgttaataatggcggctattattattctgacgttgaggtttacgaggatgggcgtatcgatgtttggggaatggaagatcttgcaacgataaaatcccgcctcaccatcccctccctacagctaatggcgcaaattcccgacggagaaacgctttctattcatgggctgggggattaccgagtaaaaaataccgtctgggggcatactcgtgaaagctactatcaattaatacttgagacagtgaaacggcttaatccagaaatggcaaacctttattactgcacagaacgggagcaggctctcttgcgggaaagacaagtaaaactgatagccaagagttcaccatttagggtcgttaatgagcgcttttatgaaacggaagtcggtcagtcatccaggttctttctgcgcagaaaagatgaaaattatctggtcaatgcggtggtctacaaaagcggtcaagtccagatctcctgcccattcttcggctttttaatcacgctgggggagtttaagcaacgcgtgaagtccggagaatttttcactgaattcactgaagagaccacgattcaattggcagaactgggcgtagttacctttgaggtcgatgaatatggatataccgaaacgatagcggataagctggaagaaatggaagttgagtatgaaaagctcaatggcaatgaccggttgcaaatctgtcgcaatgcttaccacgattacctggaatatcctaatgaacggctgcgcgagcggttgcataaagcatggctcgacgtaccagaaagtatgcgctgctatttaggagatatggattcgcgtgactctgattaccgacgtattctgtttactgataaaaagcgtgaagtctga

SEQ ID NO: 103954 - DNA, 183 bp, Enterobacter aerogenes
atgggggcgaacgggagcgtcagcgacagttcgctgacgctgagcccgctatgtgataaggagaaagagcagaaccgggtggcggtgacgcagggcaagctgaacgcgcaggcagcgcagagcgacccggcggcgcgggcgaagctggtagcgggagggaatgccagcccgagcatttggtaa

SEQ ID NO: 103955 - DNA, 294 bp, Enterobacter aerogenes
atgaacattgatttttcaagaaaaaaaggagagattgtattcaacgaactctcattaaaagataacacttctcttaatgaccaattggataatctcaaagaggacatgctccaggttgaatttcctgatgggtatattcttgatgttgggtggaaaccatcttttgatataaatggtaaattccatgtctatttgataaaggattttgattggggtgatcctgtttatttcggcatcgccaatgatatttcatctttattgagtgagattaataaggctattagaaaaacatga

SEQ ID NO: 103956 - DNA, 300 bp, Enterobacter aerogenes
atgaacacaccggaatttatttcaaatatacgagagcatgcgcgtgcggataacattctcggtttttcactgtatcactatgactacggcaaactcaccatcgtaggcagcagtgatttcagctattaccatactattgagatcattgtggaaaacccagatttcatccatggtgtgaccgaatggcactgcgatcttgacgaggtgtttattgatttatgcgtggtttccgaacctaaaatgcatcacttagtaaaaaactgcttttcctcaatggagaagacatctgtttttcagtaa

SEQ ID NO: 103957 - DNA, 1185 bp, Enterobacter aerogenes
atggcgatggacgaatttgattggtgtgcgcttgagtctgcagcggttaatcagatgatagaagcggtgcgaaccattcatgatgcacaccctcaagaacgcctgtacggtgcgctgttcaatggtttctatggtgatggtgaaattatctactggcctggcgtcgcggttggcagcgaagagagtctggcgcaagtcgcagatgcttaccgccgggatggctacggtcaatctgtggaggacctgcgttggtcgccagccgacttaccccattacgtggaaccggatgatgtataccaaggttgggctgaggcttgctgcgaatttgcttctcgagacggaacgatatccgcgtgggaaaaagtctacgaccgctaccttcacgtctttccgcaggcggccaaaaaggcgttcaggcaactgcgacaagagaatatagttgatgagagctttgttgctatagcttgcgatgaagcgggtgatctgatcccgctaagcctaacaaaagcgcaactttctcgtcattttccgcagtatgatgcggcggaaaaagagagacggtatctatcggctttgccgctggaagaacgcatagctgaactcattgcccaggtttgtggcatgactaagcccggtctgctgtatgacgaatacgagcaaatgctgagggatatcggggcggaagcgacccccgcattaatagctgtgttacaaacaacaagaggcagcggtgcatgttcagcctgtcgactactcgctgaaattaacgaaccaacatctgaagctattatcgttttaaccaacgtattgaatgatacggctgccgatgaggttgttcgtagttgggcggctgcggcgttagcgaggttaggtagaatgaatgtgctggtcaattatatatcgcagcttcctgcggatattattgtcagcggactagcggctccgtatctcgcgttccgcaatgatgggcagttttcacttctggactaccgtccgcttgaagaggctcttgggcgatatcctcatctagcagatgctgtcgcggcagaattggctccagggagaagcttttgcaaaattactccagatgaagccgctgccgctcgttcaggtttaacatcgccgtggccatttatccgccgtcatgcagaaattgtgcttgaaaggttagaagataagctgtaa

SEQ ID NO: 103958 - DNA, 1293 bp, Enterobacter aerogenes
atggcattaaccggttgccaggttatggcgaaaccgacgggatcggtgtgcaatatcgattgtacctactgtttttatctggaaaaagaagcgctgtatccggaacgaaacaaaaactggcggatgtcggatgaaacgctggagcgttatattcgccagcatattgaggcccagatgggagagacggtgaccttcgcctggcaggggggcgaaccaacgatgatggggttaccatttttccgccgggtggttgagttatgtcataaatatgcacacggtaagaaggttgaacacgcgctacaaaccaatggcattttgattgatgaagagtgggctcgtttttttgccgagcagcgttttctcgtcggcatttccattgatgggcccgcgcacctccataaccaatatcgcgttaatcgtgctggcaaaggcacgcacgataaagtcatggcggcgattaccttgctgaaagcgcatggggttgagttcaatacgttgaccgtagtgggtaaacataatgtgggacacccgcgtgaagtctatgatttcttgcttgccactggttcacgtcatattcagtttatccctctggttgagcgcgtcagtagcgacgaatcatcactcctgcagctggttatgccgggagaaagcgccgccaggcttgcttcctggaccgtgccatcatggcagtttggcgatttcctgagccagattttcgatatctggatccggcgcgatgtcgaaggcgttatcgtgcagatgtttgaggtagcgctggcggcctggatgggccaacccccggttttgtgcgtccattcggaaacctgcggccacgcttttgccctggagtcgaatggcgatctttacaactgcgaccactatgtttatcccgagcataagctgggtaacattcatcattcggatattaagacgctcaataacagcgagcaggcgatagcctttggtctggggaaaagggagacgctaacggcagaatgccgcagctgcgagtttcgctttgtttgccacggtggctgtcccaaacaccgttttgcggtttcgcctggcggtcaccccgggcacaactatctgtgtgccggttataaacactttttccagcatatcacgccgtatatgaatgtctgtcagcagctactggaagcaggatatccgctggcggcaataatgccatggcttgctgacgaagatcgtaagtcatcaaagacgatttcgcgaaacgagccatgcccgtgcggcagcggcaaaaaatataagaaatgttgtggtaaatag

SEQ ID NO: 103959 - DNA, 348 bp, Enterobacter aerogenes
atgacattgtctatccgaacgcgtgatcctggtctgcaaccggagcgtaccgcgctggcctggcaacggacaacattttctgtttttgtcctcgcattagccgcggcgcgtattggctttgctcgcggcgacctgatctccgggtggattgccagcgctgccgtggggttaaccgttgtgctggcgatggtttcgcgataccagcagcgccaggctagcgcaaataaagagttaacgacgttcgcttccgtcatggtaaagcgtttattgagtttaatactcggcttagtggctatgtcgttggtgctttccgcgatcttaagcctgttaagggaaggaatagtctag

SEQ ID NO: 103960 - DNA, 345 bp, Enterobacter aerogenes
atgagctggctgacacagggaaaggatcccgactatcgtttctccctcgcgaatgaacgaacgtttctggcatggattcgcaccgcgctggcctttatggccgcagcgataggtatcgatcaactagcggaaaacttagcgccctcaatggtaaaagagttgctggtgtgcgcgttgggcataacggcggcgatcctctccgggtatgcctatttacgctggtccggtaatgaacgcgccatgcgcgatgacgcggcgctgacctatccccgcttattactttggctaagtgcgggtttggcggcgatgatggttatggttttgggagtcttgctcctgttatga

SEQ ID NO: 103961 - DNA, 726 bp, Enterobacter aerogenes
atgaaagaagaactggactattcgcgcggcgccaaaccgctctatgcccagctgcacgacatattgctggaaaaactgaaaaccggggaatacaaaaagaacgatgtactaccgacagaggctgaatttgaagagatttttggcgtcagccgcataactgcccgtcgcgctctcgccgaattagcggcaaaagggttagtaaaacgacaggcggggatcggtacaatggtcatcagcacctcagagaaacaggaggtgaaggcccggatacgtctggttgatgggcaacagcagcatcccattgaacgtaacaaccttaagcttgaacagcttgtgccgccggagggggttgctcaggcttttgagctgcatgataacagcccgctgccgttgttaacccgtaccatctaccgacaaaacgagcagcccgcgcaggtgaactacatctggttaaccccgcgtctgcaaaatcttacgcttgatgcgttgaagggcggcctttacagcatgctggagggaaataacgaaaatattgatagttttcaggatgtcattaccgcggagatgccgacggaagatgactgccgaattctgcatattgactctcgtgagccgctactggtgaaaacccgcaagggctataacgatcgcggagaattggtggaattcagcatcgcgaaacatatcgcgcattgctatcaatatgttgttgagaatagccgatga

SEQ ID NO: 103962 - DNA, 1746 bp, Enterobacter aerogenes
atgaaagcaattatgttgatgtttgattcgcttaacaaacgtctgttgtcagcttatggaagcgatcgcgccatcacaccgaatttccagcgtttaaaagagcgtacggtacgctttgataatttttatgttggcagtatgccttgtatgcccgcgcgcagagaattacataccgggcgctacaactttctccatcggggatggtcgccgctggagccgtttgatgactcagtgcctgaaatactgaagaagaacgggattcatacccacctggtgaccgatcacaagcactactggcgtgatggtggggcaacctatcactcacgctacagtacctatgagtttattcgcgggcaggaaggagacgcatggaaaggcgttgttgataaacctgaatatcgctatgaatcaggtgagccggaggagattaaacagcgtcgtatcaccagccgggtacagcaccagattaacgtacagtttatgcaaaatgaggaagatcaccatctggcgcggacaatcaataaaggtctggagtttattgataccaaccatgccagtgataactggttcctgcagttagagtgttttgatcctcacgaaccctttttcgtaccggaaaaatatctgcggatgtacggtattgaggatccatcgcagtttgacggttggccaccttattatttcgtgacggaaagcccggagcggaaaagcgtcattcagaaatattatatggcgctactcacgatggtggatgcctacgtgggtaaagtgctggactatatggaccgatacgatctgtggcaggacacgatgctcatcgtcaatacggatcatggtttcctgctcggcgagcatgaatggtggggaaaaaacatcatgccgctgtataacgaagtggccaataccccctgttttatctggcatccacagtatggctgcgcgggcgagtcacggcaggcgctggcccagacgattgatattccggcgacgttacttgatagctttgggctgcccaaaccaaaagatatgcaaggcgtgtctttactaccggtgcttcgtgatgacacgccggtccgcaattacgcgctgtttggctatcatggctgccatatcaatataactgacggacgctatgtctatatgcgcgcgccggtacagcaaggggtgagtggtttgtatgaatacaccttgatgcctacccgtattaatcgacgctttacgccgagcgaatttcagggcatgacgctgcatccgccattcagttttaccaagggctgtcaggtgctgaagattccagccgaatcagtgatgacgcgcggggccgatcgatttggccatcgtctttacgacctgcacgacgatccgctgcagcaaacacaaagccgtgatagtgccgcagcagaacgtctctgcagcagcatgaaagcgatgatggcgcagagtgacgcgccatcggagctatatccacgctatggcctggaggatgctggaggaccgttgctagggttggatccgcatttattgcctgaactggccgcctttgcgccagttgtccgttacggtctctttgcgctattacaacatctggaagggagtggccaaacagaactgatggcgcagcttcagtccaccagccaaccaggctggacgacagaaaatttgtgggccttcgtccagaacgaggttccaaaggagcagcatcaaagcgtgtactataaaatggccttagaaatgcgacttgattga

SEQ ID NO: 103963 - DNA, 1416 bp, Enterobacter aerogenes
atgaactacaacatggtgggggatgccatcgttaaacactgtggcggactcgctaaccttatgcatgtcacgaactgtatgactcgggtgcgaatgaccatttccgatacttccctggtggatatgaccgcattaaaagcgattgagggggtattgggcgttgtcgaagacgacactttgcaggtgatagtcggcccggggaaatcgacaaaagtggctggcgttatcaatgagcgtttaaaaggccaaccgagtagcggggaggcgttaagcacagttgaacaaaaagcgcaaaaagcacgtgaaaaagccaaaaaacagacccggaccaaagtaatactcaaacacattgcgaatatttttgtcccgattctgcccgcgttgattgcggccggaattctgatggggctgaacaatgtgatattcaactcggcagcatcctgggccatgagccatcatatcgctgcagtaggcgatctctctccgacccaggtagtgctcgatcagcgccatcttctgggggtaagccaattccttgatatcgtctcgaaagcgctgtttggctttttggccatctatgccggggtaacttcggcgcgagagtttgaaggaaatttgatactgggcggcctgctcggagcaattaccattatgccgcaggtaacgacgctcggactgatagcaggccaaggggggcttatcggcgtgattttcgccgtctggctaatgtgcctgctggagaaacaggtgcgccgattcgtacctgatattatcgatgtggttgtcacgccaacgcttgttttgttgatcatggcggcagccctgcttttcgtcatcatgccggcggccggcgtcgtttctaatgggatattaagcggcctgaacgggttactggagcatggcggtatcgtcgccggcttcgtgctttcggctttgttccccttcctgatttcgttaggtttgcatcatggcctcttcccgatccatctcgagatgattaatgccactggtcatgctcccctgtttgctattcaaattatgtctaatgccgggatggtcggcgcggcgacggcggtactcttgatgacgcgcgatccggtgatgaagaaaattgccaggggggcgattccaacctctattctggcggttggcgaaccgactatttttggcgtcaatattcctgcaggctttgcgtttatcactggttctattggcgcaggtttcggcggcgtgatggtggtgctgcttggcgtgtccacaaacggggtcggcgcggcggggctgtcagcactcccgttgattgctgacgggaaatatcttcagtacatcctcgcatggctggttggttgcgcagcggcctttgcgttgacttatgtcgttggcaaagtccgcggttacgataaagaaatggtgtga

SEQ ID NO: 103964 - DNA, 339 bp, Enterobacter aerogenes
atgtatgaaacagggtgttcaccggggattattcttggagctttttccgggagcgtgattttcgttatttcggctacagagtacacattgtgggcaaaggtcgcgctttttttctgctcaatcaacgtaggaattttttccgcaaaatgtgtggctacagttataaacctggggctaatagcctatgccaacttacatataccgattcccgaagcattgggtgctgctatttcagcggcaggggccgtgcgttttttgatgtacctggccactttacctatgcaaaaaggagagttgctaaataaattgaaaagagggaataaaaatgacattgagtga

SEQ ID NO: 103965 - DNA, 852 bp, Enterobacter aerogenes
atgggcattcttttatctaaaaaaatgaaatattttatggtaacaatggagagaagaaacttcagtctggccgctgacgagctctgtataacgcgttcgccattgagcaaggttatcactgaaattgaaagctggcttggcgggaaattattcatcaggcgccacaacgatctggagccaacctctttagcgtgggacttttatcataaatgtaagcctctctattataaaaccctatctcttgagtctgagtggagcagtaaaaaaacacaaacccttctcacttttcattttgacatcagtataccggaactcctgtttcgtcaactagtgatgattgctcaggttgaaaaaattgatgctaagtttatccgggagagtatcgacgttaatgatgaacaacagctaaagtaccaaagtaattatattatgattgccacgcgaccgttgcgttgtaactatcacacagaatatagctcatgggaagggtgcccattagtggtacttaaaagcaaatatgtcccacaatccaatcaacaaaacatgtttatctggaaagataaacatgttgattatatgaaagagcattactcgcatatcttgagccaatctaaaatactaccatcttttattgaacatgatttcgacatccctacgttactctatgctgtacgttcagggaaaggctcattattaatgagccaaaaaatggctcaactgtacaaaatcgatggtatagagtatcaaacgctatccggatatcatccacgaatttatttctatacaaatatcgataagaccaggcaaaaatcactcataaaatttaaagatatcctgtcgatctttatctga

SEQ ID NO: 103966 - DNA, 1917 bp, Enterobacter aerogenes
atgactacaccgacccacattggatatcgcgacccaggtgatggttcatataacccagggctacaaacaaatattgcgccagtcagccgtgacaacgcattatataacgatttcattgctgatatcacagctactaataccctcggcagcggtagcgaaaaataccagcaggatttatttggccgctcaccgctcagcgctctgattggtttctggaataccagtagcgaagtgactgtcacggtcatgagccccgataaacctgaagcgccagaaattagtcatacctataccaatctggacgttgaccaggcgatcaccctgcccgtgctgggatttctggcgcgtgaagaggtcaatacgctcaaccaggttaccgtcactgataggaatggcaatagcttccagacgacggttgatattgctcaactgccctttaccgaccctgagggaaacgtgagtaacggcttccctaaagtggacgtcattaccacagcggagcaatctgtcgtaggtgacgatctttattttgtgatcctttccgaacgccgggcaaacattgcatgggaccgtcaggctaatgtccgttggtacgtcctggcaggaagcgaaactgacgatccggtgctctggctacccgtatttaataccacacgattgtccgatgggacgtttatcggatctgacgaccacctcagttattactataccccggcagatatgggagaaaatgagcccgtcgggcaacgtgaactttggcgattcgatgcaacaggccgcgtattcggtatttattttattcgcgaccgtgcgcatcactcgcttttagaactccctggagaaaacgcgctgctttatggttccgattatatcagccagcgtgaaagcgatgctggtccaaatccggatccagacggcccaaaccaaggtccgtcagctgaagactgtattgctattatagatttggccaccggctttgagaaagtctattatgacttccgtcaaattatgaatttctggcgaacacccgtaccgacagacctgtcagttcctgatatttacgattgggttcatatcaaccaaatttatcttgatagcgatagtaatatgttgatcgcctcctgccgacatcagtgcgcaattgtgggagtcgacagagaaacaggagcactgcagtttatttccggtaatcatgacgactggcaggcgacggaatccggcgagccgaccactgactggtcagcgctattattaacaccgattaatcctgaaacggacgaagcgtatgatcttagcgatccgctgcagaaagccgaggccgaccggacattctggacgtggggtcaacacaatgtacaggagatcattaaatcagagtctaacccggacatcattgaattctccatattcaataatggcaactaccgcacacgaaataccgccgttggggtagttgcctccgaaaatgcttcccgttgttcacgttatcaggtcgatttagtcaacagggaagtgagaaaactgtttgaatatggcgaaacggaagtgggcgccgacggctatagctcctacgtttcgacggccacattctttaatcaggataatgatgccagccagccgcggctactcgccaatttcggcggcagcattttccaggagaacgggagcggcgtcgataccggtttggctttgaccttaaaacctgatgaatccgaccgccaggatccattagaacaggttgatggtaactaccaggggcgcgctatcctgcaggaaatcgacctgaataccaactcgcccgtctttgagatccgtttaacgtcagggtcatacaaaacgaccgcagcaggcgatacgctgcgccgcgcggaactctacgccttcagggcctataaaatgccgctctatccggcataa

SEQ ID NO: 103967 - DNA, 297 bp, Enterobacter aerogenes
atggaacatttactcagacattgtgaacaggttgccgttggcccctatagccgcgatgcccgtgcgctggcgcatgaagtgatcgataccatttcggcgggcgttccgccggagcaactgattctcccctggatgtcggttaaagaggggctgcccgacgccaatagcgggcgctacgtgtgcgcttatacacccgcgaaatctcaggaccgccgctatcagctggtctccgctgccatgttccgcaccgtttgtcgggacgccacccactggttttatatgtgggaagcgctgtga

SEQ ID NO: 103968 - DNA, 180 bp, Enterobacter aerogenes
atgtttcattttttgttttggaagcgcaaaaattttttgcgtaaccagcaaaagggctggaaaccatcgaaccatcattacttaatccagaaaaaaagccactcagtggagtggcttaatcatatgattttgttagttatatttcctttctggtccacacggcgcggcctgttttattaa

SEQ ID NO: 103969 - DNA, 459 bp, Enterobacter aerogenes
atggaaagtaaagagtttaatctgaacgacaaaaaattcttgttagtaaaattacaagcatggaatcggctgatgtttgtcgccgatttacaaaaagatgttctgacgccactgctggataacttgggcgaaaaatcacttgatggcattttttcagctgtatccgagaaaggcaataaaccagatgtaatgaagctattaaaatcactgtcaagtgtgattgatagtcgtaatttagaaaaatgggtaaagagagtacttgcagaagggatggtagtttatatcaaagaagacgaacaaaaagtcaaactgtctttccatgagctcacaaaattattctccgcacctcaggatatcatcatgctgatgaaggaagcgatattatttaatcttgacggtattttagacatcattaagggcatgggaggaaataaaactgatataccgcaaataagctaa

SEQ ID NO: 103970 - DNA, 3276 bp, Enterobacter aerogenes
atgaatggaacaattgattttttctcgctatcaggcgaaaagatcgccagtgcggttggaatgaccgaggctgcccctgtcgaaagtggagcgatccgtttacctgtttcagcgagagatgtcacgggtgtacaaaaggacaaaaacacccttaatatcttattgaaagataatcaaaaaattgtcattaaagactttttcggcgacaagaaaaagaagctggtttttgatgatggtaaggagatttttgaagctgattatctcgacaaagaacaattcaatggtctgcaatttaaaccattacagagtattgatgaggtatttgaaggggctgaaccagccgaagatgataatagcgattacgtatgggttgtgcctgtaattgcggcagcagctataggcggtatcgcgattgccgcaataaatgataatgatggcggcagtaagagctcgaataaggccaaagataagcttgaggaagccaaggacgacgctcacaaggcgatcgacgacatggatcacctgagcgacgagcagaaggacgcggcgcaccaggcggttgatgacgccaccgacgtgccgggcacggagcaggcgctggccgacgccgaagcgaagaacctcgaggaagccaaggacgatgcccaccaggcgatcgacgacatggatcacctgagcgacgagcagaaggacgaggcgcacaaggcggttgatgacgccaccgacgtgccgggcacggagcaggcgctggacgatgccgaggcgaagaacctcgaggaagccaaggacgacgcccacaaggcgatcgacgacatggatcacctgagcgacgagcagaaggacgcggcgcaccaggcggttgatgacgccaccgacgtgccgggcacggagcaggcgctggccgacgccgaagcgaagaacctcgaggaagccaaggacgatgcccaccaggcgatcgacgacatggatcacctgagcgacgagcagaaggacgaggcgcacaaggcggttgatgacgccaccgacgtgccgggcacggagcaggcgctggacgatgccgaggcgaagaacctcgaggaagccaaggacgacgcccacaaggcgatcgacgacatggatcacctgagcgacgagcagaaggacgcggcgcaccaggcggttgatgacgccaccgatgtgccgggcgtagaaaaagcgcaggccgatgctgccagcctcaatgctgaccaggaaccttcattcctggaaggacttatcagcagtatatggaatgcgattattgccattcctaaagggttgttagaagcacttaagtcgatcattccgaagttaagtgattaccactttttacttgaatccgctccagctgcgcttaccggtatcgcattggtcgtctgggaagcactggttgaagtgattcacgtgccattgagctttatttctaatatggttcagtggattactggttttaccacgggtatcctcggagggatttggggaccattaggaaccattccgcatatatttaatggtatattgattctcctggacggtctggggaacggtcttaaagctatcatcgaaagcatcggtgttggcattattactattccggcaatcattacaggggcaattgcctgggtgatcacccttgttaaagggattggtgctttactaagcggtgattcctcggcgatggatgatttcatctctgacctttcgcaaaccgcattgcaaaacccacttatcccattagcgctgggcgatttattcgtcgcatttatggctattcctaagctggccgttgaggttatagccgttatcgctgagtggatacttgggatcattactggcgttatgcagtggatcccgggacttatacctattgccggtgtgctctctgattttacacttgcaatcgacggtgtagctattgccattcattatggtttagacaatgtcatcaatctgatcaccaaattgggtatggcgttgatcatggggatccctatcgctatcagcacagggacatccgcgataactattattgaagcctttataaaaggtgtgctgggtattagctcggatgataacaactccgacaatccaattaataaattcattgactcaataatcgactttatttcatcgccgattagcggtatcgaaaagattatatcctcagttttcagcagtattgaaaacttcatcaaggatccgctcggtacgattggggaaatattccagaaagttattgatgtaattctggctccatgtaaatttattatcgatgctgttggttccattattgatttcattgccagtccgctggaaggtataggtaatataataagcaatgtaatggattgcattggcaaattcttaagcgatccgtttggtgcgattggcgatctgttccagaatgtcattgatattattctcgcgccgtgtaaattctttattgatgctattggttcgatctttaacttcgttacaaacccgattgagtcgatatcaaaagtgatcggtgatccaatgacactgatgctcaaacttatctctgacccggtaggaacaatgaccgagttgtttaacaaggttattgatacaatatttggtccatttaagggaataattgactttattggaaaggtgatttacgaagttactcacccgctggaaacgctttcaaatatcattaatgatattatagcgaaaatatttggccactcatctaacgaaaatactgtcgctagttcgcttcactccatgactgaagctgtggaaaaagtggttgaaacagcggttgagactgtaaaacctgcggctgagaaaatagatgacattctcacgagcgcagagaagactgttgatcatatcctcgatgagtcggttggagaaggcagcgagaagaatttgtctgctgatgatttagccgaaattacaaatacgcttgatgagatatcaacgtatgcggataccaatgttatttcacttaacgaaatggcggaggggcagccttcacaggaatcggttacgccagaatcaaatgaagaacttaccgatcagcaactcgcttctattatggaggaaaataatgcaagcgagattgatttgaacgctctggttggtaaagaaagcaatcctgatgtggcagaaaataatacacctgacgaactcaacagcgtcgaagatactggaggttataatatacaggagcaaattatcactcagctacagcaatatgaagaaaactatcagcttactgcagcttaa

SEQ ID NO: 103971 - DNA, 372 bp, Enterobacter aerogenes
atgaagcaattaactgtatttgagatggaggcgatctctggaggttactcgtgggatttctcttcaatttcttctactgtaacctctttacttggtaatgcggttgaagccgtaggctgtgctaccttgggcgccattattgtaggtgctattggtgcctctgttggaggaaccttgggcggaacaaatggtggtcttttaggttttggattgcttggtaacttggttggcttatttgccgcggctgcagtcggtgcagttgctggggctgtcggcgccatagcactaggctgggataagagcattgaatatttaggtcaactgatcgatgccgggcttgacggtacctttgtaccctggccatcatcataa

SEQ ID NO: 103972 - DNA, 723 bp, Enterobacter aerogenes
atgatgcaacaatcacaaaccctattcgaatcgtcggttttatcggcaacaagttttcgtaccgtctaccatgaacacggacgttacaaaacaattaatggcaactcctttgttcatgatggtcatgcataccggattaacacaagaatcggctctggtgttcgtcatgacatacttatttcaacaatcaacgaactgaacgcaatcctgaagctctacagtcgagtgttccttacccgttttgatctccacctccctgagttcacttctgttgaagcaggtaacaaatacatacgcaacttgttcaaacgattacgtgaccgcctagggtctgggaataacggtttatcggaacctattatcgattttgcttacggttgggtttgcgaacaggaaaaggcatcacaaccccattaccattgctggattgcacttccacatcgttcggtaagatggtttggaacgccagaaagagggatcgctggtattattacggaaatctggatgaaactgacaggtggtaaagcaacgctggtaaacttggctaaagccactaaagactatcccgatcactacgtcattcatcgtgaacatccttcatcactcgaaggtccggtattctggctttcttacctggcaaaagaacgcggtaaagcgcaaacagggaagggaacgcgcatgtactcaacatcaaaattgagtagcaaagtactgaattcgtaa

SEQ ID NO: 103973 - DNA, 564 bp, Enterobacter aerogenes
  misc_feature (473)..(482): n is a, c, g, or t
atgcaaacagcagagatgtttcgtattttcctggacaatttgaaaatacctaatgaacgaatgacggcaattgcaacacattataaaaatgccacaaggaggcttaacataaggtttcgggaaactgaaaacggtttcaataatcgactgaaggttggttcagcaggtcgtcgtacggcggtcagcaaaacgtcagatttagatatgctgtacattatgccttcagggttgtgggaggcttatcaagtaggtttgaatcctcaacgacgtttacttcgtgatgtaaaagatgctttaaaacaaaccttttcgcagcaagaagtcaaggttgatcgattagtagtgcagattgtttttgactctttccatatagaggtgcaaccagtctttgctgacggagatcattttaaataccctgatacgaaagctgacaatggtaatggtgggtggcgggtaactaaacctcgtatggnnnnnnnnnnaggaatttccgaaataacaaaagtcgtaatctccataatctttgtcgcatgttgcgagcttggaaaaacagaaatacagtag

SEQ ID NO: 103974 - DNA, 789 bp, Enterobacter aerogenes
atgggaggacttcttattgacacgttagcatggaggttccttaaacaaaccgatgattatgatgaaactggaatggttagttatggtttcatgtgccgtgacttttttgattttttgcaaaaagaagacgttcatgaacactatgctgcaataggcagtggacaaagggttaaggtctacaaaaatttccagcgacaatcaaaacgtgccttcaaactatgcacgcaagcgattgacgcgtacgagaatggctatacaaagaaatgtcatgaactttggcgggaagttttcggacttacttttcctaaagcagcaacggaaatgcaagactctctggggctggggtcagataatttcgttaatgaatcatattttgcccgcacatggcgtaatacggaagaatttacggatgaaaaatttgatgatgtcgatattagatatccacttgaagtaaactgtattgtcaaagaaagtgggtatagggaacgctcgattagagcttacctttcggatatagctcgaccttggttacctcctaataagactttatcattctcgatcaatcaagcaagtttagatctgattcctgaaccttatgacatatactggaaagtattgaatagaggtaaagaggctgaagaacgtgatgaaattcgaggtcaaataattttaggtcaaactacccatactgaacatacaaagttcagaggtagtcataaggtgtggtgttatatcgttaagaatcatatagtaattgcccaggctactatcgacattccaattgagtga

SEQ ID NO: 103975 - DNA, 264 bp, Enterobacter aerogenes; identical to SEQ ID NO: 98937

SEQ ID NO: 103976 - DNA, 1347 bp, Enterobacter aerogenes
atggggagtaagtggaaacaaacaaccttaggtgatctggcgctgggctttgatggtgcagtagatggaccttttggttcaaacttaccagcttcggcttatacagaaagtgggtatccaattattcgaggaagtaacttatccatcggactagatgatttcaaagatagtgactttgtatttgtaccggagcacatattcaaaaaactttcacgtagcgagtgcagggctggcgacattatattcacaaaaaaagggacgttagggcaaacggggattattagcactacgcatcgttttgaaaaatatttgctatcatcaaatcaaatgcgtcttcgcgttgatcctgacaaggcattacctgaatatgtttactattatgtctcctcacaacaagcaattaacaaactcattcaagattcagagtgtaccggtgtccctaaaataaatcttgcttacttgaaaagcttccctatttcgttacctagtttaatagaacagaaagatataattaatattttagggagctttaatagaaaaataacactcaatcgacaaatcaaccgaaccctggaacaaatgtcccaaaccctgttcaaatcctggtttgtggattttgacccggtgattgataacgcgctggatgcgggaaactcaatcccggaagcgctacaatctcgcgctgaactacgtcaaaaagtacgcaatagtgcagatttcaaaccactgccggcggatattcgtacattgttccctgctgaatttgaagaaacagagttgggttgggtgccgaaaggttgggtaacaaatcgactggaaaacattttagagttggcttacggaaaagcacttaaaaagacagaaagaaccaacggtgattatcccgtttatggttccggcggcgtggatggaacccataatgagtatcttgttaaaggaccagggattattgttgggaggaaaggtactgttggttcattacattgggaaaacaaaaatttttaccccatcgatacggtatttttcgtaaaacccaaagaatactactcccttgtttactgctatcaactgttgaaaacactgggattagagaatatgaatactgatgcagcagtcccagggttgaacagaaacaatgcttatcgtcttgaagtcgttacaccaacacaatccatcattaccaaatttacaaatataatccagacaatccagcataaaatggattcaaatcataatgaaacagagaatctaaccgccctccgcgacaccctgctccccaaacttatctccggcgagctctccctggaggatctaccagatttagtaacccaaaccgaacccgcataa

SEQ ID NO: 103977 - DNA, 213 bp, Enterobacter aerogenes
atgtttataatgttgcaagtgagaccccgtagcctgtttagctttatttttgttgtgatcggtttcacgatagtggatttaacattaaatttgcttaagtatgtgaaattaagcctggagtgcggctcccatcttgctgaattaatttttttaaacgctttcattatccaggatcaatggagagatatttgtcaggtaagctcagtgtgttaa

SEQ ID NO: 103978 - DNA, 294 bp, Enterobacter aerogenes; identical to SEQ ID NO: 102300

SEQ ID NO: 103979 - DNA, 168 bp, Enterobacter aerogenes
atggacaacattacgctcgaaaaaaagcacgtggccgggggcaaattcggcttcgtcacgaggatcttccatccagagcgtccccatgaatccctgaataacctgacgccggaggatcacctgctgatggctgaaaaaccggaactctcaaaaagtgcgtggaactaa

SEQ ID NO: 103980 - DNA, 456 bp, Enterobacter aerogenes
atggtgaaatacctcaaggagaacttcttcgtccggtaccgccggttcgacagcttcgcccaggttaatcagctactggagcagtggatggctgacgttgccgacaggcgggaacttcgccagttcaggcagacaccggaacagcgcttcacgcaggaacaggagcatctgcagccgttgccggatacggacttcgataccagctacttcgatatccgtcatgtctcctgggatggctatatcgaggttggcggaaaccgttacagcgtgccggaaagcctgtgtggccagccggtatcaatacggatctcgctggatgatgaactgcggatctacagtaatgagcagcagatggcatcgcaccgtctctgttcggctgcatccggctggcagaccgtgccggagcatcacgccccgctctggcagcaggtcagtcaggtggaacccgaaatctga

SEQ ID NO: 103981 - DNA, 2604 bp, Enterobacter aerogenes
atgcaattaggcttcacacttaaattttctaacgacagctggtacccaaccgtcgacattagcggctttaaatctttaacaggcgaaagcgttaatattcagcaaaaaatggtgctgtcattcagcgcgcctggaaaaataacttcaggtgacattacggtttccaccaatccctggtgcgctttaaatacagctctggaatccagcgaagtatcaagcggcatttttgatattacgctgaccatcaccgccgctgacggctcagcgattggcaacgcgatttcggccattcatattggcgccaacgccagctctgactccgcgccggcgtggtcaacgatgcaggacagcttcgctatcgccgccgatgaagagaccgatgtctccggcgaattagccattaactgtgcggcctttcccgacgggctggaaaatgccgtactcgaactaaccttagcgcgcggcgaaaagcgtgaaattctctatcctggcgccggtaccaccacgcatcgactggcggctggtagctacagcgtaagcgccggccagctgcgtacggcagatggcaccgtgcgcgcaacggtcctgctcagcgacgccgaactcactatcagtaaaggccagcgcaccccgctgactatcacctttgcccaggctgaacgcagcaccaccctggagatcgcggtagatttacccgccactcatgcgctccacgatgaagatctggcgctggtgtacctggagaatggagtcgaaaagcaacgtagttctctgcggtccggtcaaaagcagcgtctggagcagttgcccatcgcaggccaatacaccgtgcgaatcgaggacatcaggctcaacaacgtccactacgtcttcgcggcgatgaatggcaatcttgataatcagctccatgctctgacattcactggcgcacagattagccaccacgatgatctggaggctacttcagcgacgctaacgttggcgataaccgccgaagaatcggtagccgcaactttcaatgtacgccttatcgatgatagcgatatcccgcgccagtattgtttcgctaacctgccgttacaaactgccagccatgccgccgcggcgaaaattgcccagggcgcttatcggattcaatcaggtaccttgatccatgatggcgtgatttattacattgatgccgcatcgccaacgctccacatcgacaacaattcgccgttgacgctgtcgctcgtcgtgacaaaaggggctaacctgcgggtcaaaggcttcccggatttcctcagcttcggtggctgcgccgatatgtcgccgagcaacgtcgaagatttggctgaagcgcgggtatcgtcgctgtttaaatactccggcgatgacggcatgggcgatgcttccgcttacctggatccagctaaagagccgaccagtaaaattatccagatggcgcgcgacgtcgaagcgatatccggtgatagcgtgttgccggtaatggtttcttatacctgtaacttatcgctgggcgatgtggaaaacattatcgacgaccctgaacgccatcagtttagttttgctaacttcattcaggcgctgcaaatggcccaggcgatgaaagatgaccagcatccggttcccgcgggctttatcgtcaacccggattacctgggggaatgccagaaatacggcttctcagcggattatcagattccggtacgagaaccgctggccaaagcgatggcgcatcatagcatcaacgtcgccatccccgatgctattaccgatacgttgaaaggttatatcaaaggcgttaactggctggtacgcgtagcggcgccggatgtggtcctgggctggcagattaacctgtggagcgtcggcggttcacagtgggtctacaacgatttcacctatgacaatgtgttcgatcctgttgatggccaaaagaaaaaaatgaccatcgacccggcgctggcgggcaaactctctgcgcaatatgcgctgctggtaggcgtgtttgatgaaattgcctatacccatgcggacggcacagcggcggtcgctaaaggtgctgattttatggccgctgaccgctatgaagcggatgactttacggcccgcgcctataaaaacggctactgttactcgccgtatgaatgggatcgaaccttcgatttctgcgcttcattaagccgacatctgcgccagccggtgctgccgtggcaggttcctgccagccgcctggcaagcgtcagcgaaaacgtggttgagctggaagaagagttctggggtaccggagggagttatctgatgggccacgcggaaatcggcagcgccgttgaagcaattaacccgaatctgctagacattgaattccttgatgttcacgccagcatgatgggtcacaatccgcgcgaactctttagtcgtcatcaatgggattttaacgagcctaaatacgttgatttccctgcccggggtattttccacgttcaggtgggcggcggtgcgacaacaggcgtggtgagtgccgtcaaccgcaacagtagccgctggatgcgcgcgaagttgaaagcgtaccgggataatccgctcaggttcgaagattaa

SEQ ID NO: 103982 - DNA, 369 bp, Enterobacter aerogenes
atgctaaaaacctcacatcatacagaaacgctaccgccacaccctgatattcccttatctgcaccgtgttattctaagccagaagtcaccatttccaaaacacagcgccgctataaagtcggctacgtcagcgcccgccacgagaacagtaaaaccggcatgaccacgtactattcatatcaccccagcctgcatttaaaaggcgactggctgactgaggagggatttgacaccaggcgcggcatcaccgtgaagatttcaaagggatgcctgaccatcatcgctgacaataacaaagtgcaggaactgcacgagcagttttatcaggctaaacaggtggttaaagggattaaggatgtacttatttag

SEQ ID NO: 103983 - DNA, 378 bp, Enterobacter aerogenes
atgattttacatgattttagtggccgctcaattgttagctctcaaactgaattatgtactttattacataatcgacctgcatttaattcaaataattttattttaacttttaatgatgaaagtggcttcccactattgaatatccttgttaaaaatcatgactgtgtaatttattttttaggtgataaaggtaatagttacgtatctttttgtgaaggaggcggtgaagatattattgaattttatgaggacgaaagcggagagttgcttgaggtacttcagatgaatgtaatttctgataaaaaaataatggaatctgcattgcaattttttcaaacaaaagaaaagccggactgtatagaatggatggatttataa

SEQ ID NO: 103984 - DNA, 1320 bp, Enterobacter aerogenes
atgcccgttaatgaatcagaagagaggttgcttaacttcacaaagaaaacatttctgtcaatgtggtctcacagtaatattttctataagaaaggaaaggaattttgcgatgtaatggtcgtctttggcaatgatgtaatcatcatgtcagataaacttattaattataatattgaaattgacgaaaaaatcgcatggaatagatggtataaaagtgctatcgaaagcagcataaaacagctaaatggtgcatataaccatataaactcatatcccgacaatctatatactgatgctcaagcaacagagccattctcaatggaattaccacattcggatgaaatatgcattcatttaattgctatcgcaaatggttgctctaacgcatgctatagaaaatacggtcgctatggattaaatattgatacagcatgtaccggaaaagacaccttatttactataggtatacccacaagaaaattcgtccatatattcaatgatagcagtctagataaaatatttacatgtttagatacaaccagagatttcattgattacattcaagctagggaaaacttacttacaacttcagataagcacattaaaatatatggcgaagaagagctattggcagcctggatgcttagccagccaggtaatgctccgttccatatgccatatgaactatttcgtacagcagatgacatttatcatatcggcccaggcctttgggaacaatataatagcgatgaaaatcaaagaataagacatgaaactcgacaaaactcctatactatagataatttgatagatcacattcataccgaatatgaaaaccaaagtttaatcattggtcaagatgaatcaattaattaccacgagagggctttcagattattagcctctgaatcaagacttggacgtcaacttatttcaatgccattaattgaagtcgcacaagaagatcctagattcttttgggctaacattgtcgaatccaatgattttccgggattgttatacttatggttaatttaccctgagataccagaagatgtatctgatgatattgttctaaatatattattttctcaactcagtaagtatttacttgttgcacaatccaagtttagagatatgaaaataatttttggtgcatgcttgccgaatatacaatcatcacgcagggatcgcctttttattgttaatgatgcgtcacactggaatgaagagatgcaaaagctagcaattgaatatgaaaaaaatgaaggtatacttgctaatataaccagcactaagaattttagcattagagcatag

SEQ ID NO: 103985 - DNA, 609 bp, Enterobacter aerogenes
atgcttaaacgtctggcttatctgatagcaggcagcgctctccttcttctggcggcggcggtgttctggtgcgtcaaccgcctgaacaccctgacactggcgcagcaacagacacaacgccaggtaacacagtggcgcgaccagtcgcagccagacagcgattatcacgagctgaaggttgccgtaaaaaacatcaccgatcgcacggaagcacttgccagacagcttagcgatgccgccagcactcagaccgaacgacttcaacccattaacgaacagatcaaggcgcaggagagacaaatccagaccctcagcgccagttatcaacacctgcaacaacagaccgccacgcgcagccgcgcaaaggcaaaacgtcccgtcccctctccgctttgggccgcaaaggcccctttttctcttatcagcagcgagttccgtaccgggcggcagttcgccgtcatcgcgccatccggctatcactcgctctcacagcttcagcttgtggcccccggtgacagcgtgcagggctggcaactgctgcaactggacggcagtcacgccactttccgtaaaggcgggcagcggctgacgctgaacgccggaggataa

SEQ ID NO: 103986 - DNA, 684 bp, Enterobacter aerogenes
atgcccgaacatgctccgccacaacccgtacgccgtcccggactgctcggctggctcgcattgttgcccggcgtgctggctggcttttgcctcggcgcatggatgctggcgatagcgctggagtggctgggcgatgcttttttctggcggaacacctgcgccagccacagtgaacaggtattacaggcgacatggcagtggtggcgagtttccgctggcgcaccagtgtggttagtagaagatctggcgattgtcagcgatacattgcaaaaagggagcgcggcgctgattgcctcgctcaacgggcagagcggcttattctggacagaggctgttaccgcggtaatccgctgcgcattgctgtcttcggaaaatatcaccatcatctttctgctgcggctggcgattctgttgcaggtgctaccgctgtttgtgctcaccattattattggccttgttgacgggctggtacgccgcgacttacgacgattcggcgcaggccatgagtccgggtttgtttatcatcatgccaggcgtatgattgtctccagcctggtggcaacggggctggtgtggctggcggtaccggtttttttcgtacctgtttatattttgatatcaggcgcgataattattggatcagtagtatgtataacgactggagcatttaagaaatatttatga

SEQ ID NO: 103987 - DNA, 963 bp, Enterobacter aerogenes
atgaataaaatttatttagactacaatatttttctagatattttagagcgagaaagcaatgatttcattctccctctgagaaataaaggtttcgtttttgtatactcaccagctcatatcgaagaaattgctcgagggcttgagtgtgggaaagtaagtagagagcagtcattatctaatttaaatggtataggggaactaactgaaaatatagaacttctaccttactacagtcccaaattcaatgtaattgaaagtccttatggaaataatggaattcaggttgtcaaagaagaaccgaattactgctatgaaagagtgtatggcagcataaaatcgaacagacatgcagaaaacgctcaaaaaacagttattatggaaggacaggggaaattctctcatctttccgagagtgagaggcaggattcacttgataatataaataaattggaccccatagttgacattcttaaaacgaatgagtgtattgataaattaattaacggttttattacactacaggcaaaatccgatacaatgatcgaattaattcagaatggcgtgataaaacatccattagactctacggacatcgagttaattgattcttatgcctccatgaaaataaccaactctaatggatattacaattctctcgcaactaatcttttgacgcccccgtctgaatgctttaacaaaatcaaaggtaatttcagctttatcgaaaatatgattgacatcgtaatgagagaattactaagacatggctacaagcttgaaaaaataaaaaaatcagaatcaagtcttcacgatcatacacatgcaatatatgcgaccgcatgcgattattttatatgcagagacaaacgactacttagtaagacaaaagctacctattcatatcttggagttaaaacaaaggtcctagatgctaacatcgaaggctggtggcagaatatataa

SEQ ID NO: 103988 - DNA, 321 bp, Enterobacter aerogenes
atgaaatctcaatatttattttctacggttatcctcatgctgtgccctgcgacggcaatttttgcagcccccttaaccgagcgcgaagagctaaccctgtccctaaaccaacttagccaaatcgaaacctcgctccaccgcgcccagcagagtgccagaaccggcatcaacgagcgctactacttcgactatccacgtatcctcgacgacatcaccactctgcgtagcgggattgaacattacctcacccctgcccgcgcccagccgcgagatacggcgacgctgcttgggcaataccgtgaggagaaaaccacgccatga

SEQ ID NO: 103989 - DNA, 354 bp, Enterobacter aerogenes
atgagcactatcccctttctcccggaacgactgaaccgcgagcctgcggtgtttcgcgggctgacggtcagcgagctgctgatagcgctgctggtcgggctggctaccggtgcaatcgccggaaccattccggctgtgctctggcgaaactggagccttatccccggcagcgccctgcccggcggtgcgctggcgatcctctgcggcggacgctggctggcgcggctgaagcgagggcgtccggagagctggctgtaccgggcgcttgagctgaaactggcccgtttcggcatcggcactcagcgttttgtcctgcacgatggcatctgggccattcgccggagccgacgatga

SEQ ID NO: 103990 - DNA, 627 bp, Enterobacter aerogenes
atgagcacctttaagcacgcgctggccgcgcgggatgcgcatatccgcactctgcacattgcgctggtcgcgttattcctgctggcatcaggcatgggattgggctggtacagcgccccgcgccagctcacggtatacctgccgccggatctccgcgcggccagtcagcgtacatggtgggaagttccgccctccacggtgtacgccttcgcgttttcggtgtttcagcagatcaaccgctggccgaccaacggcgaggccgattatccccgtaacctcagtgcgctacaggcttaccttacccccaactgctacagccagattgaccacgaatttcgccagctactgcaaaacggcgagctgcgtgaccgggtgcgcggcgtgtatgaaatccccggtcggggattcagcgataagcgggttcagatcctcgaccgtgacaactggattgtgacgctggacctgaccgtcgatgagtatttccactccgaacctgtcaagcgggcgatggtccgttaccccatcaaagtactgcgctacaacatcgatcagcagaaaaacccgtggaggctggcgctggactgcttctcatcaccaccgcagaagctggaggcggccaaaccatga

SEQ ID NO: 103991 - DNA, 789 bp, Enterobacter aerogenes
atgaatacccgcccgctgctgatcctgctggttaccctgcccctgcacgccgtcgagctggtgaaatgggaacgcatcccgctgccggtggcgctgaacaccgggcaggagcggatcgtctttgtcgatcgcaatgttcgggtgggctaccccaccgcgctggaaggcaaactgcgcatccagagcagcaacggtacgctgtatttactcgccagccagccgtttgctgccacccggctacagcttcaggacacagagaacggtgagctgattttgctggacgtctccgccagcaagggtgaacacatccgggaaccgatgcgcattgtccatgaagagaagaaaacgcctgatgcgaagcccgatgcagttccagaacccttaccctccacgccgcttccggtcgcgctcacccgctatgccgcacagatgttgtatgctccgctacgcaccgtggagcctttgtcgggcgtgcagcccgaaggcgtgcggctggcaaaaaccatcaccactctgctgcccgcgttacccgtcaacgccataccaatcggcggctggcgactcgatccttatcacctggcagcgatccggcttcagaataaaagcgccacccggctggaactcgatccacgccagcttcaggggcagttttacgccgcctcatttcagcatcgctggctggggcctgctggcagtgctgaagacactaccatgctctatctcatcacccgcaatcagcgccctgaacaggtgatcctgccggagtctgcgccggagaagaagaaatga

SEQ ID NO: 103992 - DNA, 1338 bp, Enterobacter aerogenes
atgaagctccaagccaatatcctgctgcgggttctgacgccgctcatcctgctggcgggcagcgtcctgctgtttcatgcctgtcaggaccgtaaaaccacaccgtcaaaatcctctgcgcctgcaacgcccctcagccacgatgagctgaaagcgctggggattgagggcgacacgcccgccgataccgtcgccacgctggtcggccagatgaagctctggcgcaaggaactggaaacggtgaaagccagcaacgccgcactggtgcaggaaaaccagcgcctgcgtgaacgcgagcagaataccgacagccgcatcaacgaggccattaaccgccagcaaaccaacgcctcagagcagcaaaacgaattactcagctcgttacagacgcagatccaacaacttaagggaaacaggacaacggtcgactcgctggccgggctgggaattgatgaaccggaagcagcctccggagaaccactacgctggatagcccccgcagatgccctgccaaccgataaaaatggtcgtccactgcaacctgcgctggcctttccttccgtgacgcagaacaccgcgccgcaatctgaaacaccaccgccagccgccatcaaaacggtctatactctgccgcagaacagcacgttaatcggctcggtggcgatgaccgcactgctgggacgcattccgctgaacggcagcgtcaccgatccttacccattcaaggtgctgattggccgcgataacctcactgccaacggtatcgaattacccgatatcgaaggcgcggtgatctccggcagcgctaccggcgactggacgctttcctgcgtgcgcggcagcttaacgtcaatcacctttgtctttcgcgacggcacggtgcgcacgctccccgccgaaggcgataaaaccggaagcggcgcggagggcaatatcggctggctgtccgaccctcacggtctgccctgcatcccaggcgagcgcaaatccaacgctgccgaatatatcggctcgcagttcctgctggccggatcgtccgccgccgcacaggcgctgacgaacaaccagaccacctccaccgtggaagatggctccatcaccaccgcgctgacaggcgacagcgggcagtacgtgctcggccaggcgttgggcggcggcctgaaagagagcgctgactggtttaaacaacgctacgaccagatgttcgacgccatctacgtaccacccggccaggccgttgccatccatatcactcgccagctcgccatcgactacgatcccaacggacggcgggtgaactaccgcacgacgggcgaacacactggagacctggactga

SEQ ID NO: 103993 - DNA, 390 bp, Enterobacter aerogenes
atgcgtatgctgattttgctgttatcgctgctgctgaccgcctgtagcaccgaccagaaaacgctgctgccggtggatgaaaacaccaccatgctgaacatctggggccgacagaataacgatacacaggcgctgtacgacgcgcgatcggtgctgcgccgcccgctggatgacgccacactgaccgcgcagcagcagcaggccacactaagcgacggcaatgccgctcaggcgctgttccggcggctaccgaatccggatctggagatgtatatcttccctcatctggcaggcagcgaaggcgtcccggtgccgggctacaccaccgtcttccccttctataaccgggtgcagtacgccctccccggcgagcggaccgatccgctgtga

SEQ ID NO: 103994 - DNA, 441 bp, Enterobacter aerogenes
atgcaagaatacaagaaaagctgtgacgacgagctagactgggtaatagttaatcaacttcatgaagcaaccttgcaaataagcaagagttgttttgaattcaaaaaaatatgcgtaggactaattggggttagtttaactttactggtcaagcttactgatagcaaacttgactactcttattttattataccgcttctaatatgtattggtttctggatagcagattcttcggcatattactttcaacgaaaaactcggatagcaatgaatagaaaattaatttccattgctaatagaaactcaattgataaatatcaagctgaacaattaactgtcaccaaacttagcgcagtatttaatcattcaatgagcctttactacatattatctattatcggttgtggtggatggttagcttattactgctcaggaaattaa

SEQ ID NO: 103995 - DNA, 345 bp, Enterobacter aerogenes
atgcgtatttttgtaagttacacaactaaagacagctatatagatcgtgagttgttaaacgatttatataaaattatctcacgttgtggtgattgctatattgacttattacacaacaatgcaaataataaacaacatcatgttgaaaacatgttatcccaggctgacttacttgttttaatcgaatcaagttcaatagtcaaatcgagttgggtacagtgggaattagcggaggccaaaaagaataatataccaattattgtgatcaaagctatgcctgaaaaaagtataactttagccaacttaaaaaatacattacttcatgaacaactcaccccatactaa

SEQ ID NO: 103996 - DNA, 321 bp, Enterobacter aerogenes
atgaagcagatgaccttcgccgacgccgagtacgctggcaagcgcaagcaaacccgcaaggagttgttcctgatcgagatggatcgggtggtgccgtggaagggcttgattgctttgatcgagccacattatccgaagggtgaaggtggccgtccggcctacccgttgatggcgatgctgcgtgtgcatctgctgcagaactggttcggctacagcgatccagcgatggaggaagcgctgtacgaaaccacgatcctgcgccagtttgccgggctgaacctggagcgcatccccgacgaaaccaccatttgttggcgctga

SEQ ID NO: 103997 - DNA, 828 bp, Enterobacter aerogenes
atgatgccccatccaatacaggacgccgtgctgcgggtcgaccggttgagcgtcgtctatccaggcggcgtgacagccctacgcgatacctcgattgcatttcggcgtggtgagttcaccgtgctgcttggtctctcgggcgcaggcaagtcgaccttgctccgtagtctcaatcgactcgtcacgcccactggcggcagtgtcaccagcgaactcggtgagctcggcagcggctcggccttgcgtcagcatcgtcggcgtaccgccatgatctttcagcaccaccagctaatcgaacgtcaaagcgcactggctaatgtgcttaccggtcggctggcctttcacaacacgctccgctcgctgtttcctctgccgcgtgccgatcaggagattgcgctcagttgcctcgctcgggtcggtctggcagacaaggcgctaagccgggtggacaaactgtccggtggccagcagcagcgggtaggcatcgcgcgtgcgctagcgcaacagccggcgatcattctggccgatgagccggtagccagtctcgacccggccacttcggtccgtgttctcggattgctgcgcgacatctgcaaggaagacggcatcaccgccatcgtttcgctgcatcaactcgaatatgcccgccgcttcgccgatcgcgtcgtcgggctggccgattctcagatcgttttcgatgccgcgccctcggaactcaccgatgcgcagcttgagcgcatctatgcaggccgctctacgactcagccagcgaatactccggctgaaccacctgtcatgctcgaaccttcactggagatgtcccgatga

SEQ ID NO: 103998 - DNA, 864 bp, Enterobacter aerogenes
atgaaacgcttatccgcgctcttattgacttgcttgctgtccgctgtttcaagtttgtccgccctagcggccgatgccgatccggatgtgctaaaggttgccctgctgccggacgaaaacgcctccgagctgatcaagcgtaaccagccgctgaaggattatctggaagagcatctggacaagaaggtgcagctgatcgtaaccaccgactattcctcgatgattgaggcgatgcgctttggccgtatcgacctggcgtatttcggtccgctgtcctacgtcatggccaaaagcaaaagcgacatcgagcccttcgctgtcacggtcatcgacggcaagccgacctatcgctcggtgattatcgccaatgtggcgtcaggcgtgaatgagtatgccgaccttaagggcaagaagatggcctatggtgaccgggcatcgacgtccagccatttgattcccaaaaccgtgcttcttgagacggccggtttgacgggtgggcgggactacgaagaatattttgtgggcacgcatgacgccgttgccgtcaacgtggcgaacggcaacgccgatgcgggtgggctgtcggaggtaattttcaatcacgtagtcgaacgtggcctaatcgatccgagcaaggtgaaagtacttggttacagcggcgaatacccccagtacccctgggcgatgcgctcgaacctgagccccgagctgaaaaccaaggtgcgggatgtattcgtcggtatcgacgatcccgaagtgctgcgcaacttcaaggccgaggccttcgcgccaatcaccgacgccgactacgatgtgatccgcaaaatgggatcgctgctcggcctcgacttcgccacgatgtga

SEQ ID NO: 103999 - DNA, 828 bp, Enterobacter aerogenes
atgtctactcattacgacgtgcaggcgctgcctgcagagcaacgcgagcacatccttcgaggcttcggcctcggttggtggcgccagctggggcaggtggcgattgtattcggagtggtgctgttggcctgctggtacgtggggctgctcgatgccaccacgctgctgaacgggctgccctccatcgcgaccctggcaggcgaggccatgccgccagacttttcgggctatcgaagctggattcgccccttgatcgacaccttggcgatgagcatcgccggtacggccatcgcagtggtgttctcgctggtggtggccttcgttgcagcgcgcaatacggcgccgcacccccttgtgttcggtgttgcccgggtgctgctcaatgccctgcggtcggtgccggagctgatcatgggcatcatcttcgttgcagccgtagggttcggcgccttgccgggcgtgcttgccctgggtctgcattcggtcggcatggtcagcaagttcttcgccgaggccatcgagcacgtcgacgaagcgccggtggaagccgctcgggcggcgggggctacgccgatgcaagtgctgctgcacgcggttttgccacaggtgacgccgcagttcgccgacgtggcgatctaccgctgggaatacaactttcgcgcctccaccgtgatgggcatggttggcgccggcggtatcggcttcgaactcatgggctcgctgcgcatcatgcagtaccaggaggttgcagcaatcctgctggtcatcctggccatggtcacgctagtagacgccttcagtggcgtgctgcgcaaacgtttcaaatag

SEQ ID NO: 104000 - DNA, 1011 bp, Enterobacter aerogenes
atgctgccgaaactcgttataactcaccgagtacacgatgagatcctgcaactgctggcgccacattgcgagctggtgaccaaccagaccgacagcacgctgacgcgcgaggaaattctgcgccgctgtcgcgatgctcaggcgatgatggcgttcatgcccgatcgggtcgatgcagactttcttcaagcctgccctgagctgcgtgtagtcggctgcgcgctcaagggcttcgacaatttcgatgtggacgcctgtactgcccgcggggtctggctgaccttcgtgcctgatctgttgacggtcccgactgccgagctggcgatcggactggcggtggggctggggcggcatctgcgggcagcagatgcgttcgtccgctctggcgagttccagggctggcaaccacagttctacggcacggggctggataacgctacggtcggcatccttggcatgggcgccatcggactggccatggctgagcgcttgcagggatggggcgcgaccctgcagtaccacgaggcgaaggctctggatacacaaaccgagcaacggctcggcctgcgccaggtggcgtgcagcgaactcttcgccagctcggacttcatcctgctggcgcttcccttgaatgccgatacccagcatctggtcaacgccgagctgcttgccctcgtacggccgggcgctctgcttgtaaacccctgtcgtggttcggtagtggatgaagccgccgtgctcgcggcgcttgagcgaggccagctcggcgggtatgcggcggatgtattcgaaatggaagactgggctcgcgcggaccggccgcggctgatcgatcctgcgctgctcgcgcatccgaatacgctgttcactccgcacatagggtcggcagtgcgcgcggtgcgcctggagattgaacgttgtgcagcgcagaacatcatccaggtattggcaggtgcgcgcccaatcaacgctgcgaaccgtctgcccaaggccgagcctgccgcatgttga

SEQ ID NO: 104001 - DNA, 870 bp, Enterobacter aerogenes
atgttgaatccggtctggctgaagagcctggtagcgatcgttcaaacaggcagttttcagagcgcggcgagggcgttggggctggcccagccgacggtgtcgcagcacttgcagaagcttgaagagcaggtcggcgtaacgctggtgcagcgcagtcgtagcggctgccagcctaccacacgggcgctggccttcatgccgcatgcgaccgccttgctcgacatgcacgcccgggcgctagaagccctgcatggcaatcgtgagcgcgtcggggccagcaccaacatcggcacctaccttctccagccattcgtgcgcaactatctgacgaccgcaaatgagaggggcgaggtggatctgcgcatcgccgccaacccggatgtggccgaccagctactggcgggccagctcgacgccgcgatcatggaatggtggctacctcaccccgacttcgaacaccgcctctggcgggtcgagccgctggtgcttatcgtcagccccgaccatgcgctggctgaagcagggtgcatagaacgtgatcgtctggtggacctgccgatgctgggaggtgaaccgggtagcggtaccggacggcttctgaccgaatactttggcgaactgggcgtgcctcgcagcggtatgcagctaggcagcaccgaggcagtcaaacaagcagtgagggcgggactcggcgtgtcgttggtgatggcttccgcagtacaagacgaagttcgcagtggcgcgctggtagctcttcccatcccggggcttgaaaagcgtctccaactgatctggcgcaaacctcccggaaatctgcacccgccgggatttgtgcggcacttattggaggaggcagatctagctggataa

SEQ ID NO: 104002 - DNA, 636 bp, Enterobacter aerogenes
atgaagcagatgaccttcgccgacgccgagtacgctggcaagcgcaagcaaacccgcaaggagttgttcctgatcgagatggatcgggtggtgccgtggaagggcttgattgctttgatcgagccacattatccgaagggtgaaggtggccgtccggcctacccgttgatggcgatgctgcgtgtgcatctgctgcagaactggttcggctacagcgatccagcgatggaggaagcgctgtacgaaaccacgatcctgcgccagtttgccgggctgaacctggagcgcatccccgacgaaaccaccattctcaacttccgccgcttgctggagaaacacgagctggcggccggcatcctcgctgtcatcaatggctctgggcgaccgcggcctgtcgctgcgccagggcaccatcgtcgatgcaacgctgatcaatgcgcccagttcgaccaagaacaaggacggcaagcgcgacccggaaatgcaccagaccaagaagggaaaccagtattatttcggcagtgcgacctgaaagtcgcatgggtttctgttccgcaggttaacgcccgacggaaccgactgttccaccactcgttccctacccagacaggcgtggccggtaacagccgggtctga

SEQ ID NO: 104003 - DNA, 750 bp, Enterobacter aerogenes
gtgttgttggaagcggcatcgatagaaggcgcccaagtatgggcggagcgatttcgtcaggacactgcggcgacagcggtggtgtgtggagaggtgtcgatcagctatagcgccagcatggggggggctctccttgacccccgtttgcactctgtcgagcaggtgatgctgcaggcggacagcgcgctctaccaggcaaaaaagacaagggtgcaaccaagttgtgggcgcacaagtatttcagaattgagaggagtggcgatgaaggaaaagcaagcagacccgatcaaaacatttcgcgcccaatgggcagtgatgacgttctacgagcgctttgaacaggtgatcgcgctcgcgctgtccgcaatcattgccgttatcatcgtggtctcgctgctgcagctgatctcgatcgtcttcagcctgctgatcattgatgcattcaatccgctcgatcacaaggtcttccagaccgtgttcggcatgatcatgacgctgctcattgccatggagttcaagcattccatcgtgagggtggccttgcggcgcgacagcatcatccaggtcaagacggtgatcctgatcgggctgatcgccctggcgcgtaaattcgtgatcctcgacccggagaccggccccgccaaggtcgcggcgcttgcaggcgcgacactggccctcggggcgacttactggctgctgcgcgagcgcgatgaccggacagccggggaaagctcagatgatcagtcgtga

SEQ ID NO: 104004 - DNA, 963 bp, Enterobacter aerogenes
atgatcagtcgtgatctgcgccacgcgcagaatgtcggcgcgcggcatcgctggcacaatcgcctgcaaaccgtgctgttggtgctgaccctgctcggaattgccgccgtcgctggcagcctgctgttgggtgacggcgggctttggctggcgcttgcggctgcggggttcaccctgctgcttgaaccggcggccgcctccgggctgaccttgcggctgtatggcgcacgccccctgcacccggatgaagcgcccgatctttgggctgtgttgcgcgaactggcggcgcgggccgggctgcctaccgtgccggtaccgcactacgtgcccagcggggtcgtcaacgccttcgccaccggttcgaagcatcacgcggccatcgcgctgaccgacggcctgctgcgtagcctcacgccccgcgagttgaccggcgtgctcggccacgaaatcgcgcatattgcgaacgaggatttgcgtgtcatgggcttggccgattccatcagccggctcacccatcttctggccttgttggggcagcttgcgatcgtgctcagtttgccaacgctattgcttggagtcacggaagtcaattggcccgcgttgcttctacttgcggtcgcgccacagctggccttgctggctcagttgggcttgtccagggtgcgcgaattcgacgccgaccggctcgctgccgaattgaccggcgacccgcacgggctggcctcagcgctcgccaagatcgagcgggtgagccgctcctggcgcgcctggctgctgcccggatggggcaatccggaaccctcctggttgcgcacgcatccagcgacggctgaacgcattgagcgcttgctagaactagctccgccgcccgcgatgccgccgtttccatcggcccgtttcgaccccgaagtgaccgtatcaccacgtccgccacgctggcgcactggcggcctttggcgctga

SEQ ID NO: 104005 - DNA, 306 bp, Enterobacter aerogenes
atgcgcaaacgaaagtcagcccctcaggataaaaatcaggatgctttactcggtgaaatccagcgtctcaggaagcaggttcatcagctgcagctcgaacgtgacatactgacaaaggcgaatgaactgataaaaaaagatctgggcgtcagctttctgaaactgaaaaacagggagaaaaccctgatagttgatgcccttaagaaaaagtaccccgttgctgagttgctaagcgttctgcaacttgcccgcagctgttatttttaccaaaacgtctgtacgataagtatgcggaaatacgcgtga

SEQ ID NO: 104006 - DNA, 132 bp, Enterobacter aerogenes
atgggtattaaacctggcccaaagccgattgctgaatcaactggcaaagaagataaaagaaggcgtgtcactccggaaaacaagccaaagcatcccggactgaaggaacacgaccataaaaaaggggaataa

SEQ ID NO: 104007 - DNA, 2091 bp, Enterobacter aerogenes
atgtctcaatacaatacgggtaaccctgtcccgtcttcagacatgcgtgatgcctgggataataacgccactcttgataatttcctgagtaataatgaattaaccgttacaacccgtacaggtattgaacgcgactcactggctggaattcaaaagaaagcagaagaccaacgggaacaaattgctgtagatggcgcggcagttgtagaagatacacgccagaatctgatccctctgagccgtcagtacatgacactggcagatgcacaggctgatatcgctaatattcctgatggcagtgcaacttatgtgagaagtggtagtgacagctcacttgctgatgaatacatgaataatggtggcgtgctttctgctactggtaaaagcatgccttcgaagtttctggccgatcttatcgaacgtcaggttctggatgttctgtatcgcgtgtctggaatatttcagggggtcgattttccttttgaagtgacatcagaagacggacagcaggctattgcagtagatcgttatgcgcgtcttttagcgaataacggggttaatattccacagggtggggtaacaatcggcggttttacggtaatcaatttaccggaagatagtgaatatgcttgcgctcttggtgatggcgcggggcgtgttgctattggtattggtaaagatgcgtttgttgaaattcttggtatgcgtttttacttaactgaaggtgataatttgatagaaatcaccgatagccagttaagggtatcatctggaattgataagaacgggcgaactttcagcaatgatcctttgggtggaagcggtacaccagatagcctatatattgaatttgctgaacgattgcatgtgttgatttacggacagtctctttctttggggcaatacggtacgccagcacttggaactccagttgcagatgggcttatgtatgatactggggttcgtagctataacgttacgccatcatcaattgttggcctgaatgaaacggtaaatgggacgtatggggagactatcgcttcttctcttgttcacggtttcgcgtctaattcaggcggcatgtacgggcgaaaaataatcctcaattctgcgggcattggtggggttgctattgaaaccttatcaaaggggcaaccagcatatactcagttagttaataatgttgcctggactgctggaaaaatggaaagtgaagggcgtgaatatagtgcggacttcatttgctggatgcagggagaagccaatatggcaaacggcacttcttatgcttcctaccagacatctctcgctcaattgcagtctgatttgaatgccgataccgaaagtcagcgatcttctggggcaaatcttatcatgctgacttaccagacttcctcacatggtttttatgtcggtacagtgacaaatcccccggagatgattgctcaggctcagcttgatttagccctcaccaacgaatttattgatatgtgggggccaacgtacatgggcctgccagcagatcacataatcggacagggtaatgttcatcacaataatcatggctatcgcctccaggggctttacgcgcaaaaggcattgcggcaccgacttcagacacgaactgctgaaaaaccagatggtgaaaaatatctcccggtacacgctaaatctgccaaaaaaatcaactcccggaccgtcctggttgatatgcatacctatcatcccccgcttgtcattgatgcttcgtatgtatcggaacttagtgacggacaacatggagttgaactgcatgattccacaggaaggttaagtgttgtcaatgtggaaatcgtcggcgggacgaagataaggattaccgcggcaaccgatattgcttcggattcttgggttgcatttgcctggacgccggagaacagaggggaaattactaataaccgatatcagcaatggttttttggtcgtgaaacaggggttaggacgactatccatgactctgatccagaggttacagacttaactgatgaaacagggaaaccctatccgcttcataactatccagctattcaaaaaatagccatttctcagtaa

SEQ ID NO: 104008 - DNA, 708 bp, Enterobacter aerogenes
atgtcaacacttcagctgcgcgttgtatccagctttaacaacccaaaccttcctgttagcaccattggatcaaagttgtatcgtagttcggcgttgggtatctgggaaatgctggatggttctgatcgtagtggtaaaggaaactctcttttacagatgggtttgggctttgatgcgaccgggctttactgcgatggagtcgcaaatcactatgtcgatacgggggttgttgaaccagatgcctataccattattacggcggtgcaggcagatattccagcgcagacatcgcaaatttggtcttgcttacccgaaggaactgcgccatacactggcgcaagaggcgcggtaaccagtaccggtgcatacgttgccacgattgctagtggtgctgcaggtggtatcactaatctgacaactggtgtcgttgctccggcttgggacatttttgcctacaccgtcagaaacgaacagttgagaatgactcgcggtagcagcatgggtactcttacggctgatattacaggtcgccaaaaatcagcaaaaaccatcagaattggcggcggttatacatcgcctcacaatattgggattaagggacatatcgggacctttgctctttataatggagtgttagcagatagcgatatcagctcgctcatttctgcaactaggcaaatcatggcagggcgaggcatatctgcgtag

SEQ ID NO: 104009 - DNA, 147 bp, Enterobacter aerogenes
atgctcggtgatacgggtataaggcactttttgctcgccataattcattactgcacacccctgataatcaccttccgtgcggaatgcttcgaaatccaacgtacggtaacccaaacgccccaaatcatagttataaaagccatctaa

SEQ ID NO: 104010 - DNA, 744 bp, Enterobacter aerogenes
atggggtcgtctggcgtactgcaattcagtcagcaaatctcatggagtaaaatcgtattttatgggtgcacccaaagcatacagtttggtgagacagtttttctgtctcatttggattgtttttgtctcatctgcatgttacgttttcctcatctagagtctaacgagacatttttcataacaatggctttttacggttatgcccgggtttcaaccaacgaccaggatctggatttgcaaatacagacgcttcgcgccgctggctgcgaaatcatccgttcagaaaaagcgagcgggaccagccgcgatggacgaactgagctgcaactgttgctggattttctgcgtaagggagacacgctgattgtcacgcgagtcgatcgcctggcccgtagcattaaagatttgcaggatatcgtgtatgccctgaatcagcagggcattaccctcaaggcaacagaacaacctgtggatacgcgcaccgcagcaggtaaggcgtttctggatatgctgggtgtcttcgctgagtttgaaaccaacctgcgccgtgaacgccagttggaaggtatcgctgccgcaaaagcccgcggggtttatcaggggcgcaaaccgcgcatcgatcctgttgaggtccgtcggttgtacgttgaagagaaaatgggcgcaacggcgatttctcgccaactggggatcggtcgagcctcggtctatcgtgtgctggaccgcgatgagcagccggcgtaa

SEQ ID NO: 104011 - DNA, 1662 bp, Enterobacter aerogenes
atgagcagccggcgtaaggccattccaaccgattctttgttgcaactgcgacaacggcttgaccgtctgccaccaaaaagtccggaacgcgcggcccagatcaccgcgatggcgctactctattgcatttccgtcaccaccgtctatcgtacactccgtgccttccagaaacctcacattgcacaccggcgtgatcacgggaaaccccggatactgccgccgtccgaactcgaatattattgtgaactgatcgctgcattgaaattacgtaccaccaataaagccggtcgtcatctgtccacgacgcgtgccattcagttgctcgaagaacatggtgtggaaacgactcaggggctggttaaacttccaaaggggttgttgcgcaggccaacggttaaccgctatttgtccctgttccgactcgatcactcacgtctgttacgggagccaccggcagcgcggttccaggctgagtgcagtaatgactgctggcagttcgatatgtcgccctctgatctcaaatatatcgaatgtcctgagtggattgatccggcccgtggacaacctaccctgatgttattcagcgtggtggacgatcgcagcggggttaattaccaggaataccgctgtgtgtatggcgaagatgcggagtctgccttgcgttttctgtttaatgccatggcgcctaaaagtcatccggagatgtctctccaggggcgaccgaaaatgctgtacctcgataatggcccggtggcgaaaagccatgtcttccagaatgtgatgcaggcgctgcagattgactggcagacacatatgccggcaggcaaggatggcacccgcaccacagcccggtcaaaaggcaaggttgagcgcccgttccgttccgtcaaagaagcccacgaaacgctgtatcattttcataagccggagactgaacagcaggcgaatgaatggctctggaactacctgatacgctataacgcacaacgacatcgcagcgaaaagcattcccgtgaggaagattggctgatgcatttgccaccaaagggagtgcaggacatgtgcacctgggaacagtactgtcgctttgcccgggagccggagtctcgcaaggtgggtatcgatgcccgcataacgattgacgggacagcttacgaagtcgaacccgacatggcgggtgaaactgttatcctgctgtggggcctctttgatgacgaaatgttcgtggagtttgacggtgaaaagtgggggccttattttcctgtttccggcccgatacctctgcaccgctatcgggcattcaaacgcggaaaagcagcggtgcgggcagaccgtatccagtcattggctcggcaactgaacttacctatcagcgccctgtccggttgtgacctcaaactggtggccgatagcgttcagagcacgcgggtgttgccacatcaacccttcgagtccacagcgtttgaatactgttttcctaccccggtggcagcgaagctggctattgcggctgatctggccacaccgctggcgaaattatcggatgaagacaaggcgtttatcgaccaagtactgacagacacgctgatccgcagtgaggtatttgcccgggtcagggagtatttccgcaacacccaatcaggagaggatcatgcgggttga

SEQ ID NO: 104012 - DNA, 969 bp, Enterobacter aerogenes
atgcgggttgaggtaatggaacattatggactggcgcaaccaatcgatcaggccggttactatgagacggctcaccataagcagcttatcaaggatatccgcggtgctatccacgaaggccggttaattgccgtttgtggtgtggttggcagcggcaagacagtcactctgcggcgtttgcagcagcgtctcagggaggaaaataaaattaccgtagctcgctccctgtcgattgaaaagcacaatattaaactggccacgctcatcaacgcgctcttttacgatttgacgcaggataaacaggttcagatccccaaacagggcgaacgacgcgagcgtgagttacaggaactggtcaaaaaaggaaagcggccagtggcattgtttgttgatgaagcgcatgacctgaacgggcatacactgatcggactcaaaaggctgatggaagttgtggaggacggtggcggccggctgtcggttgttctggccggtcaccccaaactgcgcaatgacctgcgacgcccgactatggaggagatcggttatcgcacggatatctttacgctggatgggatcaccggtagccaacgggaatatattcagtggctactgaaaaccagtatggggaaaggcaagccggaagacattctgaccgccgacgccctcgacctgctggcgatgaaactacgtaccccacttcaggttcaactacatctgacgctggccctggaggccggttatcagacgggagaaaagccgataaccgccgccctggttgaatcggtactttcccgccagcttgacgatttggagccgacattaacgcgtcatggttatcgactgaaagacatggtggagcagtttgatgccaaaccggcagaaatcagggccatgttcaactatcagctcgaccctgctcgaacagcagaactgcgggacaggatgctggcggtggggctcccgatatga

SEQ ID NO: 104013 - DNA, 1077 bp, Enterobacter aerogenes
atggcttttgccacaccagagccgattcttcaggccatcagagaccgtctggatagaaaaatactcggctacactaaaatctacgacgaagaatactatgagatctttggcagctggtgtgagcgacaatatggtcaccgtttcaaaacggaagacattgtgctgtctccgggcattattcccgcgctgaaccgtctcgtcccgcttctgaccgacatggatgacagtattcttattatgacgccttcatatggcccgtttaaaaaggcgggtgaatacagtcagcgtcgcgtggtgtactcggcgttaaaaaaatcagcaggcggctgggaacctgactgggaagactttgcacgcaaagccagtcaggccgatttacgtgtgaaaattcttttcctgtgtaatccgcataacccgaccggacgagtctggcggcctgatgaacttaagcggattattgaaatttgcctggccaatgacatctgggtgatatctgacgaaattcactgcgacctgtcccgaagcggtatcggtcatacaccggccgcctctcttttccctgattctacacgcattattacctgcatgtcctcgagtaaaacattcaatctggccgggaatttgttggcaaatatcattattccggatcccggtgtcagaagcgagtggcgtctcagacacgacgagttcatctctccactgagcctggcagcaaacaaagcggcgtggagtgaatgtgatgactggcttgtccatctgagggaatatattgacggcaatttccagtacctgcacgactatctcaaaagctatttacccgaaaccaggttctcgatccccgaagggacatatctggcctggatagatattagccgctacctgcccgacaccgcaggtgaggatttatcgctgtattttgcccgggagtcaggggtccttcttgaagggggcttgctgtttgtcgacaatggggacggatatatccggttaaatctggcctgcccacggagtatgctgacagcagggatgaaaagaatttcacaggtactgcggataccggctcctcatcgtgtataa

SEQ ID NO: 104014 - DNA, 774 bp, Enterobacter aerogenes
atgaacacttttttcaaaggtaaaaaactgctcgtcgtcggcggtaccagcggcatgggcctggccgtggcacgcatggtactggaagcgggcggcagtgtcgtgctgaccgggaataaaaaagacaaagccgaagcggtgcaaaaagaactgagccctctgggaccggttgcggtcatcgcggcgaacctgatgaccgaagaaggtatggaaactatccgtcaggaaattaatgctcaccatcacgatatcagcctgatggtgaatgccgccggtatcttcatgcccaaaggatttaccgagcacagctttgccgattatgacatgtatctttcgctgaaccgagccacgttctttattacacaggatgtcgtgaagaacatgctcgccgcgaagctcgaagggtctatcgtcaacgtcggttcgattggtgctcaggctgcactgggtgactcgccggcctcggcctattcaatggcaaaagcgggtctgcatgccctgacgcgtaatctggcgattgagctggccagcgcgggtattcgtgtcaacgcggtgtctcccgggattgttcatacgccgatatacgaaggcttcatggacaaagcggatatcgcagatgctatgaagtcgctgaacgatttccacccgctgggacgcgtcggaactgccgaagatgtggcaaacactattctcttcctgttgtctgacaaaacctcatgggtgacgggcgctatctgggatgtcgatgcgggcatcatggcggtcagacgataa

SEQ ID NO: 104015 - DNA, 702 bp, Enterobacter aerogenes
atgcaaacgctgaaacccacccttaccatcgatatctggtcagatttggtctgcccgtggtgctggattgctaaaaaaagatttgaacagggtctgaatcgctttgaatttcgcgaccaggtggtgatccgccatcacagctaccgtctggccggtggtactcccgcgatgccttttaaggatgccatcgttaaaaagctgggcagtcagcattcagcggagctgatgatgaatcaggtgggcaccgccggtaaatctgaaggtctgatctacaacttcgacggcatgatgtttggtgatacagaagatgcacacaccctgctggttgccgcgcgtaaggccggaattgcggacacggtggaagaacgtttttatcatggcagtatcaccgaaggtcgctctctctttgaccgtcagcagctcgttgccatggccgtagaagccggtatgccgaaagctgacgctgaagccgccctggaaaatgacgattttcgcgccaccgtttccgacgatgaagcccacgcacagtctattggcctcagcggcgttccggtttttgtgatgaacgaaaaatatgccatcagcggggctcaggcagcagataactttttgaatgccctgcgtcaggtctgggatgaacagcaaaccgaattttcagccactgcgggtcagacctgcggaacggatggctgcagtatttaa

SEQ ID NO: 104016 - DNA, 1107 bp, Enterobacter aerogenes
atgagtaagcttttcaccccctacaatctgtctggcctggcgttaaaaaaccgtgtagtcatggcaccgatgacccgcacccgcaccatgaatgacgtgccggatgaggtcgtggctttgtactatgcacagcgtgcttctgctggcctgctcatcaccgaagggatgccggtttcagaagaaggccggggttacctttatacccctggtatctacaacgacgaacacgtccagggctggcgtaaagtgacacaagcggttcacgccaaaggtggccgtattttcgcgcagctctggcacgtcggccgtatgtctcacgtctctcttcagccaggccacatagcgccggtttcagcgggcaccgttcaggcggtcaataccaccgtttttgcgctgaccgaatccggagaaccgggcccggttgtaccaagccagccacgcgcgctggaaacgcatgaagttaaacgcatcactgcagacttcgtgcactccgcacgcctggcgatggaagccggctttgacggcgtggaaatcatggcggcaaacggattcatctttgaccagttcctcagtagcgaactgaacacccgcaccgacgaatacggcggctcggtggaaaatcgtcagcgtttcctgctggagaccattgacgccgtggcggaagccgtgggtaacagccacgttgccgtgcgcctgtcaccgttcggccgcatttatgacctcgcgccgtatgaaggtgaagagcaaacctggtcagccatcaccgacgcgctcggtcagcgggaactggcctacgtacacctttactatcagccggtgtacaccaaagcgccacttccggaaggcttccgccgccgttttcgcaacacgtttaaaggcaccatcatcgctgccggcggttttacccgtgatatcgcagagcaggctctggaagatgatgagctggatctggtggcatttggtgtgccctacatcgctaacccggatctggttgaaagaatgcaaaacggctggccactggcagaaagtgaccgcgccacctactacggcgtcagtggttccccggaaaaaggctataccgattacccggtctggcaggcgcaataa

SEQ ID NO: 104017 - DNA, 288 bp, Enterobacter aerogenes
atgcgtacattaacagcttataacgaagataatttccgccagatagagcagtacaaaggaatatcggtggtacgtttctctgcaccctggtgtccgccctgtcaggccagcgaagaaatgttcagtcagtttgcagaccggctcgatagagatattcaggtggggaaagtcaatgtagatcaggcgccggtgctgacaaccaaatacgagatctgggggctgccgtctgtgctgatatttcatgaagggcaattagttaaacgcataccgggtgtgaaacctgcgtaa

SEQ ID NO: 104018 - DNA, 3666 bp, Enterobacter aerogenes
atgccacagctgcttcgcatcattcttatacacactcacctgcctggcgttgttgaaattcaactggatcagcatactaatatttgtggaactaatgcttccgggaaaacaactctgcaacgtcttgtcccggtcttctatggtgaacaacctaataaagtcgtaccaagaacgcggaagaaatttgacgagttttatctcccctgtagcaatagctatatcatttatgaataccagcgagaaacgggtgataattgcctggttgttttgacgggtaaaaatgagggaggcgttgaatatcgttttgttagcgcaccttatcatccagactttttcctccgctataccgaagatggcacgaaagggttgagttataacgaatggtctgcccagatgcgcagccgggatgacgtttcagtttccgccaaaataggttcaaccactgagtaccgtagcatcattcaaaatgatgtcgcgtcattacgcggcaattcaacggaggcgatgaggcttcgtcgtttggcagcatcgtttagtctggtgagtggtaattataagctcagacatattgagaaattagtgagcgccgttcatgccggtgaaggtaaaatggaaacactcaaaaccatgctggcggcgatttttgccgatgatggcgttacgctcccccaaacaaaagtaaaaagcagctttgcgcgggaatggattcaaaaaatgcgccagtcgctgcgttacgataaattgcatcaggagtttgaacacttacagcatctggggctgaaactggaggatacggagaagcagttagctgcacttcaccctctgttacgaaatgatgaacaatttcagaagcagaaacgcgcggatgcagagcagttgcttcaccagcgtcgaggggagctcgttcaattagaggatagctttaaccaacagcgtaatgcgctgaatgatcggctaagtgaaacgcaaagcgacctgaaaacggttcaggcctggctgaatcatatcgaaaatcaatacgactgttatgaacgcaaagagatacgcctgttacagacacacatggaagagttgcctcaatggcgcgaggcgctttcagtgcaaagcgaacaattccggcttatgcaggagcaggttggtgaactttcccgagaatttgaacagcacaaagcaaaactaaaagaaagtatttaccgccatgaacggctgacccaacaaaaaattcaggactgccagcgggaaaaagaggcggtcaggaataaatttgacagccagaaagagatactttggcagcgcttcgaagagcgaaaacaacagcaggaaaatcactacggtgaacaactggagaatatttcaggcgatcgaatggctgtgagcattgagcttaaactttcccagttaacagcccaagagcatgaagagcgccagtttgctgagctacgcattgagcaagctcatgatcgattattgcaactggctgagcagcgacaaaatgcactatctacgctatctgaggcccgtataaagcaaaataatgcagagcaacagctgcacgacgcccgtgctaatctgcatcaaactgaagaacaattacagcgactgcatcgtcagttggatcctgaacagggtacgttacgccacttccttcgtttacattatgagggctgggaacagaatctgggcaaggttctgaatgaaaatctgctggaacgtaaagatctgctaccagaaacaggtgaactgtcggaatcgctgtacggcctacaactggatttaagcgtgttaaatatgcaggattttgcgcaagatgaggcttcaattcgtcacagtcttgataaagcagaacaaatcagagcccgtgctgaagaagcgaagaaaacggcagaagccacttttcaggagcatcatcagaacgtcaaccgtttgaaatcacaagtggaagagtgtgaaaggcaacatcagcgtcaaagccaggaagttggatatgctcgtgatgcccgatcgcgtttaatcgcaaagtatgatgcgctggagcaacaacgtcggcaggaaaaacgcgcccgtttaagcgctttagacaaagcacatgccgaattaacgcaccagaaagaacaagatattggtgcgttgacggaagaatataatacgcaaaccttgcaattaaatattgacctgcaaagtgagcagcagcttattgacgagaagattgaggaactgtctagccagataaataaaaaatacaccgatatggaagagcatattaggatcttccagcaggcgatggacgctaatttagctaataagggaatcgatccccgcgaagtcaaagtactaaggcagcgcattgaaacgcttaaaaaagagattcaggaagtggagtctcgtcgggatgagttaaccgaatggctgcgttttatcaaagttgactacgggacgttgcgccaggagcaacagaataaagaaagcgcactttctcaactgaatcgtgagctgttgcagaaaaaacagcaattacaggcagagtatcagaataaaaaagacaggcttaataatgagaaaaaagagtatgagatgcagacacgacaggccggtgagcttgttgcccagttaaaagtattgctggaccggttattacctttaccgttggccgaaattattccggcctatattgattccgccgctgatattaatgaacggatctcgcgtaccagcgatatgctggagcaacatgccagcgtaacccgtgcgctggagagcaaactgaatgagtttaagtcacactttaatcaggacgctgatcccactttccttgaattattggattctgagataaataaattacccgatccttcaaggagtcggcagcagttgccagtacttgagaaactattacagcttcttaaagataaacagcagcaattgctggagatgggggaaaatatcggtggcgatctgaaaaaattctttgatgttttcagtgatatcaatcgccggatttcgcaacaaagtcgtcgcttaagcgaagcagtttccgatgatttacaactggaaggcatcaataaatcagaggttcgcattttatcgactatcgaccaattacgattctggaaaccattaaagcgcttcgctaaaaactatagtgactggcgctcgtctggtcagcaacttcctcctgaaagctatttgaatgcccttatggatgtggtggaactgcttcatgccgatgagcgtttcactatggaatcgttattaaatcttgagcttcaccttaacgaaggtggggaagatattgttatcaaaaacgatcgccaactgctggaagcttcaagccacggtatggcctatctgatcttgtgcaaatatcttttggcgttcacgcgtttgttgaggggtaaatcagacgccgttattcactggcctattgatgaaatcggcacgctggcttaccacaatgtggagaaattatttattgcctgtagccataataatattgtgattgtaggcgcttttccgaatgcggagtctgatgtgttaatgctgtttaagcaccgttatttgcttgataccgatcagcttgagccgactcagcgcaggctgaaaaggatccagccgaaagtgagccgcctggctgcccgactggcgcagatgggacaggaggtaatgtaa

SEQ ID NO: 104019 - DNA, 624 bp, Enterobacter aerogenes
atgctggaacatggacctttaatcaaaaggctgctgacaggggagtttatttgtcgtatcaacgacccggatgcttatcgtcatttacaggatgagagtacccgtcaagcgatggacaactatttgcgtcctcttaattacagaattgtcagtaatgagacgcaaactgtctattatgcgggcttttgtgagatgaatcgcgatacccgcaaccagcttatgaatcagtttaaggacatcatctcctctctgctgcctctgcttgagtggttacagcttattcaggagacgcaagggcgggagagtacgctgacagccggcgattatatcaggttgtcggaaattatgacgcgtgtagaggataatcagagtctgcaacagcgtctgaatcagctttccagcgatcgttttttcaattgtaagagtgattccattgatcttcagctaaaacaaattttccggcgtttgaaagagcatggttatgtcagacaacctaacgccgaacaacagatatttatagccaccgggaaaattgattatttgattgacgtgatccgatttatccgtgatgaagagcatttaccggttgaagatacaccgcctgttcagcaggagcttctataa

SEQ ID NO: 104020 - DNA, 1239 bp, Enterobacter aerogenes
atggcacaagagatttctccgttatccggtctgtttaaaaacggtgctggacggttagcattattgggaaaacaccatcatgccttaatgaagggttatgtcgatgggtttattaatgaaacggcttttagcgaccagacattaaaaaagctgatcgctgcgcgtattgtgtggcgtcctgatgagcaacagccgctgatgttacgcccgttggtaagcgaacttattgccagcatggttgctgatgagagccgacggcagattaatgcggatgtggcagaaaagctggagcagatcggcaataaggtgcaggcctggcgcgatgcttattataaaggcgattacagtattgctgaacggcaaatgcagaggctgactgaactcgttcacgatctcagcgggcaatttgaagaggccatcgacagcctctggcatcgtctgaataatgatttcggtttcgtcagcagtctgaatgaaaaaattaacgagaatgcgcgggcgcaaaaccaggttcgtcggttgcttgatggactagatttgattgttttccatgaattgatcgagtttgctgaaaataatagttcactgcgtaaattattagtgagccagttacaattgcgtgtaagtcttcaccatagttcactactggccgttcagcagcgactggtggatctgatggctaaatttcgccaacagcagtcacgtacattgttagtgacgaatatggctgcttttttgcgtcagcatccacaatatcaacccgccagctaccctgaacgccgggaagtgccggatatattcaacattgcggcttcacttacactgcaagcctccatttcgctcgacagacctgtggatcgacaggtgatggcggagatgttgcttgttttgcctcgggcatcgattatgtctccgcctgtgccaaaaagtgcgggcgcagtaatacctcccattgatgaggaagtcgctgctcgtcaggttgcgcttaaaatggacgttgaggacttatatgttttcgctgccgggcaatcaggagcggtgagcgcactgcattatctgacggaaaatcatctgaactgggacagtgagatatggctttatcaggttattacggaatatcaatcattgccgttagcggataagccgcgtttctggctgcgctgtgatgagcgtcaggccagcccggtaaacgatctgcgtattatatcggatgtaaatattggcgtgagggcaaaatga

SEQ ID NO: 104021 - DNA, 879 bp, Enterobacter aerogenes
atgaccgaagcagaaccgttatcgtataacgcgctcgtctggctgaaaaaacttgatcatcgcctgaaagcgaaaaattgcgagaagaaaaatacagacggtaaaatcgtgattcaggttttgcgttggtgtactgcgctggatttgatcccggctaacagtttgttgctgcctgatttcatttttacaatggcattgctgaataagatttcagatacccagcaacgtctcagacaggcaaattttcgtgacaatattagcgaacaaaatcgtattgagagtgcacggttaagcgatcaggagattaaaacggcgggaattcgaccacaacagcatcgggtattgctccgtcttaatcagcctttagttaatgcgttagggatggctgttgaggttgttgatacagattggcgtaatattgcgctgatgcagtttgatgttcttattgtggtggagaatcaggattgtttctaccatctggcgctttttgattattcacaatgtaatttccactctcccctgattatttaccgtggcgatcgtacatatagcaagggagctgttgcgttgaagcgttgctggttgaaaacagggaaaactgcgatctattttggcgattttgacccgaagggcgtcagcattgcgatgaatgaaggttatcattctatgttattaccttcgccatccgtagtgataaaaaaatcatcttcagcgatgtttcctgatgcgcagttgaagttcttacctgaattattgagaggtgaggttcattgccattttcgtgactatctgttggttttggaaaaacatcaggcgttgaggcagcaaaaaatgcagggtgaaatcttgaacatggttatgttgaaaacatcagattag

SEQ ID NO: 104022 - DNA, 1005 bp, Enterobacter aerogenes; identical to SEQ ID NO: 53712

SEQ ID NO: 104023 - DNA, 1062 bp, Enterobacter aerogenes
atgctgtggggtggtgttgacggattgtatctgcggatcgccggacgctcacgcgcatgggccctttgcgttgcgatgggaacccgaataaacagggtagataagaccgttccccggcgactgaatatgggtcttggtccgtatcaggaagtttcactggcagaagcgcgtgataaggcgcgtgaactgcgcaggcagatccgtaatggcattgatccgctcaaagaaaaacatgcccaaaaagcacatcaggaaaaaacagcccgtaaacagaagacgttccacgaatgtgcggaagccgttctggaaattaaggggcgtgaactgaagagcaaaaagcatgtcgcacagtggcgctcttcactggagacctatgcttatccggttattgatcagaaaagagtgggtgagattaccaagaccgatctgctggcgatactggaacccatctggttaaccaaaaacgaaaccgccagccgcgtgcgtggtcgtattgaaactgtgctggattacgctaaagcgaaagaataccttgaaggggataatcccgctgcgtggaaggagatgcggaagccgctgttgccaatgctaagtaaggtgcagaacaaaaagcatcatgctgcattgccgtatggtgaacttggtgcgtttatggctgaactccgtatccggacaggtgtatcggccagagcactggaattttctgttctgaccgttgcccgttccggtgaaattcgtggtgctgtgtgggatgaaatcgatctggcggcaaaaacatggactattccggcagaaaggatgaaagccagtaaagaacatcgtgttccgctgtctgatgcggaagtggctttgcttaaaatactgccccggtttaaggacaataatcttgttttccctgctccgcgcggcgggcaactgtcggatatgtcattaacagcggtattaaagcgcatgggccgcagtgatttaacccagcatggttttcgctccacgttccgagaatgggccggggagaccacatcctaccagcgggaagtgattgaacaatcagttagcggataa

SEQ ID NO: 104024 - DNA, 612 bp, Enterobacter aerogenes
atggaagaaggtgaggatttttcgacctattttaatcgcgagcggttcccgactgatgagtttgacatagaaagtagctgtgatgcttccggctttatcaaaggagataaagaacgctggagtatcagtggtgatgttcatgagataaagaatctgcctgtaatcctctatagcaaacagacattgatgacttcaccgaaatacggcctgctgaagaaaaatgtattaggggtgaagagttccaagcatagctgctttgtctatgtcgatacctcgttttcattctgtgaggtaatggaagctatcttcatcagtgggctgttcttctatgcgccaagagacgccgccagtagtcttgatgaactgaaagcgagtatggctgggctggaagaagaactggccgaagagcctgaaacagaatcggctgataatgaaacagataaagaacctaccataatcgtagccgaaggtgcttttgattcggtcactgctcacatggagacagaagctaaggactggcaatccattaagaatctgtgtcagcgagaaaatgagctacccatacgtattggcagcattaaaattgctgagtcttcagagcttcatctttag

SEQ ID NO: 104025 - DNA, 1173 bp, Enterobacter aerogenes
atgccacacaagaaagtagcattacagctcatagaagaaacgcttaaggaattggaatcaccaaaaggttctttgttatcggcggtacaaaaattacagcggaccgcagatatcatcaatgatgatgataaaaaaatatggtgtgctattcaattaggtgatactaaatatacaaagccaataactgaattgcttaagtttgttattgagactgaaaatgcaaaaactaaatctttccaagaggagttagataaacgaatacaagatcttacaaaaataggggttaaggctaaagttcattattcagatgaagaactcacattaaaaaatattgaaagtggcggtggatataataacattgggtttattgaagaaaaatatgccgatcttgtaagaaaaaaacaaggcaatgacggaacgtattataaggatagtttaaatcaacatatcaattatgttagaaaaaaagcacatgaattagcatcgaaaatatataatcagctaaaattctcaggtactgtcagcaactgttttgatatactaaaaaatgctgtcgatgataaactattagatctaaacccagtgatcgcagaacaattaatgttggcatttaaagctatttcttccgataaagaggaagaatggtcccaagctttaaccacatgtcgtcgacttttggagggactggctgatgaactttacccggcatcgaaggagagatttaatggtcgggcagttgggcaaggtcaatacgtaaaccgcctttgggcatttatggatggggctattcaatccgaaagtaataaagaccttgccaaagcacatatagattttcttgggtcatggttagataaagttaataagttaacaaataaaggtgtccacgccgagttagaccgaattgaagctgtaaagtcagtatttcacacgtatttagtagtggcggatttgcttgagtatatgtcaaataccaaaacctctgtatctaagcctgatatcaataaagctactttagatgaactggaagcattgttaaatataaatagaacaatcgctaaagaaattgttaaagcacgagttcgtgaaggcaagcttgatcttgatattttaagaaatataaaaggcatcggtgctaaaacacttgaaagtataaatgaagtttttgttatatga

SEQ ID NO: 104026 - DNA, 300 bp, Enterobacter aerogenes
gtggaggcagaagttctggatttcggagtttttaagaataggcagatcgccaattttaatatcggaggccataccatcacgcttcatctggcgggccacttctttgggcttatcggaaagctggcgcccgccggtattctcatcctcactctgctgtttcccctggcggcccagcacccagctggcgatgaagaacgtcacgatacagataacaagagaaaccacggcagcaaagacgaaactggtccacagctgctctccgcaccagatagtatatttatcggccaggatttgttctga

SEQ ID NO: 104027 - DNA, 171 bp, Enterobacter aerogenes
atggcgcatcgcgccatcaagcagggaaatcgtttccttcaggctcagcttctccgcctgatccacgatgagtgttccgcccggaataaacgccgtcccgtcctgcagggcggatttaccggtcaccgtttccccggccagacgcacatcaccggcgagaaaatcacgtga

SEQ ID NO: 104028 - DNA, 192 bp, Enterobacter aerogenes
atgaacaaacaacaaaagactgccgttaacatggctaaattcatccaggatcagtccctgcttcttctggacaggcttaatgagctggatctggatcatgaggctgatttctgcgagaaactccatgaggatgcggaacgcctttaccgaagcctgtcagcgcgcctgaatgagcagcaggacggtgcgtaa

SEQ ID NO: 104029 - DNA, 228 bp, Enterobacter aerogenes
atgctgctgacaaatttcatgcaagtgaatcggcacgggtttaacagccccccagagtcatttaagatcgcttacatcgaaatgttttataacagtaacgtcggcatggttctagcgaacacatgtcaccgacagaatatgaaaaccagtattatcaacggctcggaagtgtctagattatccgtggcgattcaatttaccataacatccgttatcagcaccgcctga

SEQ ID NO: 104030 - DNA, 936 bp, Enterobacter aerogenes
atgacagcacaagatttaatcaacgttctcactattcttaaggccaacgactcaaccagttttagcaagattcaacgcgcgttaaagatgagtatttcgcagttggagggcatcattgatgggttaactgcaatgggaatagtgtataaatcatcattcacttcatacagccttactgagttaacctctaaacctgttgttagtgacggtgtaagaaaggcattcgaagatatcattaccaatcgcggtacttacctgtcagaagaactactacaaaaggtaagtacaccattcatcccactgatgacgcacgaatacaaaaatgccccagttaaagtgatgatcgtggggcaagaaactctgggaatggaagatgctttcagtaccatcgtttcggtcgatgactacattaatgagagcattgaatccttcaataaattcaattttggtgaagatttaaggaatagccacttttggtatgcatttgatgaagtagtaaagtattttaacctaccatccagaaggcatgcttattggactaatcttcataagtttcaattaattgaaaatgatggagatagtgtcagcatttccaaactaccttcaaaagatatcatgacaatgattcatatgcagcgtgaattattcttggctgaaattaaagataccaagccagatatcatcatctacttcacgggtgggcaaacctgggtgttagatcattatctaaacaatggtaaaaaattagcagttaaggcaatagatgaacgctcgcatctggggattatccagacagaatttttgcattgcccaatcgctatatgtaccgaccatcctagtagaaggggatatactcaagccatcgtagatcatagagctaatctgcttaaatatgctgctgacaaatttcatgcaagtgaatcggcacgggtttaa

SEQ ID NO: 104031 - DNA, 459 bp, Enterobacter aerogenes
atggttaacagaacattgaatgttataagtattcagaaaaccaaaagaaatgaatccattttgaaagactggattaccgattatgacggcatagagttatttctattagatcatggactattgattgaaagaagagaagacactgaaagcaatcattttatactggtaaaaagaaagcggaaggaatggcttgatttttattttattagcaataatgaaaaccatcatgatgcagaggatattttacttgatattaccagtatgtttgatagttgtgccgctataacttcaataacaagctggggtgaaggtagctacaaaagctgtgaaacagtatgtttatttgaatgtggtgagttgttttattcttataaacatatttcaggagaaagaagctttaaatggcctcgttatgtttcgagtgcttttaaagaatggttaaaccttgacgctatttaa

SEQ ID NO: 104032 - DNA, 414 bp, Enterobacter aerogenes
atgaaagaagatattttgaacgcgattgaaagtaaagttagtcccttgataaaagtttggatgaatgatggaaaatcatcattaaacataaataaagagagatacataaaagacagcattgatagtaaagaagatgttgatgtaaaacttctcgctgttaagtatcttttacttgagtatgttaatgaatatgctcctgatgattacattgaagaaatgacagaaaggttaaatcgcatgtttgatgatgtaaaccctatgtgttctcttttttatggtgtttttgatatcagaatggttagctattcattcgaatattatctttctcatttctattacatgctgatggttattagcggtgatagtgaagatgtagattatgtgatgaatcttattaaaaacaatgaggcgtaa

SEQ ID NO: 104033 - DNA, 456 bp, Enterobacter aerogenes
atgagttatatgtcattaaatgtagtaagcattcagattaaaaaagcaaatgttgaaaaactcactgcgtgggtcagagattttgaaaacatacgtgcatatggaagcgcatcaaatatagatattataaaaaatgatgatagagaagaagatgctcattacataaaaacgaaaaggtatagaaaagaatggtttgatattttctttgaatcctctgatgaacttaatcatttttatcaagacgggtttttagaagggatcgcgagaatgtttgattgctatgtcaatattagctcaataacatcttggtgttgtccttatcatgagtcatatactatgtatatggataactggtatgaaccgtattataaaaactttaccggagatgaaagtagaaaatggcctcgccatataggtatgtatttttggaactgggtaaatcttgatgagatttaa

SEQ ID NO: 104034 - DNA, 909 bp, Enterobacter aerogenes
atgactatatctatccaaaacaccccatcattaagcttaaagcccctctacatgtgggctggcggcaaatctaagctactcaaaagctaccagacctatctaccagacctgaacagcgtaagcgcatacgtagagccattttttggcgctggcgctctctttgcgtctgttaagtctacctacagccatatcccggcaatcatcaatgacgtaaacccggagcttatcgctctactgaacactatcaagcatgatcatgatgagctgattacccatctgcaggagctggaagcggtctatcttggttatcgttctctggaagtgaggaactaccacttttaccgtgtccgggaacaatactggaaagcacagatcggaaccgtccgggcatctgctttgctcttctttttgctcagaaccggcttcaatggaatctggcaggtttcacgcaaaacaggccgctacggaacggctgcaggactgcttaaccatacaacaagcctctttgattactcactcctgaacgagtggcacagagctttacaggcaacgtctatccattgcggttcttatgctgatctcgatgttccagcaggggcttttgtctactgtgatccgccttacagggatagctacgccgattatggccatgcattcactgatgaagaccacaaagaccttatcgaatggtgtcggcagcttcaggagcggggctgtgttgtgtggttagccaacagagaggcaaatgatagcttctttgaagaaaacgcttctgatgcttctgtattgcggtttgacattacctacacagccggaagaaaaaagaaaacggaaaacggacatgaagcagtaaaagctaaggatttgctgatgatttggaataataaaaacatgattaaagccgcttaa

SEQ ID NO: 104035 - DNA, 423 bp, Enterobacter aerogenes
atggatataaaagaagcgttaattacagcaataaaacagaatcgaggtgatattatctatgatcacttcatgtttcaaacattagaagttaaacttaatgcccttatttacttaatcagggtattgaaagaagacgaacaaggtaatcactttatcaatataatgattcaggtaatagcaaaacctgaatatctgaatactgttgttgatacattaacacctcttcaggaggctgttatacaggataaactttctttctttaacttcctgttaatgaatggcgcttcacttgaaaagcgaaataagcaaggtttaagcggatatgatctcatattgaagattggtaatgaccgttttttagattttatcattcagtatgaaaatgttctgacagaagtttataagtccagaagatacaaatag

SEQ ID NO: 104036 - DNA, 198 bp, Enterobacter aerogenes
atggcgcagtgggcagaggataagcgtatagaacagttttttcgtgaggcagaatcggatgtatatctggttgaaggaaagcataagggacaggtaatggagcgtctacagctggcccgtcagctcttgtcggtggatactgctgttgagcgattgctcaagtggacaacacctcaagagcggttaaataaaaggtaa

SEQ ID NO: 104037 - DNA, 1938 bp, Enterobacter aerogenes
atgcctgggctttttcttgatttgtcaaaactttctaaaggtgtcgatagtaataccgcaattcctccaagagatatattcaccgctcttcctggtaaaaatgctaaatttcagtatccacgtgatgttcaatcagaggtttgggaaaaatggtttaacattagaaataatcctactaccgttattaaaatgaatactggtagcggaaaaacctctgtaggattgattattttaaaaagttgtattaatgaaggggttggtcccgtagtatatcttgttcctgataactatttagtcgaacaggttattgaagaggcgaatcagcttggtattccggtaacatcagatgagaagtctcaaaaatttattgcaggacaggaaattcttgttacaaatatttttaaattagtcaatgggcgctctgtttttggggttggagatgaaggtgagaaaatatccattggttctataataattgatgatgctcatgcttgtctttcaacgattgaagatcaatttactttaagtattagcagggataaccctgcatatgataatttatttaaaatatttgaaaattctttaatgacacaagggagtgctaaaactctagagataaaatctggagatcgaaatgcatatgtgagagtcccattttggaagtggcaagagagtattaatgatataacaaaaatacttctggctaataaagatcataaggatctgaactttaaatggtcattggtaaaagaaaatttaatcctctcgaaatgtatagtaagcgcaagtaaaattgagatatcacctcattgtattcctattcatatgattccaagtctagcaaatgctcgccgaaaaatattcatgacagcaacgcttgttgatgagtcaatattagcaagtcacttcggtattacggatgattcattatctagccctattacaccaaaaacaataggtgatattggtgatagaatgatcttgatgccacaggttattaatcctgagctaagtgatttagaaattaaatccatgtgtaaagagatctcaagtaaccataatgttgttgtcatagttccctctgaatatagagcaagattttggcaggatgttgcagataagacacttgataaagataatttgtatgatggggtaaaagaccttaaaaatcgacatgttggtcttgttgttcttattaatagatatgatggtattgacttgccaaacacagcatgtcgccttttggtcattgatggtcttccagatgttcgcagattggtagataaaacaactcaaagtatgctcttaggtagtgaaaaaactaaagatgaaattatacaaaaaattgaacagggcatggggcgtggtgtacgttccagcgatgatttctgcggtgtaatattacttggtaaagcattaaatggtgctgtatttcttggtacatcgttagaaaaattctcacctgcaacaaaagctcaaataaaactatcacaagaattggtaaggatattccctgattcaactattgcgactattaaaggtgctctagattattgtttattaagagaacagggatggacctcaatgagtaaaggtgcattagctggattaacttcaagtcaaaaagaaattgattctcatacgatcaataaaagaagagcgtatgattttgcatcaaggaatatggcacacgaagccgcacaaattttaaaaagtgatagcaatgttactgacattattcataaaggctttttgaaggaacatgcggctgaatatgttaatctttatgaccaaagtgaagcccaggtattattgcagtccgcatctggtgataattatcgagtcttaaaacctttgtctggagttagatatagtagattagatggagccgcattggaacaagcaaaggagtgtagtctgtctcttatacacatctga

SEQ ID NO: 104038 - DNA, 648 bp, Enterobacter aerogenes
atggagccgcattggaacaagcaaaggagtgtagtctgtctcttatacacatctgacgctgccgacgaagaggatagtgattatctgagggaaaactttaagaataataatgaaatagtcgtctatacgaattctattcttgaaaatttgatttttatggaaggtacctcaaatccatttgaaaatgcaatcgaccaagttgcaaaattaattggatttagaagtcaacgtcctgagaatgatacagggaaagggcctgataatttatggtcaatgggtgacaatgattacctggtgattgaatgtaaaaatggcgctacagcagatagaatcagtaaacatgattgtaatcaactgaatggttcaggggcttggttcagaagtatgtatgatcaaactgccaccttccgtcctataatgatacatcactctaattttccagagtacgcagcaactttaaatgaaggctctaggatcatgacaatagcagatcttgataatttcaaaaaatccatcttagattttattaatgctatatgtagctgtgataaaaaacatgatgaaacatttattcgtgaaaggctaatatcgtgcaggctacgtgcatcagatatagttaataattatacaagaaatttcagaacataa

SEQ ID NO: 104039 - DNA, 303 bp, Enterobacter aerogenes
atggtagatttctatatctcagcaatcaaaatggacagtgctggtcagcacatcgaattcgtaaaagttcataaaataaaccgagatggctcatggaacactgccggctcaatcagctctcgcaaattcatcagcgagctgatcagcatgggaaaagccagctttatgacagttgtaaagaacagctctactggtaagtggaacctaggagccaaagtggaagcgatgaacgatggctacataaccacagatccaaacaaaactaaactcgataacttgggaaatctgccgaaatttgtctga

SEQ ID NO: 104040 - DNA, 294 bp, Enterobacter aerogenes
atgataaatctttacgatcctgttcatcctggtgagtttatcagagaaatgttcatggaaccgttcgaaatacctgccgcagagttagccgataaacttgatgtatcccagtctaccttaagtagactgttaaatgggaaaacagacttaagctatgaaatggcacttagattgtcgaaggtcgtaggccgctctgcagagtcgtgggtaaacatgcagacccaattcagcctgtcaaaaagtcgcaaatctttagcggcagagctggaacacttgcatccaatgtttccatga

SEQ ID NO: 104041 - DNA, 282 bp, Enterobacter aerogenes
atgataaaaaacataaaacataaaggacttaggagctttgctgaagaaggtagcaccgccggtattcagcccagtatggcgaaaagacttcgcatgattttgactacgctaagcacagcaacttgcattcaagacgttgttgacgttagggcgttagggtgccaccccctaaagggggagcgtaaaggcgagtattccgttgaagttaatgggaactggcgggtagttttcaaggttgaggaaccaaacgtcttagacgttgatcttgaagattatcattag

SEQ ID NO: 104042 - DNA, 456 bp, Enterobacter aerogenes
atgacacatttagaatcaatgaaaataaatttggaagatgaaagaaatagaatttcctcatcttctcttattaaagaaaatgatggctttgttattgaatatatcacaacttgccgtccagggtgtggtgaggttatcttaaatgaagcaaaaaacatattattactgattaataagaatacgttccctaagtggcctgatttggatggctggctttctatattaccaaggtattttattgattctttttccgatgatgattggatatttgaaaactggatctattggtttgagcctgaaaatagattctggttcttatggagtctagatcctgtcgatgacactcacttgaaaatcagcatattagtacatgagcatcctttcctatcggaagctttagaagtcttatttatgaaattaggaacagatgaattggaagaaataaacatttattag

SEQ ID NO: 104043 - DNA, 177 bp, Enterobacter aerogenes
atgatggaaaaagaacagaatcaatgttgccagcaacccctcctgcatcaggatgtatctcccactacatcccgggtcactttcagcacggataaaaaggtactaacggcagagcaatacagagactggcaatacattggcgcaaccctcagagaaaaaatgcagtcgaataactga

SEQ ID NO: 104044 - DNA, 648 bp, Enterobacter aerogenes
atgaataaaggaatcaccgggctggcctgggggctgagtctgctctgcactacggcgtcagccgctgacaatattaatactcccggggaccagcagtggctgaaacagcaggagaacctcagcgaacagctgcgccagcatccggataaacagctgcagcaggagcttgaggcgcaaatcagccgcaatcctctgcccaaatcagaccgccagtttatcgataatctggtcagccagcagaaagcggcgaatcaggaaaagccggcagaaggagcgctgtactttgtctccttctcgatacctgaagaggggctgaagcggatgctgcacgaaacccggcagtacggcattccggcgacactgcgtgggctcgtcaataacgacatgaggaccaccactgacgcggtgctgcagctggtgaaggatggcgtgaccgacggcgtgcagattgacccgacactatacacacagtacggcatccggagtgtgccgtctctggtggtacggtgtcaggccgggtatgacgtggtacgtggtaacattcacgtcaaacaggcgctggagaaagtggcacagaccggtgactgcgcacagctggcccggcaaatacttgatgcgcactcgaatgccgccgggagccagccatga

SEQ ID NO: 104045 - DNA, 573 bp, Enterobacter aerogenes
atgataaaacatatccgtattttgcccggcggactgatggtgctggccgccgttttgctctgcctgctgacggcctgtcgcgaccacagtcgcgacggcatgagcggcgctgacataaatgtctataaccacggcccggatgacattgtttcggtgcaggtaaacggttacgggggccccagggctaatccctacggcggcggcggcggcttctgttgcgtgatggtgccagatgtctggcggccgggactgacggcaaaaatcacctggacttccgatcctaatgcctggatgaaatcgagtgagatgccggacgactatgaaactcactatcagaaacatgggccgattactgtccctatcgaacgttgggagaaggggcaggcctgcggatttgatgtgcatattttcccctgcgataaagtgcggatagtgcgttcctgcatcccgccgggacagccgggatatccggttccccagtcgccgccagactggaagcaaagagctcagaaaatacttatccaacatatcaaggaggaagttgtatgtccgacgccgcagactccacgttaa

SEQ ID NO: 104046 - DNA, 426 bp, Enterobacter aerogenes
atgtatcatgcccgtcaaaccatgctgaatgtagaggagtccgaccgtctctcgttcctgccggatctgtttggtaacgattttctggccggagagatgcaggtctatgcgctcgctgagaaacacatcaccgattactgcggaggcttctggcatttcatccgtattccggagggcggcggctacatgatgcctgacggtgaccgtttccatctgactaacccggataactggtttgatcggtccgtcagcgcggatgcggccggagttatcattacggcgctggcgatcaaccgccgtatctggctgcaccatgaacgcggtgatgctgccctgacacgccacctgatgctgcgggaatcgcagctgtggaatttcattgactctcatgacgaatgcgctgctatttacgcggctctggactga

SEQ ID NO: 104047 - DNA, 351 bp, Enterobacter aerogenes
atgatctccctcccgtctggcacccgtatctggctggtcgccggcgccaccgacatgcgtaaatccttcaacggtctgggcgagcagatacagcacgtactggatgagaaccccttctccggccacctgttcatcttccgtggccgccggggtgataccgtcaaaattctctgggcagatgcggatggactgtgcctcttcaccaaacgccttgaggaagggcagttcatctggcccgccgtgcgcgacggcaaggtggcaattagtcgctcgcaactggccatgctcctcgataagctggactggcgtcagcccaaaacaccccgtcttaactcactgacaatgttgtaa

SEQ ID NO: 104048 - DNA, 408 bp, Enterobacter aerogenes
atgtcagattctcttcgtccccgcagggttcgtgcgtcttactccatggactttaaactggaacttgtcgaaaaatcttatcagcctggagcctgcgtggcccaactggccagagaacacgggattaatgacaatctgttgtttacatggcgccagcgctacagccaccttttgcccgatgaaatacaacgttcagtcagtaaacctgatgctgtcatccctgttgtggtatctgacatgtccctgtcacatcatgcagaaccacactatgaaccatccggttccgcttacggtgaggtgatgacctgcgaagtggctgtcgggagcgccagtctgcgcctgacagggaacttatctcccgctatcctgaaaacactgcttcgcgaactgaccgggaggggacgatga

SEQ ID NO: 104049 - DNA, 2091 bp, Enterobacter aerogenes
  misc_feature (371)..(419): n is a, c, g, or t
atgagaacaatcaaaagtgaactatcaactgatatagtttaccatgaagaagaacaatataccgagaagcaactaatagagacttcttattttgctgctcgtgattatatcattcacgaaacaggtatatataaattagcaaagagcaatccagctaaagacaaaaaagctaattactactggattaaaattacagactattatatttatcctgttcagattctatccacagtggatttagaaggcgataacaatgatgctaacaaagatattaatagcatgtatgttaatgtagcttttaaaaacatccgtaatgaaaagaaaattctttctattccactcgaccaattttctgatctcaaatcatctannnnnnnnnnnnnnnnnnnnnnnnnnnnnnnnnnnnnnnnnnnnnnnnnccttgctactgctcagagtccttataaacgtttggatggtaaaatcattgatgatgaaaaccagctcattgattgtttacctgcttacacaaagcgaggctggattgttgatagcctgatacacataagagaaagccatccacaattcgtaggtgtgtccaagaccagaactaaacgtgttggtaatgcttctatacagatcaccgtattccaagaactgattaagtcctcacgccttgcaagcatatttatatctgttgcttttgcttcctatacaaaggggctgatacgtaaaacagccaacttctcacctatctacaacattttcggtgagaagggtaaagggaagtctacattagaggccatgatagccagtattgagggagcgcctaaccgtgagtatggtcttatcagagacagtaagaccacgttccccggactcgaagaactcttggcatcttacaccaatggctttttcgtcattgatgagattgatgatatgttccgtggtagcgccagtgatgcgatctctaagctcatgactattgctaacaatggtgggcgttccaagtatgataaagatacagaagtttcagaaggtaaaatgtggaacagtatctttttcactaccagtaataaatccctttatgaactaacaagaggggatatgaagcaaagcgccattgactcacgtatctttgagtttgacgtagaagatccagagataaacatctttggtattaacttagaagaagggcgtggtgatgttgttgaatggtggctaaaccagcttgaccagaattttggtcatttatacccccttattattgattatatcgttaagcatgtagatgagttgagaactaatatttatgcttatgagggtgagttaataaatgaccctaactataaaatcattcatgatgaaagaagaaccattcagacaatagcactttcaaaaattggtgctgatattgtgggagctattcttggtgaagaatatggcatgatttgccatgaagctattgatatacacaaatcaagattctcaaataaggacattcctcaatttgatgtaaatgagaaacattgggataatatggacattctcaaactcatgatcaacgccaataaagcttcttttgtttgggaaacttacgcttattctgatgatgattcctctaacagagtagcggctcaaaaatcagaagcgaagcgttattctgatatggctcagtcaaaaggtaatgttttaggtattattcatttgaatagccctatggaaacaccaaatgattttgatggttatgttattttaaatacgatgggtgatgaacacctaagacgttcattcaaactagaaattacagagcttgtagcttctgctaagaaacttgaactctatgatactaagcgagtcaggggagcaaaacaattgcttcttggttcaacatctacccgcgaaaaaacatttattcttaagaacagacctgttgtgattgaaacagaaagcgaagaggccaaaaatgcgcttcttgacgaagcttttattaacaactctattgatagtaaagctgatcttgaggaaatcattaagtatgcgcacagcaatgttgatacagtagtagatggagaaccattagagttagacgatgattttgtgcctttttga

SEQ ID NO: 104050 - DNA, 876 bp, Enterobacter aerogenes
atgagtattagtgtttttttaagccataatcacaatgacaaaccatttgtcagaaaactagcacgagaccttgaaaatcatggtgttcgttattggcttgacgaagcagaaatgaaaattggcgactctctgattcaaaaaatcagggagggaattgatggtgttgattactttgctgttgttctatcacctgactcaattaatgcaccttgggtagtaaatgaacttgatgtagcaatgaattatcaaataagcggtaaaaaaataaaagttttacctattatgctgaaagaatgtgagcctccgggttttctaactgggaaactgtatgcagattttagaaatgaagataactatgttgaggcgtttaaaaagttgattcaaagcataggggtggtttttaataaaaacatcatgagcgacaagaacacatctgataatcttgggaccgctttagataaagcatctcatgcaaatatccctatgatgtgtaaaccatttcatagaccgtttcaatacatgggaatgcaagttccacaagcagaaaaaatctttgaatgtaaaggcaatgaagttggaagcattattattgaagacgatgattgtcgtatgtatcttgaagcagaaggtaatttcattagttatatagaagttgatttcaaaaaaaccgccccacattatcaaaacaaagagttcgattcagaaattttccttggcgcgctgagcataggcttatcagaactagatctagtcggcaagaaaacacatagtcatgcatattatgatcatcgacggaaattaaaaataactgtaagttgtttatacgatgaagccccaataaccgtatcctttagttctaaatattacggaatgtaa

SEQ ID NO: 104051 - DNA, 519 bp, Enterobacter aerogenes
atgagtattaccattagaggtgaagatgcaacatgtttatttgaaatgttatctaatcctaaagtgatttgtatcgagggacatacaggctccgggaaaacaacggctggaaagaaaatagcagaaaagtttggagctaaatttttcgatacagatagctatataattacaggtccggcttcagatgttattaaaccatatgaagatatggtagacatcgcaaagctatcaaaagaactaaatgaggaaaaaggtaaaaagatcattgctggtatatgtcttcggaaaatattaagattagctaaaacatctgaacaaccaacatttatttacataaaatgtatatcaagaacatcatctcaatggatagaggaaaatatattagaggatcttagggagggagtcattggcatagacaacatccctgagcctcatgcaagtgattatcgatatattttggaaatgaatcctcagcataatgcagatattgttttcgaacgcttggaagaaaatagctaa

SEQ ID NO: 104052 - DNA, 573 bp, Enterobacter aerogenes; identical to SEQ ID NO: 104045

SEQ ID NO: 104053 - DNA, 972 bp, Enterobacter aerogenes
atgcccggtggccgatggcaggatatgcggtacgccaaccgcggagaccgtatccagcaaccccataaactcgatactgatggggatgcccagcagggtcgggccgcctggcaccccggtccccgccggcagcatatttgtcgcattgagcggcatttttgcatcatcaagcagcgactccagcccgcgggcgaaggcgcgggcggtggcggccccccggcagtagccgtagacaaagagcttgattttggcgatgcgccgctgcgagcgctggatatgcagccgcgttggctgccgcggccactgattgaccacgcaccccagatagtcgtcgcagaatttgtcaagcgcgcttttacggttgaacttctgggtcagccgcgagaagggccagacggtggccatctgtggccgaaaggtatccagttcgctgtcttcgatcctttcctttttcaccgcatagcaaatgctgctgtaggttttaagcagcgcctgattgatacggtcctcaccgccgttggcaaacagctcgccgtccagcgagtagtgctcttcgccaatctccggaaagcgcgccccacagccggggaagtagtaactgaagtagccgtcgttttccgcagtttcatcctgctctttccagtttgccgcatggtagaggcggccaatattggtcagcggcggattgcgcgagccgtatatctcatcagccccttcttcattacagcaggtaccgtcaaagaacaggctgatatgcaggctggcggggcagcccggttccgtttttttgtccgattgatgttcagactccccgacatatccttccagatactgcctggcatagttgccttcggtctgcgttctgctcgccggcaggcggccgcgctcgttgtattcggttttctgctgcgtggagtcatccgctggcgctttcccctttttatcatccggcccgggaaagtgtggcggtaa

SEQ ID NO: 104054 - DNA, 564 bp, Enterobacter aerogenes
gtgatagattttagccgtgccgccctccatcatggctttaatcagatcctggtcagtggtgcgtgccggcaacggggtgatctcactgttctcaccaaaaatcagcgtcccggtcagggtcatcacaaactctttcagctccttattgccgtcaaagagccggtttttggacagggcatcccacataatgttgatgttcttcattacacgctccttgtccttatcgctggctttatcctgcactttgtccatctgcccccccaccgaacagccctgacgggaagccgcccagtccgcaaaaatgttgctctcaccggcgatgtcctggcagaccttttgctgcgccacctggttgcgggggaacagaccgcccacaatgccctgagcggcctggcaggagctgaggttcatgctgttgatgtcgctggccatcttctgcaggaagtctttggcagttttgatctccggaaccgtggtctgcagggcaaggtcaaagaagtagcccgcggcgttggacataatttgtttgccgaagcgctgcagctgctcgctgttgataaatga

SEQ ID NO: 104055 - DNA, 558 bp, Enterobacter aerogenes
gtgaaaagcatcctgaagaacatcgctaagacgccgctggcggcgctggctctttcccttgctctggccggactggcacaggcgggaacgttcgatgaggtgaagtcgctctgggatccgcggggaatctccggtactgaaacggcttccccgcagagcgacactccccaggtggagagcggggcatctcagccacgctggttacgactcagcaacggaaagcaggtggacctgcgcgactggaaagtggtgctgttcatgcagggacactgtccatactgtcataaatttgacccggtgctgaagcagctggccggacagtatggcttctccgtgttctcttacaccattgacggacagggtgatgacgcgtttcctgaagcgctgccggcgcctcctgacgtgatgcagacctttttccccaatatcccggtggccaccccgaccacgtttctggtcaacgtgaacacgctggcagcgtacccgatcctgcagggcgccacggatgcacagggctttatggccagagtggatacggtatttcagatgatgcactga

SEQ ID NO: 104056 - DNA, 312 bp, Enterobacter aerogenes
atggctctaatcagatcctggtcagtggtgcgtgccggcagcggcgtgatttcactgttctccccgaaaatcagcgtaccggtgagcgtcatgatgaattccttcagctccttattgccgtcgaagagccggttcttcgataaggcattccacatgatgttgatgtttttcatcacacgttctttgtctttatcgctggccttatcctggacgctgtccatcttgccgcccaccgtacaaccctggcgcgacgcggcccagtccgaaaagatattgctttcaccggcaatgtcctggcagaccttttgttga

SEQ ID NO: 104057 - DNA, 480 bp, Enterobacter aerogenes
gtggacagcagcctcaccaccattctgaatccggaagccatcctgtttgccaaccccatcgcacagggggcgtgcgcggctgacgctatggccagcgcgtttcatatgccactcgatattctgttctggtgtgccggctctcagggttcgatgtacccgtttagcggctgggtaagcaacgagtccagtccgctgcagtcctcgttacttgtcagcgagcgcatggcgtacaagcttcaccggcagggacaaattatggagagcatcgggaaggacaaggcggtctgctatgagtatccgtccccgatcatccccaaagagcgctggcgctatcagatggtgaacatgtacccggacagcggccaatgccatcccgtggggcgcagcgtgatgcgctgggaggccggtaaaaatccacccaacacccgtaagaactatggctatctgatgtggcgtaaacgcaattgtgtctttctctga

SEQ ID NO: 104058 - DNA, 540 bp, Enterobacter aerogenes
atgattaaaacattaaacagaacaaaaggattctcattattagaaatgttattagtatttgggattatatcagcgttgatagtgggtgttttcatgatttacccaaaaatcagcgcaggacaaaaaatagataatgacataaagattttaggaactcttaacgcagggattaaaaacctatacgcaggatcagcaaactacaccgggctttcagtagatgctgttatcaaggctaagttagtgccggaagacttagtagacgaaggccagatatgggatagctggaacgctaacgttctcatagaaccctattatgacggtagcttttacatagggtttgagaacgtgtctgtagatgcctgtgccaagttcgtcactcaggctggttcaagcttctttaagatagttgtagcgtctacagaagtgaagaacactgataacggtatggatctcaacatggcaacacttacagcggcctgtatcaacaatgatgatggttatggcggcagacccgtcacaatttacttttacgacaaataa

SEQ ID NO: 104059 - DNA, 339 bp, Enterobacter aerogenes
atgctggactggaacaactatcgctcagagttaatgcaacgtttaggcgagttgggcaaactgacccccgagaccatgaaaggcgtggttgccctgggcaacgcaggtaacaaaactgaccttttgggcgcaaaagtgcgtgaactcattgccctggcgtgcgcagtcacaacccgctgcgacggctgtattgcttttcacgccgacgccgctgtgaaagccggtgcaaccgacgctgaaattgctgaagcgctgggcgtggcgattaacctcaacgctggcgcggcggtcattcattcagcccgcactctggatgccgtcggtcaggcacgcggttaa

SEQ ID NO: 104060 - DNA, 582 bp, Enterobacter aerogenes
atgacaaccatgacacgggaacggctgctcagcgaagcagaacacctgatgcgcgaaaaagggtattcagtattcagctatgctgatttatcaaaaatagtgggtatcaccaaggccagtattcatcaccatttcccgaccaaagatattctgggtgagcaggtggtaatacaggcgttctctgatacacaacgcgtatttgagcagatagaggcgactgagaaaagcgcggagagaagaattgcggcttacatcgatatcttcgcgcaaagccataaagcttcgctactgccactgtgttgtgcgttgtcagcagagaccgccaatctgcctcaggcaattactgtacagacatcactttatttcgatatgcaaatcgagtggctcacaaaagtcgtcagggcgggcatggagtcaggtgagttttcatcccatgccgaaccatcagatattgctttgatgatcattaatgtctgtgaaggctcaagcgtagtggcgcatgcaacggccagacccgaagtcttcgccaacagccttaagtatataaaactgcttcttaatacccctcattcaggagaatga

SEQ ID NO: 104061 - DNA, 369 bp, Enterobacter aerogenes
gtgccttctaatatcggtgatgaacccgcaggtttactcggcaccgataccggcatgagcccgactgaatacatcatgcaggcgctggctggctgttataccgccacccttaccatgatggctgctgaaaaagggatcgacctggacggtatcgagctggatcttaatttcgatatcaacctcaacggcttccttgggctggacagcaacgtgcgtaaaggtgcgaaatctattcgcgtcgatgttcaccttacgagcaagaccgccagtcgcgaggagttagaagcgctggtcagcgaaatgcaaaagaattcgccaatccacgatactctggctaatccggttgaaatgattacacgcctggcgtga

SEQ ID NO: 104062 - DNA, 630 bp, Enterobacter aerogenes
atgttgactatcagtgtgtggaatcgtaagggtggtgttgggaaaacaaattcagccatccagatagctggatggtttgcggctcagggacgtaaaacaagtcttgtagatcttgaccctcaaggcggttcacttatctttgccggatatgccaaacagaacggtaaagagcttccttttcacgttggccgtaaacctgcagccgattctgaatacatcatttttgaccacagccccggtgtgaatagcggtggtgctttgggtagctttgtgatcgtgccgactatcctcgatgcttccagcttttcaattacgctcaaaagcattgatgagctgaagaacgaaatgaagaagccttatctgttgcttcctaaccgtgttgagatccagaacaaagagcaaggcgaactgttagagcgtatccaagagaaagcacgcgctcatggctatgaacaacctttcatcagaaaacgtgttgcctaccctcgcgcttacggcatgggtataacagtattcgaaccaaaatcaggtttgccatcagctaacgatgctcaggccgagttcgaacatctgttatctgttatgggtagcaagattaagcaacttgcatccggtggtagtgaagcctga

SEQ ID NO: 104063 - DNA, 591 bp, Enterobacter aerogenes
atgataaagcatatccgtattttacccggcgggctggcggtgctggtcgccgtttttctctgcctgctgacggcctgccgcgatcacagtcgcgacggaatgagcgccgccgacataacgttgttaaaccacggcccggatgccatcgtttcggtgcaggtgaatggctacggcgggccaagggccaattcctacggcggcggcggcggcttctgctgtgtgatggtgcccaacgactggcggccggggctgacggcaaaaatcacctggacctccgatcctaactcctggatgaggctaagcgatatgcctgacaactacgcgcaatactatcagcaccatgggccgattaccgtgccgattgaacgctgggagaaggggcaggcctgcggttttcatgtgcatattttcccctgcgataaggtgcggatagtgcgttcctgtgtgctcccgggggggccggttcagccaggtcaacctgaatatccagtccctcagtctccacctgactggagggaaagggcacacaaaatacttatcgaacatatcaaggaggaagttgtatgtccgacaccgcagattccacgctga

SEQ ID NO: 104064 - DNA, 621 bp, Enterobacter aerogenes
atgtctaatgaattaagaaagcaatttgaaactgtactagctgattgtttcaagactcgtcttctccttggcccgaaaataaaagttttgaaaaacagtatatgtattaaaaaaactaattctattaatggtcaaggagagttggcttgggggtatttaaataatgcagatggttattttttatccctttcagttgagtcatttgaattaaaagatttttttaatgaaataactccaccctataagtcaaatttattgacagataagacgttgtttatgaatacgttaatggaaaaattcaagatctttgcaaccaaaattggtggtacagttgatcttccaaaaaatgaagaagaacggagtaaagcttgtgaatggatctatactaaggtaaaagatatttattttccaagagtcatgaatctaatagagcttaaacctgaaaccattaatgatattattgcacatcctgagtattatgcttatcctttcctgactattttatacataattaagaaaaacaatattccattgtcagaactcaatatggagtctattcttagtaagaaagttttaggtaataggtctttcgataaaaatctattagatacttatctataa

SEQ ID NO: 104065 - DNA, 204 bp, Enterobacter aerogenes
atgttttgcttcaaatacatgaatctttccatgtccatcaacggctacaaaatcagcacgaatacgcttgccattaactttcattgtgagttcctcagcaattattgtatagccattttgctgaagatcatgagcggctttatttctacctcgatttccactgaagtgacatttcgcaagccccagcggatcgatccagcttaa

SEQ ID NO: 104066 - DNA, 405 bp, Enterobacter aerogenes
gtgaaaacgtactatatacttggacataacgttgcatggcttaacggtatatgcctgattctttttgttattggtgtggtcggtgcgctggcaatggttgccatccctgaaaaattcaatcttggagttaacagaggtgatacattcatatactgtgcacttatagcggtggttgggttttgcgggatgttcgttatctccattcactcattttcgatggatgaacttgaagcaggtagacactggaaaaacgactgcaagacacttgaagtaaacataccgacaggcgcttttaccagccctgttaataaactggactgtgatggcatcatcattaatgtgccaggtgagcggtattatgcgtatatccatcagtgggaattataccaggcgaataaaaaatga

SEQ ID NO: 104067 - DNA, 456 bp, Enterobacter aerogenes
atggatattagagatgaaccgcctgcagacgacgacaaccgccttgttgatggttttgctatgttctaccagaaccgggcgcaaatgttcgaatcttccaaccatatctttgatatagaaaaggtagtagaagcagatcttgaaaaggcggcagaagccaaccctaatctaacgcttaattactctttcgctgattccaagcaaaacccgcttgttcaggtgagtgatgttgtggctggctttatgcagcactattttgattacctgaatagcaacagttatgaacagattaaaaatgacagaaacagccttaacgacaaacaaagattaaatatggagtttttacggctcctgataaacaaatctcatgataacaatccaacgttattacattatgttatgtcagcgttagaacatgagaagcataaagcattcacttacccggacgaaccataa

SEQ ID NO: 104068 - DNA, 693 bp, Enterobacter aerogenes
atgtgtatgaatcatttcccgcagcaaaacaaaagctatcaattctattacgatgaatctaataacgttcgtaaactatatctatccaaacaaattgatggttataacattgaccatgatccagacaagcacaacagcgtaaacttcgtgttagccggtgttgctcatactggttcctcatcgagtgccgactttgatgatttacgccagcgcatacagctacaggccaacgccaaagagttcaagctgaagcacttagccaaaggcgacttcctgactatgctcacgtctaagaagctcacagcgttctttgagtggcttctctatggtgatctatacctacactacttccacctgaatatggagtactggggatacgtggacatcattgatgattgtatcctgttcggacgtgagaagggcttcatcccggaaatgagtgatgaacagctctatggctacatgttggcaaacaaggacgctctacacacctacgttaaagctaacaaggttcagttcatccagttcctcaagtcctatgacttcccatacatcgaggggcgggagaatgatttcatacaagggctatcaagccagatctccactcattgcgtaaacctctatacagctaccaataaagatgatttccagctccggttagctcatggcctcctgcagctcctgatgctctga

SEQ ID NO: 104069 - DNA, 162 bp, Enterobacter aerogenes
atgccatacagaaccatcaaggccgatcctgtttgctacaatatgaatatggtcttgatctgtatctttatgacgcacacaaatatattgatgtttttctatatcaacattcatttctttcaaatagtcttttgctatctcctgccatttttcatctgttaa

SEQ ID NO: 104070 - DNA, 501 bp, Enterobacter aerogenes
atgacaaaaatagagatgatgaactcgttagaagattcgcagcaagaaaaacagatgacgaaaatagtattagacgatcatttgttgaaccaaatatcaatgacgatagaaccattatcagaaacgatgatgatattatcggagtcagtcagcacagcattaaaccagacacaacagacactaataagagtgaacaactcattagaggcaacaacaatcgctttaaactcagcgaaaaatacaatagaccaacaagcccaaaagttagaagaacaacacaaaaagctgcacaagtactcaacagagttaaaaaacaataccataaagaaccaatcaaaacttatactaaaagtagcttcaatagtaggggttctaaacttatcagcggttctattggtaggatacttgatcatgcagaaacagcaaacgcagccacaaataaatttaggctcaagagcggtagccgtttcaatagtagagcaactaagctcgaagagatga

SEQ ID NO: 104071 - DNA, 1155 bp, Enterobacter aerogenes
atgtgttcaggcggtcagaacacgcattgtacgaaatatacctatgacgggaaggggaagattcatcagtcgtttggtgtggacaaagcggttaatgcaggccagaacttttcagtaagcaaaacatcacggaccgtatcatcggccagccagaaacccgtacaggtcacggtcaccctggtgatggaagaaaccgaaaccgtctatgcacctgaagtcgtctgggttgaaagctgtccgttcagtaaggatgaaggaaaaaaaacgggcgaggaatgtatcagcccgggaggaacgcgaaccatcaccctcggaggcagggattactcgttcacggaagcatgctggaaatataaggatacctggctcacgcaaccggcggacaacggctcctgtgaaagcctgatgaaaaatacggcttgtactctgtcatcccgccagtgcgccttctccagcgaggaaggcacgtgcctgcatgaatatgcaacgtattcctgcgaaaccaggacgagtggcaagcaaatgatctgcggcggtgatgtcttctgccttgatggtgaatgtgacaaagccacgtccgggaagagcaacgactttgggcaggcggtgtctgagttggcggcactggctaccgcggggaaggacgtcgcggcactgaacggggtggatgtccgggccttcaccggaaaagcgaagttctgtaagaagtttgctgccggcttcagtaactgctgcaaagacagcggctggggccaggatgtggggctggcacgctgcagcagcgaggaaaaggcgctggcaaaagcgaaaaaagacaagctgacggtcagtatcggggaattctgctctaaaaaggttctggggatttgcctggagaaaaaaaggagctattgccagttcgactcaaaactggcgcagatcgttcagcagcagggaagaaatggtcagttgcatatcggttttggcggcgccagcagtcctgactgtcgggggattacggttgaagagctccagaggatcgactttaacatgcttgatttcaccaactttatggacgacctgatgaaaaatcaaaaaataccggaaaacgatgttctcaccaataagaccaaagaacgaattaaggaaatcatgagtcagcaatccgcgcaataa

SEQ ID NO: 104072 - DNA, 585 bp, Enterobacter aerogenes
ttgttctatgaaggtgcgttagaaaatcagcaaaaaacgtttgacaatcttttagctgataaagaagaagaaataaaacagcttaaaactactcatggtaatgagcttaaagaacttaacgctattattgttagcaaagataccaatattgcagatcttgaaagaaaaaatacagaactggaaaataatcttgctacactgaaaacagagaaagataaacagcgtaaagatttcgatgatttaattgaaaaacttaaacaaggtcatttggaagctatcgaagcgctcaaagcttcaaataaatcattaaccgatgaaataactaaacaagttgctgatgtaagtaaactgaaaaaagagaaggagcaacttcaaactgaaaacaacggtttgaatgaacaactcaaatctgttcaaaaagaaattgaagaacttaaatccgacaaagcgaaattagaagttgataataaagacctgaatgacgctctaaaggtttatgaagatgataataaacaacgcttagaacaagctaaagataacaagaaagataataatcctgaccctaagaaacctaaaaacaaataa

SEQ ID NO: 104073 - DNA, 561 bp, Enterobacter aerogenes
gtgaaaaaaatgaaccgtacgctccgcagatgttgtctgtccgggcttatcagcctgtctttgtttgcaccttttccggttgtgtatgccgacagcatcgagacgggatattcgccggaaggaacggctctgcagctggtcctgaagactattaattctgcacagcaggaaatccggctgatgggctattcctttacctcacccgaagtcgccggcgcgcttgtcagggcaaagcggcgtggcgtcgatgtgaaagtggttctggactggaaagccaataccggcaagcaaaaccaggcgagtctggcggccatgaatcttctggtcaatgccggcatcccggttcgcacagtgtcgcagtacaaaattatgcatgacaaagtcatcattgctgatggccgcaatattgaagtcgggtcttttaactacacccgctccgccgatcgggtcaattcagagaacgtgctagtcgtgtgggatgttccagtcgttgctcaacgctatctgcagcactggtcgacccgctggtcgcagggaacggactggaaacgggcttattaa

SEQ ID NO: 104074 - DNA, 612 bp, Enterobacter aerogenes
gtggcaaagcaaaagttcaaaatcaccaactggcccacctacaataaagccctcatcaaccgtggctccataactttctggctggatgatgaagctattcaggcctggtatgagtcagcaacaccttcttcacgaggcagacctcagcgctattctgaccttgccatcacgactgtgctggtcattaaacgcgtattcaggctgaccctgcgcgctgcgcagggctttattgattccattttttctctgatgaacgttccgctacgctgcccggattacagctgtgtcagcaggcgggcaaagtcggttaatgtcagtttcaaaacgcccacccggggtgaaatcgcacacctggtaattgattccaccgggctgaaggtcttcggtgaaggcgagtggaaagtcaaaaagcatggccaggaacgccgccgtatctggcgtaagctgcatctcgccgttgacagtaaaacacatgaaatcatctgcgctgacctgtcgctgaacaacgttacggactcagaggccttccccgggtcttatccggcagactcacagaaaaatcagggcagcatcggcagacggcgcttacgacacccggctctgtcacgatga

SEQ ID NO: 104075 - DNA, 192 bp, Enterobacter aerogenes
atggattcgcatataacgatgatcgcaagtttacacctgaacagctttctgcacttgcaggtattgatcttgatgaagctacccgtatcctcgattttactgtcaaaggttcaagtagtcatagtgcatggcttacattcatttatcctcgtctttatattgctcgcgaactcctacgcgaagatggtgtga

SEQ ID NO: 104076 - DNA, 123 bp, Enterobacter aerogenes
atggtgctttactttatgatccagtatcaaagacatttattactgctgaaaacagtaaagaacttattgataaatacatcggctatcgtaataccgaaacaggagagtatattgatggtttga

SEQ ID NO: 104077 - DNA, 282 bp, Enterobacter aerogenes
atgacctcgttatgcgatattgaaacaatatcaaatatcgtctcaatggtaaacttttgcttttgttacgagggtgaatacgagagtcttacattggtgtgctactccagaaatgacaaaggggcttatgccccttgtttcgccattttgataaaatcttttatcactttaaacattagccagttcagatttaagggatttcaactcgttttcaattttagcaatcatattcataagtgtattaaccttgtcttctttactgtcgtcttcaacatgctctaa

SEQ ID NO: 104078 - DNA, 219 bp, Enterobacter aerogenes
atggactatttacgctttaaacatatcagacttgttcttacaacaacactaaaccctaaagagtttaaagagctgattggacataagcaggttaaaacatttgttttagagcatgttgaagacgacagtaaagaagacaaggttaatacacttatgaatatgattgctaaaattgaaaacgagttgaaatcccttaaatctgaactggctaatgtttaa

SEQ ID NO: 104079 - DNA, 210 bp, Enterobacter aerogenes
atgaaaaaggctaagtttgttttcaatatcgcaggaatgatgatttttaatatatgtgctgttattggttttctaagcatgttgaaggttgaaaacactcttagctactggatagcttctgttgtggttggactattaacgatagtcgcatacaggaatgaaatatcaaatgagtttggaactaatcaaaatgtaagaggtaaattatga

SEQ ID NO: 104080 - DNA, 330 bp, Enterobacter aerogenes
gtgaagctaaatgatgagaatggcgatatacctttaatggtagttccttcttacaataatgatggggattatttaaatcatcatttcgcaactttagatactactcaatctttagataaggatcttggactttcagatttatcacaagactttaatgaagaaattaccttagcgggtgaaaatcttggttcaggtaaagtaaaaggtttggagtttgcttcctacggtcaacatatggatttgggtgtatattacatggataaagtaatcgaaagtatcgaagaaaaacaatcttacgaaaaggatattaagaaagggttaaaaatataa

SEQ ID NO: 104081 - DNA, 273 bp, Enterobacter aerogenes
atgtctaaactcgccatagctaaaggctggaagtctataacgtttgaaggtagtgatgtgttcttgggtgtagcttatgagaaagcaacccgtttagggcttgtcgtagagcctcagaacgctgaacaagaagaactgttcaaaggtatccataaagccaaaggtcttgatgagatcatgccattcagcggtatgaagagagaagaggttaacaataaagagattgatgttccagaggtaagagccacacaaggccagaggatgagaatgtga

SEQ ID NO: 104082 - DNA, 270 bp, Enterobacter aerogenes
atggaattctcaagtcaaatgagaaataccaaaattagtctggaaaacaaacaagatagagaacgaagtgctatacgaacccgtaatctttatatgtcacagtatctggagttaggttctcgctcgatctccgatctgaccagcgctgaatctgagatccaccaaactaagacagatattattaatagtcgttatacagtatcgaaccttgccctggaaagtctgtactacgccggcaaactgataaatttaatggaaatgaaagggtaa

SEQ ID NO: 104083 - DNA, 219 bp, Enterobacter aerogenes
atgaaaatagaacacacaacagtaatgatagataaatccttagatgatgcaataatggatttgaaaaggagagagaaaataaaaagaacaaacgataattttatagcaatgctcaaaggtgaaaaatatattgtatcttttgaagcggcacaagaagcagactttgaaatggctgaagctataatgagttattttaaaagtccaacaaaaagcaaataa

SEQ ID NO: 104084 - DNA, 375 bp, Enterobacter aerogenes
atgaatattgttccacttgatgatcgattgcttatcgaggcgaagatcttaccacgcgatattgcatttattcatccagggcagcgtgcaatcgttaaaattaccgcatatgactactcaatttacggcggcctggacggtgaggtggtgacgatttctcctgataccatatccgatcctcaaaaacctgatgtcgttttttatcgtgtctatatcagaacgactaaggaccatttacaaactatggataataaacagcattttatttctccagggatggtggccagtgttgatatcaagaccggtaataaaacgattctacaatatctgattaaaccatttaacaaggttggcgaagcattaagggaaagatag

SEQ ID NO: 104085 - DNA, 189 bp, Enterobacter aerogenes
atgaataacatacagcatttatcaaaactcatcactgaaatcaaaatccctttatcaccttcgaatgctaacaatctaataaaaggtattgagctatttactggcttttgcctttatcttgtttgcgatggattaaccaagaagaaggattcaacattcaaaataacatctgaaatatggacattataa

SEQ ID NO: 104086 - DNA, 318 bp, Enterobacter aerogenes
atgaccatcaacacttttcaggaatggattacagcccatgttaatcaatcgggcaacattcaaaagcttgttggttttaaaaagcactgtctgacctttcttgtttctgtggttgattttagcgccacagctaacaagataccttacaacatccatgttgggattgatgaaaacagccgtttcaccatcactgttctggtagttaacatcagcgccgttctctacaagtgccttagccacttctacattacgagcaacgaaaagcggagtgaaacctttgtagttcacaaagttaacatctgctccattactcactaa

SEQ ID NO: 104087 - DNA, 291 bp, Enterobacter aerogenes
atgaatgtagaaaacttaatgaatagtatgactatagaatataagctcgaaatactggcaaggtttttttattacatagaacaaaacaaagatataccatttaatgaaatcaatagtgatgagcgagatttgtgttattttgtagccaatagatacattacagagaataaagctgatgagcttattgaagcattaattattgaaaatgataacgactacataagagcaacagatgattacattatccagaggaataaagaatgcgaacagacagaaaaagaggacgtatag

SEQ ID NO: 104088 - DNA, 249 bp, Enterobacter aerogenes
gtggggagggcttgtgttgtatatgataatggtggatgtaattctctgattaaagatggctataatggctatatcgttgagcgtaaaaatgtcaaagaactcgccgccagaattaaaatgttgataagttctgatactgccaggaaagaaatgggtatcaatgcacgtgagatcattgttaatcattacacatcagaaatcgttattggcaaaacattgcaagtatatgaagaacttttccagcgctga

SEQ ID NO: 104089 - DNA, 324 bp, Enterobacter aerogenes
atgagtcgtattcaaacgccctattcccacatcatcgatgaatataataagatgatttcaaagaatataaaggcgatagactcattaagtcatagcagtaatatacgccagattgccgatgatacgtctttcaccctgagtacaggcgagattattattgttcttgagggcgttattgccgttgagatgcaggagcacaactttattctcgccccaggaaaagcgaaaacccaggcgaaaaagttgtttcaggtcggcaaaggcatcaaaggaatgttttttggtattgtcgaaagtggtgatgctgccaacttactgatttag

SEQ ID NO: 104090 - DNA, 1674 bp, Enterobacter aerogenes; identical to SEQ ID NO: 86907

SEQ ID NO: 104091 - DNA, 429 bp, Enterobacter aerogenes
gtggggtattgcgtggcgcctgccgccatcagcgccgagctgcgtaaggtgcaccagtatttgacgtttgccgtcaatacgcccgctcaattggcgctggcggatatgctgcgcgcgcagccggagcactaccgcgagctgcctgcgttttatcggcagcgtcgggatctgtttatcgatgcgctgcgtgatagccggctggagattttgccttgtgaagggacctacttcttgctggccgactatagcgcgatctctgaccttgatgacgtcagcttctgtcgctggctgaccactgaagtcggcgtggcggcgatcccgctgtcggtattctgtgccgatccgttcccgcataagctgattcgcctgtgcttcgccaagcagccggagaccctgcaggcggcagcagagcggctgcgtcgcctgtag

SEQ ID NO: 104092 - DNA, 564 bp, Enterobacter aerogenes
atgagcgaaaatctgacgcagcaatttgcgaactttgtccagaaacaggcgccacagaatgcggaagccattctgactgataccagttctccagaaattgccgcacaacgagaggccctggccagagattttgtaaaatctcaggtagagccaaaaattgatggggcatatcaggaggccagaggttctctcgggaatgatatgggcggtgtttctgctggaggcggtcgtgacggtgttgtttccgattacggtcagcattcgagcagtattgacaatatgactgcacaagctggcataaaacatgatgtaggcaatggcgtcgaagcgctagtatctgaaaatcgtcaaattaatcaggatgctcgacaaaaaataactacgcaggggcaagaggtacagaaacaacatacagatctgcaaaacaaccataatttagagggaaataaaattgataatgaatacaataggagaacgtatgaacagaaagctcttcctggtgcagatacaagagatgagctcttaaggaaagctcaggactacgagaagaatcataaaaaatag

SEQ ID NO: 104093 - DNA, 1344 bp, Enterobacter aerogenes
atgcccgtcgattttctgaccactgagcaggaactgaattatggtcgctatgttgcagaacccaatgacgtgcagctggcgcgctattttcatcttgatgagcgggatcttgccttcattaaccagcggcggggaaggcataaccggctgggaattgcgcttcagctcaccaccgcccgttttctgggcacctttctgacagacttaacccgggttctgccaggtgttcagcaatttgtcgcggtgcagcttaatattcgccgtccggaagtccttacccgctacgcagaacgggttaccaccctcagagagcatactgcgctgattaaggaatattacggttaccatgaatttggcgatttcccctggtctttccgcctgaagcgcctgctgtacacccgcgcatggctcagtaatgagcgacccggccttatgtttgattttgccaccgcgtggctgcttcagaataaggtcctgctgcccggagcaaccacacttgtacgtctcgtcagtgaaatacgcgaacgggcaaatcagcggctgtggaagaaactggccgcgttgccggacagctggcagaccgcccgcgtgacggagcttctggacattcctgaggggcagcgtacttcaccgctggagcaactgaaaaagggaccggtcaccgtcagcggcccggcatttaccgaagcgctggagcgatatatccggctgcgaaacctggaattttcccgactgaattttaccggtctgcctgctatacaactgcgtaatttggcccgttacgcaggcatggcgtcggtaaaatatatcgcgcgaatgccacagcagagaaaactggccgtactcacagcattcgttaaagcgcaggagactgcggcgctggatgaggccgttgatgtgctcgatatgctgatactggatatcactcgtgcggcgaagaaaacggggcagaaaaaacggctcaggacgcttaaagatcttgatcgtgctgcgctaatattggcgcgggcatgttcattgttgctggatgaacaggctgacgatgctgaactgagggagaccatattcaacagcataccgaaaagcaggctggcagaatccgtcagcaaggtaaatgagctggcccggcctcagaacaacaatttccatgacgaaatggtggagcagtacgggcgggtaaagcgctttcttccggcggtattgcgcgacctgcatttccaggcagcgccagccggagaacatacgttgtccgccattcatggggtccgcttggaaaacggaaaatatcctacgctaagcctatttttcgtacagattacttcatgggtctatggtgatagctaa

SEQ ID NO: 104094 - DNA, 354 bp, Enterobacter aerogenes
atgtccacaaacatatctcagtcctcggagaaccagaatttaacccagcagaagattgagcgccttcaactgagtgtccgtaagggatggacaccaccaccacgcatcagcgtccctcaatgggccgatgactaccggaagctggcgaaagaagctggcagcacctccgggaactgggaaacatcaacggttgaaattgcccgcggtcctatgctggccgcgacggaatcgggcgtccatattatcaccgtgatgtgctgtacccagttaatgaaaaccgcgctgctggaaaacctgtttggttatttcgcgcacctcgatccatgtccgattttgctcctgcaaccgaagtaa

SEQ ID NO: 104095 - DNA, 198 bp, Enterobacter aerogenes
atgacaaccatgacagtaaagagtgaatatgatatacttaatttttgtttgcttattggtttctcgacaataacatatatcagcatagccaacacaaacgagatgaccagacatattgcgtttgctttattcgactcgtggccaataataattgaggaaaaactcattagtggccaatgtaccaaatacaacggataa

SEQ ID NO: 104096 - DNA, 1533 bp, Enterobacter aerogenes
atggcacgccacaacagaaagctctcttttactacgccgatcgtagtggggtttgcggggattttgctcagttttttactgatcgcaatctttgttaccgcgacgcagaagaaaaactttcttgaagattatcaccatattaaccgcaactttacccataaccttgcggtgaactacaccgaatcgctgctgcgcgaaaatgactacattctggcgcgcgcgacgaaatactttgcccgcgacgatgcgctcaatagcgccgtaaatctcaatccgcaaaagggtctggacgatttgatgcgtctgcaggagctgatgccgacggtctcctccatttcgcttgccgatactcttggtcattatctgcgcgcccccgaagtgatggaaggcgatgagagccgcacgtttgatccaaaaacgcgcccctggtttattcgccaggcggaagccagtaccttcagcctctataccagtccctatctggattacttcacccaccaccctaccgttaccgtctaccggcctgtcatttcaccgcagggaaggctcaaaggtagtctggcatttcatatggatctgacctcaatgggctacgcgttacggcagattgtctcgccggtacagggcgagttttttgtcgtgcaacgcgacggcaaagtggttatccatcccgataccggcgcgctatttaaaacctacgttagcgcggaactgatggacaaaatgaccagcgcggaaggccaactttatgatgaggaacataaggcctggtactactactattcctttaccaaccctgactggttcgttattttccgcgtcaccgatgccacccttgatgacctgacgcgctatgaaaccgatattgtcgcttggggattcgccctcgccgccattgtcatcgtcctgttcgggctatatctgcgccacgcttcgcgtaccgtactgatgaacatcattaacgccattaagaccggcgacgtcaaacgcgcgccgcggctggaagccatgctcagcaaagcgatcgagagcaataaacagcgtgagctcacctatgtccgccaggccaccatcgatgcgctaaccggctgcaaaaatcgccgcgccttcgacagcgatatcgccgccctgatgaacgatcaccagcctttcgccctcgcgttggtcgatatcgacaactttaaatcaattaatgatacctggggccacctcaatggcgacatcgtgctgcgcaacgtcgcgcgtgaagggatacagatcctgcagccgcaggagatctcgctttaccgctacggcggcgaagagtttgccgttatcttccctgccgaacatatcgacaacgcgctcaccattctggagagctggcgccttaacgttgccagccgaacctggcgcgaagaaggattaaccgtcacctttagcgccggcctcggggaatggaatatggagccgctggaaaaactggtcgttagcgtggatgaagcgttgtataaggccaaacagcagggcaagaatcgaatcgttcgcgcctga

SEQ ID NO: 104097 - DNA, 894 bp, Enterobacter aerogenes
atgaaacgaccggactacagaacattacaagcgctggatgcggtgattagggaacgtgggtttgagcgcgccgcgcagaagctatgcattacacagtccgccgtctcacagcgtatcaaacagctggaaaacatgtttggccaaccgctgctggtgcgtaccgtaccgccgcgcccgaccgagcaggggcaaaaactgttggctctgctgcgccaggttgagctgctggaagaagagtggcttggcgatgagcagaccggctccacgccgctgctgctgtcgttggcggtcaacgccgacagtctggcgacctggctgctgccggcgctggccaacgtgttatccgactcccctatccgcctcaatctgcaggttgaagatgaaacccgcacccaggagcgcttgcgccgtggggaagtggtcggcgcggtgagtattcagccgcaggcgctgccaagctgcctggtcgatcaactcggcgcgctcgattacctgttcgtcgcctcgaaggagtttgcgcaacgctacttccctaacggggtaacgcgttctgcgctgctgaaagcgccggtggtcgccttcgatcatctcgacgatatgcatcaggcgttcctgcagcaaaacttcgacctgccgccgggcagcgtgccctgccatatcgtcaactcgtcggaggccttcgtgcagctggcgcgccagggcaccacctgctgtatgatcccgcatctgcagatcgagaaagagctgaagagcggcgagcttatcgacctgacgccggggctgttccagcgccggatgctttactggcaccgttttgcgccggaaagccgcatgatgcgccgggtgaccgatgcgcttattgattacggccacaaggtgttgcgccaggattaa

SEQ ID NO: 104098 - DNA, 1287 bp, Enterobacter aerogenes
atgaaaggtgtactggactccttgatgttcctagtcaaaaagcgggagggcgatttgactcttggtctgctgggagatcatcgacaacgaatttatatggatggtcatgccgatcttccaagcattgttcctgaaaattgggcaacgcctgagttacaaatgaatcatcgtagccaacgacgtattgtcactctgatcaataaaatctgggaaactgaactggaagggaggacgcaaccagcaaagggttcagcacaacatccccgaacagaaaaggctggcggaacggttcggctcttcttgggggatacattgcaaagtccagacgataaggtgctcagcgaacgctggtgtgctgaacagatgttcgaagttagtggctcagtagcctggaatcaagaacaatataagctgcttgcgttggagcataagctcgttgccactcgtggttcgtttcttgatgtgtatgaggcaatgtttctgttagatccccacaccgcagcgccatctggcagtggggacaacaaggggccttcaacagtacaaattttgcttaatgagcttgcgcatttagaagcctgcgtcagtaatgaaggaattgtgaatgagttcaaggcaaccgaggttttacgacgttatggtgctttagacaatatacctgaggattcagaagcaagagctgaacgtactgatgaaatgctcgaggcgatagctatatttgcaatggcttgcgccaaccctgagtcaacggtcgcggaagtattagcaccagttttaagtgcagaactctttgaagtagatcatcgccttcaggaggcttatgccgacaagtcaccagccccgcaagttcctggacgaggtgaggatgagtcgaagcaaacaagaatgcgccgtggatggtgtgcactgtttgctgctccatggaaacagcttaagtgctatcgaaattaccttgctgggatttcagagctcgcaacacatcaagtagttaaaggctctgagttcaagcacgtcatggttgtaatggatgatgctcttgctggtgggactcgctttaagtacgacacgatttttggtggtacgcagttaagtccaaatgacaaaaagaatgcaaagtctggtaaggagacaaccatcgaccggactttacgtttgctgtacgtgacttgtagcagggcacaagaatcgctcgctttagtgctttggtcgtccgatcctgctgcagcaatggctcgaatcaaggagagtcaatggtttgctgaagatgaaatacaaataatcacataa

SEQ ID NO: 104099 - DNA, 837 bp, Enterobacter aerogenes; identical to SEQ ID NO: 87047

SEQ ID NO: 104100 - DNA, 180 bp, Enterobacter aerogenes
atgagtacattatatatccttgtagaaggtcatagcttgataagcacaacaataagcaagctaataattaccaacgagaaatattgcgtagtctttttcgatcaaagtatgtcaattttcatccagaggattatttataacatcattaagatcaatggtaaacatttttacttgtactaa

SEQ ID NO: 104101 - DNA, 714 bp, Enterobacter aerogenes
atggcggttaatatagccggagggcagggggctatctctgtcaaactacgcggcgtctttgaatcaggaataaaggattatgacgatgttgttataaaaatgcctcttgagactgcgcagcgaattatggggactgatggtgttagtaagatagtcatcttgctaaacaacgatgatgtaacatcttttgttaagaaaatgagagagtatatagcagaccagcatttgcctctgatcgttaaggactggaaggagaactctattttttaccagcaggtggagggcatgctgtcggggatctatttttttattaaacttattgtggcgctaatcgtggttttcatgatcggtaattcaatgacgatgaatattgttgaacgaacccgggaaattactacacttcgcgcaattggtttacaatcaagtcgtgttacgcgtttattctggatggaaggcatatatatcggtatctttggcgcattggggagtcttttctttggtttcactattgctgccataattaatatttctggtattgcgatgccaccttcgccgggccaatcagtaggctacaccgcatttattaaaacaaatgatgttgaattgatctgggtaaccatgatattaccaattttaacatcagtcgtggcttccattattcccgcataccgtgcatcgcgccttaacatcactgatgcattcaaattttcatag

SEQ ID NO: 104102 - DNA, 1197 bp, Enterobacter aerogenes
atgaccaacccgcagaccaccgccgcttcgccggatatggcgatccctttcggcctgaaatttagcggctacgcccgctatggcgcccatttccagaccggcgaccagaaatatgtcggcgtcgacggctcctataacggcgcctcggcgattggccgtctcggtaacgaaagcaacggaggcgaattccagatcagcaaagcattcaaaagcgcgcagggggccatctgggatctcaacgtcatgtttgaccactggagcgacgaggttaacctgaaaaaagcctacgtcggcgtcaccaacgtcctcgaatccaaccccaacgcctatatctgggccggccgcgatttccaccagcgcccgcaacaggggatcaacgactacttctggatgaaccacgacggtcagggcgcgggggtgaagaacttcgatatcggcggcgtgcagttcgacgtggcgacggtgtcgcaggtgaaatcctgtagcccggaagtgatggccgatgagaccaacccgtcgcgcatcacctgtaccggcagctcggataccggcgacaacggccactacgcgctgaccaccaaaacccacaacatcaaggccgggccgatcgacgtcgaggtgtacgccaactacggctttgactcaaaagcggtggacagcgacgcgcgcctcgatgcctggcagggcgggctggtgctgagccacaccaacgacagcggggtgaacaaggttatcctgcgctattccgacaactcggataacagcgtctataacaaaaccgacgacctgaccacggtctacgccagcttcgagggcagccataaattcactcagcaggcgcagatcgagtatctgctggccttccacgactacgacaacggcaaggataataccgacaaccgtaaaaactacggcgcgatcgtccggccaatgtacttctggaacgatgtgcactcgacctggctggaagcgggctaccagcgcgttgactacgaccagggcggggataaccacggctggaagctgacgctgtcgcagaacatcgccatcggtatggggccggagttccgcccgatgctgcgcttctatgtgaccggcggccaggtggataacgaacacaccgcgaaagtagacggtaccagcgacgagcggctggattcgctgaacatcggcggtatgtttgaggcgtggttctga

SEQ ID NO: 104103 - DNA, 186 bp, Enterobacter aerogenes
gtgggtcatggcattttcattatgcggaatcatttggtgtggattagtaatcatcatagctggtctatttttttagaacttccggagacctcattttacatcgagggccaggagaataagaaaagggagaatacacttcatatctccggtatttcgattaacgcgcgctatgataaggaaggctag

SEQ ID NO: 104104 - DNA, 213 bp, Enterobacter aerogenes
atgtccggtaaaatgactggtatcgtaaaatggttcaacgctgacaaaggcttcggcttcatcactcctgacgatggctctaaagacgtgttcgtacacttctctgctatccagaacgatggctacaaattcctggacgaaggtcagaaagtttccttcaccatcgaaagcggcgctaaaggcccggcagctggcaacgtaacttctctgtaa

SEQ ID NO: 104105 - DNA, 285 bp, Enterobacter aerogenes
atgcaggcgctgcttgcgcgatttgaactcatagttagaggcatcatccatctcgacgctgccggcgactcccgcgtactccggatgcgtttccaggaattcgaccgcggtatccagaaagcccggctccagctccatatcgccatccagcagcagcagataatcgccttcgctatacagccagcccagctggtggccgataccgcagcagcggtcggcggcgttatccagacacaccaccatcgcgcctttcgcgatagccagttcgcgggtgttatccgttga

SEQ ID NO: 104106 - DNA, 333 bp, Enterobacter aerogenes
atggccggcggcgagcggatgctgcaggttcgcggcgagtatctgccgctggtggagctctaccgggtgtttgatgtcgccggggcgaaaaccgaggccactcagggcatcgtggtgattctgcaaagcgccggccgccgctatgcgctgctggtggatcagctgatcggccagcatcaggtagtggtgaaaaatctggaaagcaattaccgcaaagtgccgggaatttccgcggcgacgatcctcggcgacggcagcgtggcgctgatcgtcgacgtgtcggcgctgcaaatgctcaatcgggaaaagctgctgagcgaagcggccgcgtaa

SEQ ID NO: 104107 - DNA, 4245 bp, Enterobacter aerogenes
gtgaaagacttattaaagtttctgaaagcgcaaactaaaaccgaagagtttgatgcgatcaaaattgctctggcatcgccagacatgatccgttcatggtctttcggtgaagttaaaaagccggaaaccattaactaccgtacgttcaagccagaacgtgacggtctgttctgcgctcgtattttcgggccagtaaaagactatgagtgcctgtgcggtaagtacaagcgcctgaaacaccgtggtgttatctgtgagaagtgcggcgttgaagtgacccagaccaaagtgcgtcgtgagcgcatgggccacatcgagctggcgtctccgactgcccacatctggttcctgaagtctctgccgtcccgtatcggtctgctgctggatatgccgctgcgtgatatcgaacgcgtactgtactttgaatcttatgttgttatcgaaggtggcatgaccaacctcgaacgcaaccagattctgactgaagagcagtacctggacgcgctggaagagttcggtgacgaattcgacgcgaagatgggcgccgaagctattcaggccctgctgaaaagcatggacctggagcaagagtgcgagcagctgcgtgaagagctgaacgaaaccaactccgaaaccaagcgtaaaaagctgaccaagcgcattaagctgctggaagccttcgttcagtctggcaacaagccggagtggatgatcctgaccgttctgccggttctgccgccagatctgcgtccgctggttccgctggatggcggtcgttttgcgacttctgacctgaacgatctgtatcgtcgcgtcattaaccgtaacaaccgtctgaaacgtctgctggatctggctgcgccggacatcatcgtacgcaacgaaaaacgtatgctgcaggaagcggtcgacgccctgctggataacggtcgtcgcggtcgtgcgatcaccggttccaacaaacgtcctctgaaatctttggccgatatgatcaaaggtaaacagggtcgtttccgtcagaacctgctcggtaagcgtgttgactactccggtcgttctgtaatcaccgtaggtccatacctgcgtctgcatcagtgcggtctgccgaagaaaatggcgctggagctgttcaaaccgttcatctacggcaagctggaactgcgtggcctggccaccaccatcaaagccgctaagaaaatggttgagcgcgaagaagctgtcgtttgggatatcctggacgaagttatccgcgaacacccggtactgctgaaccgtgcgccaacactgcaccgtttgggtatccaggcgtttgaaccggttctgatcgaaggtaaagccattcagctgcacccgctggtttgtgcggcatataacgccgacttcgatggtgaccagatggctgttcacgtaccgctgacgctggaagcccagctggaagcgcgtgcgctgatgatgtctaccaacaacatcctgtccccggcgaacggcgaaccaatcatcgttccgtctcaggacgttgtactgggtctgtactacatgacccgtgactgtgttaacgccaaaggcgaaggcatggtgctgactggcccgaaagaagcggagcgtatttatcgcgccggtctggcctctctgcatgcgcgcgttaaagtgcgtatcaccgaatacgaaaaagacgacaatggtgaattcgtcgcgaagaccagcctgaaagacacgaccatcggccgtgccattctgtggatgatcgtaccgaaaggtctgccgttctctatcgtgaaccaggcgctcggtaagaaagcgatctctaagatgctgaacacctgttaccgtattctgggtctgaaaccgaccgttatttttgcggaccagacgatgtacaccggctttgcttatgcagcgcgctcaggtgcatccgttggtatcgatgacatggtcatcccggagaaaaaatacgaaatcatcagcgaagcggaagctgaagttgctgagattcaggaacagttccagtctggtctggttactgcgggcgaacgctacaacaaagttatcgatatctgggctgcggcgaacgatcgtgtatccaaagcgatgatggataacctgcaaaccgaaaccgtgattaaccgtgacggtcaggaagagcagcaggtttccttcaacagcatctacatgatggccgactccggtgcgcgtggttctgcggcacagattcgtcagctggctggtatgcgcggtctgatggcgaagccggatggctccatcatcgaaacgccgatcaccgcgaacttccgtgaaggtctgaacgtactccagtacttcatctccacccacggtgctcgtaaaggtctggcggataccgcactgaagactgcgaactccggttacctgactcgtcgtctggttgacgttgcgcaggacctggttgtcactgaagacgattgtggcaccctggaaggcatcaccatgacgccggttatcgaaggtggcgacgttaaagagccgctgcgcgatcgcgtattgggtcgtgtgactgctgaagacgttctgaagccgggtaccgcggacattctggttccacgcaacacgctgctgcacgagcactggtgtgacctgctggaagagaactccgttgactccgtcaaagttcgttccgttgtatcctgtgacaccgactttggtgtatgtgcgcactgctacggtcgtgacctggcgcgtggccacctcatcaacaaaggtgaggctatcggcgttatcgcggcacagtccatcggtgagccgggtacacagctgacgatgcgtacgttccacatcggtggtgcggcatctcgtgcggctgctgaatccagcatccaggtgaaaaacaaaggtagcatccgtctgagcaatgcgaagtcggttgtgaactccagcggtaaactggttatcacctcgcgtaacaccgaactgaagctgatcgacgaatttggtcgtaccaaagaaagctataaagtgccttacggttccgttatggctaaaggcgacggcgaacaggttgctggcggtgaaaccgttgcaaactgggatccgcataccatgccggttatcaccgaagtgagtggtttcgtccgcttcactgacatgatcgacggccagaccattactcgtcagaccgacgagctgaccggtctgtcttcgctggtggttctggattccgcggaacgtacctccggtggtaaagatctgcgtccggcgctgaaaattgttgatgctcagggcaacgatgttctgatcccaggcaccgatatgcctgctcagtacttcctgccgggtaaagcgattgttcagctggaagatggcgtacagatcagctctggtgacaccctggcgcgtgttccgcaggaatctggcggtaccaaggatatcaccggtggtctgccgcgcgttgcggacctgttcgaagcacgtcgtccgaaagagccggcaatcctggctgaaatcagtggcatcatttccttcggtaaagaaaccaaagggaaacgtcgtctggttatcaccccggtagacggtagcgaaccgtacgaagagatgattccgaaatggcgtcagctgaacgtgttcgaaggtgaacgtgtagaacgtggtgacgtggtttccgacggtccggaagcgccgcacgacattctgcgtcttcgtggcgtacacgcggtaacgcgttacatcaccaacgaagtgcaggacgtttatcgtctgcaaggcgttaagattaacgataagcacattgaagttatcgttcgtcagatgctgcgtaaagcgaccatcgaaagtgctggtagctccgacttcctcgaaggtgagcaggttgaatactcccgcgttaagatcgctaaccgcgagcttgaagcgaatggcaaagttgcggcaacctattcccgcgacctgctgggtatcaccaaagcgtctctggcaaccgagtccttcatctccgcggcatcgttccaggagaccactcgcgtgctgaccgaagcagccgttgcgggcaaacgcgacgaactgcgcggtctgaaagagaacgtcatcgtgggtcgtctgatcccggcaggtaccggttatgcgtaccaccaggatcgtatgcgccgtcgcgcagcgggcgaacagccggctgcgccgtcgcgcagcgggcgaacagccggctgcgccgcaggtgagcgtagaagaagcgtctgccaacctggcagaactgctgaacgcaggcctgggcggttctga

SEQ ID NO: 104108 - DNA, 450 bp, Enterobacter aerogenes
gtgaagcaacaattccacctcattaacgaaagcgttaagcagaacgcaatcaacttcatccgcacattgccggttgaccagaagcggccgctgattctcgacatcaaagagatgactcgtacgctgcatcagaatcgcaagatgtggcccctccttaaagacctgtctgaccaggttacctggttcgggaacaaatacgattccgacgactggaaagacctcatcacggcgatggtagctaagtccaaaaggcaggaacaacgaatggcgcccggacttgatggcggcgttgtgatgtttggtcagcgtaccagcaagatgaccgttcgccagatggtagaggtcattgaggctatttactggttcggaacactgcagggcgtcaagttcagcgagaaatctcgtctcgaaattgaatgggcaaaagagtggggtgagcagcatggctaa

SEQ ID NO: 104109 - DNA, 1032 bp, Enterobacter aerogenes
atgtcctcaaatatttcacctgatgaaaaagtaatcaataaaattgctgaaaagttgagcgattacacgtctcctccggctggaggtatgaactctgaacatgtcagcaaatggatcaagcaatttgcagtagaggatagacgatttatcttagatgaaacgctttatctacttaatgcaggttacctgtccgaaagtcaatatcaaagaaaaataaaagccattgcaagaagtgaaaataacgtgaaattcttcagatatgcaggttttttagatattcaaaaaaaaggttctagtcaaaaggaattgcttaaatctctttataaaacagtagggataaaatttaacatcgttactgaatcatcaactcaagatgaagtaaataaatttgatacatttgtatatattgatgatgtgtcgttttcaggagaaaaggccatcaaatcgttaagtaattttattgtaaaatttaatttaagagatattaaaataaatatatattttttttcatctcatacgttttctgattataatataaaaaggcgattggaatatattttcaaggatagaaatatttttgtacacgtgaagaatggtggtatgcgtgaggttgaaaaccgaaaaagtcgttctgctcaatcaggtgttttctggccaagggaatatagtgtagatactcccgagaaattcgaggagtgtgagctttacaaaggcgtattcagagatggatatgactcttctgatagttttagaaatgaagcctcaagggatcgtttcgaatctatccttactaaagtcggatttaatatcttgctgcacaggaaaacccctagtgaggtgctcaaacctctaggtttttctacttttgacggtttgggttttgggggaacaacctttacttatcgaaattgcccgaataatgtgccgctggctttttggtggggagattatgaaccaacaggtgctcccgcattggactgctggtatccactaatgaagcggaatgggtataatgagtggtatgagctatag

SEQ ID NO: 104110 - DNA, 465 bp, Enterobacter aerogenes; identical to SEQ ID NO: 99197

SEQ ID NO: 104111 - DNA, 618 bp, Enterobacter aerogenes
atgactattacgacacaacaaaacagacaagaaatagctattttagataataatttttattcatgctatgctcttaaaagcatctttcatgaaattaaatttgcggacggtatactcctgtataatgatgtccatgaattgatcgaggcattatctaagcccaatagcatttgcaaggtaatattaacttttgacattgttaactttaatactttttttgtgctcgactttctcatggactattaccctgcaatagatattattgttatcatttgcagcccaaacaacaagatcgtttcacttatattaagcatgaatgtgaaaatcatactttcagacaatgataaagtttgttgcttttatgatgttattttatttagagtggggaactattttcttagcccggaaatatctaaaattcatattagtaaaaattatcgcattgctttttttactaagacggagaggtttgtacttaattgtttattaatgggagaaacacctgctcttattgcagcaaccaaaaatgttagtgttaaaacaattagctcacataaactacgagcctttaaaaaaataaaaatctctcgtttaagtgaactctactcacatcattga

SEQ ID NO: 104112 - DNA, 477 bp, Enterobacter aerogenes; identical to SEQ ID NO: 99178

SEQ ID NO: 104113 - DNA, 231 bp, Enterobacter aerogenes
atgtacaccgtcgggcaggcgttctgcgcgatgaccggattattgatgatgctgatgacgtcctcggcgataatctctgcgttcgtcccgttcgggcggagtttagtccggctggcaaacgggttctgcgccatgtcggctccgcagcgaaacaccgccatcaccgcattcttaccgtcaggcacgttaattgcggtcatgccctgcactttcaccatatccggcagatag

SEQ ID NO: 104114 - DNA, 630 bp, Enterobacter aerogenes
atgactgcaggagaatttattgacgacataaagtctactgaagcccatattaaattggctaattttctgatcgacgcagcagtaaaaaaaataataaaatataacggagctttattcttctctgttaatataactgtattggacaaaatagtcactgaaaagttatataatataatatcttctcttaaagagaaatacttgaataatgaattaataaaacttttggttttggaattctctgaaagcttggatttttataaggacagtaaatccgtcgataatataaaaacattatctcaattaaatgtaaccattgaactagatgattgtttttccagtagaagtgtgaacttccccgtcagatccatgaagttcaacggatataaattagatagagaagtagtgtcagctttctccaagaatatttatgatgaaagtttgataaggtctttattatatttctgcgctttaacagattcatattgcaccgctgaaggcattaataattacaacgaaatgcatgagttatataaaataggagtacgtcgatttcaaggattttggatttctaaacctgttttagaaaatgaattagatagcacaattagatattttggcttggttaaatag

SEQ ID NO: 104115 - DNA, 570 bp, Enterobacter aerogenes; identical to SEQ ID NO: 91943

SEQ ID NO: 104116 - DNA, 144 bp, Enterobacter aerogenes
atggaaccggagccagcggtggtgtatcggttggttatcaaagtcgatacggaaatggtaatgtgggttatagctatcagaaaacaaaccgacaattggattataatttttcaggcggacttcttttccatgaaaatggtataa

SEQ ID NO: 104117 - DNA, 162 bp, Enterobacter aerogenes
atgttgaaaaccctgcaagccaagtctgatatgaatcagggctgtgatttgtttcctcactttcagccgtatattttctgtcctgataatcaacggtaccagcgtaaatttgccaatcccagtgttgcatattctgagtacgacttgagaatgacttattaa

SEQ ID NO: 104118 - DNA, 666 bp, Enterobacter aerogenes
gtgaccatcaaatcaaaactggaaagcaaatcaccgctcccgaccattgccagtttcgacctgctgaacccactggacaacagcgggcacggctataccgtcaaaccaaatggcggtcaaatccgcgactggggcctccattaccctaacggtgcaaaaccgtcagtgactgacctggtgaaggccggacagggcgccgtatcgttcatcgtcgcgtttaagctggatgccgctgaccgctatatcaacatcctcagcaatcgtgtaaacagcgcaggctttaacttctattacagcggcggcttctacatgtcctatatctacccgagtggcacgccggggaccattgctgccgccagtgttatcagcgcggaaatcggcaaatggtatgtggctgtaggcgtatttgacccggtcactaaagcggccagcgtgaggatcagtgatgccggattgcagtatggtcctatcggtaccggcttcccggaaaacacgtcgcttgatacggctgtcagcatcggtggcgatcccaacggcctcaccacctcgtctatgtacggtgacattgcgtgcgttgcctactatgacggcgcgttcactgcagatcagcgtgatgcgatggtgagtgtggggatggatattctccatgagagagggctggtctga

SEQ ID NO: 104119 - DNA, 1209 bp, Enterobacter aerogenes
atggccttgcgggaaagaaacccggtattgggtgagttgcgccacgaatggcgtctggggaacgaagaagataccaagattgagcttatcccgacagtaacgctgaaatcggatactggcgcagttgctcgtgttcaggccaacctgacgcatcaaacaaaatgtaccgcagactggaactgtaccgacgatgacggtaaagaaacccagttccgcgaaggttttgctgagttatcaaatctcgattttgcgccggatatgactttctgggcgggtaaacgttacagcagctccaatctttccagtcaccagttcgactgggagtatattcagtacaacggaaccgggggcgggtttgataacctggatttaggcttcgcgcgctttgacgccggcgtttatgcgttttcaacaacggatgaagccaaagcctatcccgtggctctgggggatcagggataccctgacgattactcgcttaacctctggtttaaaaaaatcggcggcaccgggctggatgttgagcttattggccaccatatgaaccgcaacgaaaaccatcccacttctgctgaaaaaggttatggcgtgacggcgctgtataacgtcgacagtttttatgggctgacaggtggctattcccgcattgttttccagtacggcaaagggctcgctgccgctgactcgctgggtaaaaacggctggggttgggcaaacctggaagacacccagtcctggcgcgtgattctggatggcatggccagtctgggcgaagtggacgtatcgacctttgcattttatcagaaagataaaaactaccgctggtggaccagcgatgatgacggctggggacgctccatgtgggtggcgggtatccggccgtatcatcagataacgaagaatttcgccatgcaatatgaagtgggttacgaatatctggatgataaaaactacatgggggtaaacggcaaaggaaaggggggcctgaccaaggtgaccattgcgccaacgctcaccttcgattctggattctggagccgtccacagctgcgcttctttgccacgtatgccaaatgggataaaggcgtctcggatgcgatagacagaaattacgactggagcaccggtacccttagcccggggggatactctcgcagcggggataccgatacgctgaattttggtgtacaggctgaagtctggttctga

SEQ ID NO: 104120 - DNA, 282 bp, Enterobacter aerogenes
atgttgcgggatcgcctcacggatagactttgccgcctcttcatcactgatatcggcgcgctggctgagagtgatttcgcggatatcggcgttaaagctgtgctcttgcggatcgcaataccagttagctttataggtacgtacggcgtgtttattccactcgctggtaaatacgcactgcccaccaatagcttcaaagccgtgacgaatgccgccgatgccggcgaagagatcgataaaacgaaaggcatagtctggatgatggcgcggcggagccggtaa

SEQ ID NO: 104121 - DNA, 963 bp, Enterobacter aerogenes
atgaagcttttttattcaacggaactcggatcatttttcctcggtagctctttagaagttttgacggccgaccaaacaaaaaaatataaaggaaaggtaaacttaattataacttcgccacctttccctctaaataataaaaagaaatatggtaatgaagtgggtgaggagtataaaaaatggtttaaaaagttaactcctatctttaatgaacttcttactgatgatgggtcgttagtaattgaaattggaaacgcatgggagccggaaagacctatacaatcaactctacacctagagtgtttattcgaaatgacaaaacaggaaggttctgaactgcgacttatacaagaatttatttgttataatccagcaaagctcccttctcctgctcaatgggtaaccgtaaacaggctgagaactgtcgatagctatactcatgtctggtggttatcaaagaccgattatcctaaagctgataaccgtaaagtattacgaccatatagcaaaagtatgaagagccttctgaaaagacaatcttacaattcaggtttgcgcccttcagagcacaaaataagtgaggctggatttctaaaagaccatggaggaagtattgcccataatttcttcgaattagaggcattggatgagaaaagagatgttagattacctcataacgtaatgtcattctcgaatgtttcttctaatgactcttttatgagaaaatgcaaggagtatggtataaaaccacatccagctagaatgcataaaggtatagtgaatttcttcatagaatttctaactgatgaacacgatattatttttgatccatttggaggcagtaatacgacgggattttgtgctgagttaaaaaatcgtaaatggtttgcaattgaaactaatgaaaattatgcagaacaatcaactttgcgttttaatgaccaagatatattaaggaattga

SEQ ID NO: 104122 - DNA, 2151 bp, Enterobacter aerogenes
atggaaaaaccgagagacgaagcccatatttttgaggatttggcagtattagcttgttcgccaggatatgttcatgcgattgcgcaaatttgtaatcgcgataacgtcattcatattaagggaacgctaaagccatctgacatggatcgattgttcagtggtgagcgccttatacggacggagcttacgacgttgcttggtctcgtggtaaaaggaccgttggacctaaccaagcaaccgaaagctgtaattgatggctatgtccagcgtactgatgcgcttatgcaggagcttcacaacgcaatgtcctatccaatcttcgcttctatgtttgaagcgatgaagcagggaggggagcctccaaacccgtggcatgggccagggatgcgagaaccaatcttttacggtacagaatcagcttatgctttccagtatagagatttagtgccagaaaagtttggggcggatgatgaatggctgcttaaaaacaaaggcttcacttctggtcaggcgcgcatcatagcgaagacaatgtgcactttgatggatgagaagggaacgaaacttctcgcggattttcaatcagatgaaggctctctagcgacttggttgccagtattcgagttctcgctagacgaagtggtattccacagtggtgttgaggccaatatagttcaagccttctttgctgcatttctcttttcagggcataacgatgggtttaaggaggttggggatttcaatgaggtcgctgctcgaccgctcataccgaccgggcatggaactgtacttctcttttcacattacgccatttacgaggcattatacgaatctccattcttttggatgtgggacgacaaggcttatcgcccgacagccgctgagcatcgcggagcttttactgaacaatttgctgcacgccgcctatctagggtttttggcagtgaacatgttcatgcgaatgtaaacctatatcgtggtaaagatattgttgctgaggttgatgttctggtcatatacggagatcgactcatcgttttgcaggcgaaggctaaaaagctaactattgcagcacgcaagggcaacgacaaccagctaaaggccgacttcgctgccgccattcaggattcgtatgatcaggggtgggtgtgtgcgaatgaactgcttgctggaggatgccggttggtggatgacaacaagaaagacatagctcttccgactagcatcaaagatatctttttgttcagccttgtgtctgaacactatcctgcacttgcctttcaggcaagtcagtcactgaaattccagactaccaatgtcatccgtcctccgttcgtaatggacgttttcctcctagatacgttgacggaaatgctggcaacgccattgcgttttctaagctatgtaaaattaagagtggctgtatcagataagttgatgagtgggcacgagttaaccgtgcttggctatcatcttaagcagaatctctggctagatggaaattacgacctagtgatgcttgaagattctgtcgcacaagatttagatgcggcgatgttagttcgcagagataatcttcaaggtgattataccccagcaggcatactcacgaaaatgcgaggaacacgttatgaagatttgattaaagaaattgagaatagagcagacccggcaacacttgaactcgggttccacttgctttcaatgaatgaggatgcttgtagaaatgttcaccgcatacttgaaactatcataaggaaagcgcagttcgatggtaagcggcatgatgttactctggcctcgagaactccaccttgtggagtcagctttcattgtaatccaaaggtatctcctgaagcggttgctgtgttggaagctcactgtgcaaaacgcaagtatcagcaacatgcagctcaatggtttggagtttctgtaagtccgaatgggcgagtccagttcggcgtgacgttggattatccatgggcggcgtctgacgaaatggaacgacttacagctgacatgaaaccagcatctagagtaagtgatgctttacctccatttttacgagaaggtaggcggatgaaacttgggcgaaatgaaccgtgtcactgtggaagtggaatcaagtacaaaaaatgttgtttaaaatag

SEQ ID NO: 104123 - DNA, 990 bp, Enterobacter aerogenes
atgatgattaaatatgtaatggatgctccatctagggaaccgactcgaaacaaaaaagggtcagtgaaagttaagagaaatacgagatatatagataaacttttggcaatccaggagtgtagtgctctggaagccaatgaaattggttttattgctcggttcttaattcaagcaaccctaccacacagcaatccaggattgaatgagtggtgccgtaaaaatggtaatttaaccatgcatatgatggcaccatcagcagtaggtttgcctttcggttgctatgctcgattgctattagtttgggttagttctcaagcagttagaaataagtcaaaactggataaaggatttattacagaacaggaagcacgtaagcttgaattggggcgctcccaacggcgtttcatggaagacttaggtcttcgctcaaccggtggaaaaaatggttctataaatccatttcgagaacagatgcggcgattatttaaaactacggtcagtgttacgtttgcagagttaaatgaggacagtggatatgtttgtgaggatgaaatgggagccagagtagcggatgtatcccatattttgtggagtgcaaaacaaccagagaaagattttctatgggagtcttgggttgagttgtcacctaaattttttcaactgataacagataaacctgtcccattggatatgagagtattgcgtttgattaagcgctctccgatggccttggatatatattgctgggcgacgtatcgtgtgagttatttaaagcgaggcacaattatcccttggctaggtttgatggagcaaatgggttcaaattattccgatgtcagagactttaggagacggtttaacgatgggcttgaaaaggtacagcgggcatggccagggctagacgctacaccgaccgacaaaggacttcttataaaaccaggtgctcctcaagtacctcgaaggaaaaaatacagagctgagggatattga

SEQ ID NO: 104124 - DNA, 228 bp, Enterobacter aerogenes
atgaattcgtcaatgactaataaaatgctgattaatcgcagaacattactcaagatgattcctttgtctgatcgaacaatctataacttggagcagcgtgatgagtttcctaagcgtattgttttgactagccgaagtgttgcttgggatttagctgaggttgaaaactggattgaagaaaagcgcagatcggctttaaaggcagcaagacccggttttttttggtaa

SEQ ID NO: 104125 - DNA, 1035 bp, Enterobacter aerogenes
atgaaaatatttgaaacggaagaaaatgcgcaaaaaagactagggctgtattacatccctgtttgggaacatactgatgaaacggtagtgcatgccatccgcatctttagggaaaaatggcattcatattctgataaatctaaacggtacaacatcataaaattgatcaaagagttgattgatccatctgtatcggaatatttaagtcgacttccaaatcattatttatctttttgccctgcctcaataaaaaattgtaactatagcgatcttgttaaattcagaggcttttcttatacggccgatcaaattcactttcatctgagaaattttgttaaccatagttctcatacagagcaagacatgtttttcatatccactcaggacatgctcaaatcattttttatgtattgtgaaggaaacagcccaaaaaattcaaagctagcccccgatctctatgtaaatatggaaagaaaaacgcgaatttgtgccttatgtggaaacccgactgaattttcatcatttattagatcatggaaagagaatggagttattgaaggtgaagaaaacgaagataatgagaaatttggaaaaaaaaagagaccagacttcagtcaaacatactgtctaaatcaccgaccgaaactgcacgatggttcttggaacgcgacctacaaacaggcaaaacgttctacaaagcaatttgagcaagaagtcttgaggctacggagacaaattgcccatccagatcgctacaatgcaaaatctggagataatttagttgatgagtacttttatcattacctctttgattcttcactggatccaactaatgtcgctgaactgcgcaacttagcacgcagaatggtagattcgcgactgactgacaacaaaaagcgaatactggttcttcataagcaagggctttccaatcgcgaaattggtataaaattagggggtttaacaggtagtgtactaacaaatcaagctatttctaaagccttaggaacgattcgtgatgagttcatcttataa

SEQ ID NO: 104126 - DNA, 294 bp, Enterobacter aerogenes
atggagataggccaaaaacttaaagctattcgtaaagctgaagggttaacacagaagagattttgtgaggcgtgcgggctagcgctcggcacggtcaaaaactacgaaggaggatataaaacacctggcttacaagtgcttatgcaggtaacaaacacaacacaatttcaaaaatacacgttatggctgatgactgacaaaaccgccccgcaggctggtcagatcgcaccggccctcgcgcacattgggccagaatcaacggaatcagaccaatccgggaaacagactggctaa

SEQ ID NO: 104127 - DNA, 333 bp, Enterobacter aerogenes
atgggtttttccgcgacgtttgcggaatggttcgatgtcggagatgagccgggcacgttccggcttgaaattgatgttaatgaagttggtctgacaccaaaaacactggatgaactaaatcgcctggtaggagatgccaagccggtaagtcggcacatgtcaacgatgacaatcagcgtaagttcacgcggaattgttcactgcgcaattgcctcctatagcggtgaagttattacggtttacccggtgggttatgagccaccggatgatattaaatacaacggcttgcctgattttagtggcgattatcagtattccggggaatacgtatga

SEQ ID NO: 104128 - DNA, 2949 bp, Enterobacter aerogenes
atgacaaatattacagaatcatcacgctgggaagatagcgtgtaccagatcaatcgtaatgatccggtttccggtggtcgcggtggggtggcaaatatacaggcagggcaactggctaacagaacgcgctacctgaaacaggccattgacggcatccaggcaggagaaatgccctattcatctgaagatgaggcgcagcaggcaattgaacaggggagattgccactgaatgctttgttttctgttcgctcatctgatcctgaagtctgggtttacgaatgtcgaaataataatggcgccgtcagcaagacgggcaagaaattgtatgccgctgacatggtggactatctcatcagccgtgttgaggcgctacagatctcaccggatgcgatttttgatgtggtgaccgccaacggcgaacgaaagatgcggatcggtgatgatgagattgagctgaacggcttgatcaccgcgttagcaaccggagtgaacggactgaatttttccggatgcacaattgataatcacacgcctgatgggtggtcattcctgatccattttctgaatggcgagataatagccggggttaaaaccgacggttcgcggatcggttggggcggtactggcagtgatactggtggtgaatccggggggataactccaggagataccgccgttgcctatgatgatattcgtaattacaccggcgaggcgacggtacgcgacgtcatcggcgagcgcattggtgggcgttttgtcgtttcgccaggttcgaccgatgaagacgatgacggcggagttatcgtcggggtggatggtcgccgctggattcgccagtgcgaccatgtttcctgggatatgtttggcgcgccacgcatcccggaagccatctataaacagtatgaaagccttacgcgccagggtaatgacgccgacgcacaggccttattgtctgacattacgcccgccgatgatgcaatcagaaaatgccatgccttcgcgaataaacacgcgatcccggtagttcagaatgtggggcgctttctgtgggtcagcggtgaaattgaggtcagaacatcgagctacctcaccggcgctacgattgtcacctgtaatcgcagcgggacagatgagactcgctgggggaaagttgatggcgtcaccgacggttcacctgacccgatgtacatgtaccgcattaaaggtaaagagcgggttaattttacggctgccgaactgaacgaactcaatacggtttattcgtcataccttaagcgcggcagtatggctattcctatgccgaagctgagccagtatcgcggcggtctcttcggttttatctcctccgccgtcgagctgtaccgcaacggaaataaaaataacgcccggtcacgggttaattatcgcgactttacccgtatcggtcgtaatggcgctatttccgacattctggtgaaaaatattcccgccggtacggtaacagaggcgtggatccagccaaaagaaaacgcctggcttaattttgagccgccgacgttcttcgaagcgggcaacggacgtaagttcgttaacatccagattgaacgctcgcaggtcaacattgaaaatctggtgatggataactgggcgacgggcgatatcgagtcccgcgtggcgatcggctcgtatggtgtgactgatattcactgccgtaacgcagccgctgaatgtatccctaacacttccggcggcgcgtatgtggtttgcttccgtaacagcatcgatattcacatcagtggatattacggcctctacggctggggattccaggggcatcatggattaaaacggatattcatcaccgaatcggttatgaatcgctttgactttcactcattcggctatgacgtctacatcagccggacgaagttcaaagggcgtcaaattttcctgcaaggcggcggacaattctcgcttcgtgattgcgatgcgaacattacgcaatacagcctggatcagacgggccacattgaggacaggctaaattatttcatcaatatgcgcgaggattacgccggtgattgtgagtgcaacctctccattgacgggcttgtcgttcgtttcgatcgcaatatcaccagcgcctgggcggcggatgtgttgtcgttcgacgtcattcgcatgaacagcgggacgtcggttgattacggcgtcacgaccaaaaacccgcatgttatttccgggaaagatattgtctttgatctggatggaatggcggcctctctgccggacaattttgcattcaccttctgccgtccgtaccggaaccgctacaactccgcgcagaaaacctatctgccggatatggtgaaagtgcagagcatgaccgcaattaacgtgcctgaaggtaaaaacgccgtaatggcagtcttccgttgcggcggcgatatggcgaaaaacccattcgccagccgcaccaaaatgcgcccaaatggcactaacgcagagattatcgcggaagacgttatcagcatcatcaataacccggttattgcacagaacgcctgtccgacggtgtacatgcctggtgcggcctcttcctgggatgccgttgtcggcggcacgacgtaccgcaccagcgaatactcataccgcccgaaagtgacgctgcgcaactgctatccgtcgatcatcaacgccgaaggggtgaaagccgaattcgacatttccggcggtttactggcgcgatacagcgtcggcgacaccggtaaccgctgccgggtgacgggcgctgatatccagctttatccagatgccgacggcaagctgtatttcgactctgacaaagtcagggcggttaactgtgactggtatgacccggcgaatggctcgacctacaccgggatattaaacggggttggaaacgaaaaccgtggaaccgccgcacattcaccaaatattaattattaa

SEQ ID NO: 104129 - DNA, 396 bp, Enterobacter aerogenes
atgtctggtgttcgtattctctgcaatcagtctcctgcgcgcaccgactggaagcgcgattatattgttatccagtcaaaactagcgacaaaatcaccgctgaccgccatcgccagctttgatttgtggaatccgctggacaatagcgggaatggttatttggtaaatccagggggcgcaaaaatacagccgtgggggcttcactatgatgatggagcatcaccttcaaaaacaacgctgacaaaatccgggcagggggctgtttctttcatcgtggcatttcggctgtccagactggatagatatatcaatacgagccgcctgtgcttcggtaagctggccgccttcgcgctgtttctggttgaggccgtcaaaggcccgctgggttgtttttag

SEQ ID NO: 104130 - DNA, 360 bp, Enterobacter aerogenes
atggatcttagtattcgcgttgcgttcagcgccattgataaactcacccgtccggtcaacgccgccagtaaagctattggcggcctttctgactccctcaagaaaacgcagtcgtcgatcaaggatctggagaaaagcgcagcggcattcgacaagctacgctcgcaggccaatgaaacggcgcagaaactaaaaacaacccagcgggcctttgacggcctcaaccagaaacagcgcgaaggcggccagcttaccgaagcacaggcggctcgtattgatatatctatccagtctggacagccgaaatgccacgatgaaagaaacagccccctgcccggattttgtcagcgttgtttttga

SEQ ID NO: 104131 - DNA, 465 bp, Enterobacter aerogenes
atgaaaaagtcatcattaatgattgcattattatttccattgacagcctctgctatcccaaatatgtggaccagtggctttggtcagggcataacagaatatctaatcaccaaccctgaaaatgtcatttttaaccttaactgcaccatgaccccggatgagcacaataccctacagcacaatgtactcatcgacctacctgacggtactcgtgttgattcacatgatgacaaaacagcagtaacggtcgtaatgaatgaccgacagtttcatttaccctcctcgctgggttggcgaaatggggataatgcctggattcagtttattgatgctatcggtgacgccgcaacgttcgatgtttacgtcaacaataacaaagttggctcctttagtccgggtctgaagaattcgcaaaaagaactgtctgacctcagtgagtgtcggaccacacactacagcgattaa

SEQ ID NO: 104132 - DNA, 474 bp, Enterobacter aerogenes
gtgaaaaaaataaaattagtgctattaatgcctggtatctacattgggttaatctcgtcaggctttgcggaagcatccagtatttataaagggatattacctgctgtagtgaataataagagtggcaacaaattttggtgtgatgcttaccatcaagtgcggaaattgtgtaaagctactgaaattgatacgtcaggcgcatttatcctggtacgttcagctccgttaaaagattgcgaagctggcatttggggatggatcaaccctggtgacaacaatagtgcgactgattacattgcaacgggttataccataacgcctgatgctacatttaaggtaacaaccagagatatgtgcaacccagacatgaaagtgacctttcgccctaatgttaaaagaccccagtttgaggatatggtagggctatataacggaaaggaagtgtttcgttataaatggcctgattcaaaataa

SEQ ID NO: 104133 - DNA, 690 bp, Enterobacter aerogenes
atgactcagactgcacgccgccatgatcggcttgccgtcaggttgtcgatgattatcggtcgcctggtggcaggcgagacgctggatatgcgcaagctagccacagagtttggtgtgtcggtccgtaccctgcgccgggatttccgtgaacggttgatgtatctggacctggagtaccgacagggccggtgtcgtctgctttccggcaatcgccaacgggagttggcagtaatgacctttgcccgacagtcgggagttgagatcctgtttccgggactggacagtcatctggtcagctccctgcttggcggacctggtgagtccccctgtcttatctggcagaaacattcctcgttgccagtcaccgacagcggagtttttacccggctggtaagtggcatctcggaatacaggaaagtgaccctgcgcggtaacggatgctgtcatgcggatatagctccctaccgtctggtgctgcatgacggcggctggtatctgacaggaacgcatcaggcccgcattatcgcgctgccgctgacagatatccgtgcggttacgctccatcccgacaattttgcccccgacacctccgtgcgcgacattctgtcccgcccggatttccttcaagctttaccttactttcaatgcatcaatgacgttatatctgccttcagtactaaaacgctttag

SEQ ID NO: 104134 - DNA, 876 bp, Enterobacter aerogenes
atgaaaaaatctgaagctcttcaggccatcgaaaggccgctggcatcactaccccatgctatcgtcaaacctattcttgaacatattcaaactatcactcactacgaacccgtgatcgggatcatgggcaaaaccggtgcgggtaagagcagtctatgcaatgccctgttccagggggaagttacgtcggtcagcgatgtgggggcctgtacccgcgatgtgctgcgcttccggctccataatagcaaccacagtctgatgattgttgatttaccgggcgtgggggaaagtgagcaacgtgatgaagaatactccgcactgtatcgtcgtatcctgcctgaactggatttagtgctgtgggttattaaaacggatgatcgcgctctgtcggtagatgagcatttttatcgaaaagttatggtaggctgccagcgccggtttctgtttgtcttgaatcaggctgataaggctgaaccctgtcatcagtggaataccaccagcaatacaccatctccggaccaacagttgactattgaggctaagcggagcgcagtacagcaactgttcctgtcgcatcatccggtctgtgtcgtgtcggctcgaaccggttggggcatggaagcgatggtgcagtgcatgatgcgcagcctgcctgacagggccaccagcccactgacgacacaactgcacaagaagctctgtactgaaccggtaaaaaagcaggccagagatagttttggttgcgcggtgggcagcgtgtttgattccgttgcatcatcgcatttacttccgccccctgtccgaaacgttataaacaatgtacgtgatgtcgtcgtgtcggttgcccgcgcagtctggaactggattttcttctga

SEQ ID NO: 104135 - DNA, 1017 bp, Enterobacter aerogenes
atgacatggttaaaaaaagaccatagagcatgtcacttttttttgttccatttaactacagaattttcaggatgggcggaacgcagtagagttaaacagaataacaatgatactgctctaagcgagcctcaaagtggatggggaacacttgcgttaacgcttgatagccctttatatcagactgacgctagttttttctctccacctcaagatttacctagcgaattagaacggcagattaatgaagggctggatattgaagtagctagcgaaaaaataaaaaactcggatgatgttacagagattaacattggtttggttgataataaaattgttggcgatagtaaaagcaataacaaatttccaccggcaggtttaatgtttgcagacggcgtcaccaactcaaatgttaaaaattccatcaatatacgcaacagcttttttagcgttattgaccagttacttcttagatatcattctgatcgagagatattgaagataatatcggatatcacttctttgtggggaatacaattcaaaagattcccgtcacctttttcctggcttaacagtaaaaataaagaacattgccagtggctttgggatgaaatgcataagcgctgtgttggcattccatttcaacctcgggatcatagtcaacaatggcattttattatcgcgacgttcgataactggaaagggtggtcaatagaacagctagattatttaacggagaaaaatccaaagcgcaatccagataaattattttctgatcgcctgggaacgagcaaaaaagaaattgaacacaaaacggttctccttgatgagctaaaaaaggcatgggatcaaagggaaagaagagcccgaagagcaaaggatcctattgccgccagactaactagagcggctcaaaaaaaactagagtttattgccagcatagagaaaaccacatcaaaggacattcttaacgaactgattgacaaagcttttcatgaagctaagcgtaaagccctgtaa

SEQ ID NO: 104136 - DNA, 207 bp, Enterobacter aerogenes
atgacaactcgtcccccgctcaccgaagaccagttcgttgatatggtatttatcaccagccttacggggcttactgataaatggttttataagctcatcaaagatggtgtcttccccaaaccagtcaaacttggacgcagctctcgatggctaaaaagcgaagtagaagcctggcttcaggaacgtattaaccagtcccgtaaataa

SEQ ID NO: 104137 - DNA, 573 bp, Enterobacter aerogenes
atgcaaaacaaacaacgatggaaaccagactggtttctacagtccctactgaacaaccatatcgacaaactggtagagcgctattcctgcctgcgggcactccgaacagatctgttttaccaggatcataccgctaagtttttccttcaggatcatcggcaactcgaatgggatgtccgaaagctaatgaaccgtatgatgcaacttgaagcagtggtcggtttcttttgggttatcgaatggaccgaagatcaccactaccatgcccacgtcgtgttctggctggatagtagtaaaactcagaatacatatcattgggcgcagcaagccggtttgtactggagcgatatcactgaccgggatggatggtatcaccgatgcgagtttaaagagcattacgaggccgatatcaatatcccggtacgttacagcgatccggacagtatcgccaatattcggcaggtactggagtatatggccaaaactcagcagaaacatggcctattgttgttcggctgcaatgaggtccctaaacggtctttaagcgggcggccacgtaggacggacttctga

SEQ ID NO: 104138 - DNA, 201 bp, Enterobacter aerogenes
gtgctgcaagcggattcgtatgccgggttcaatgagctgtaccgcaatagccggataacggaggtcgcctgctggactcacgcccgccgtaaaatccgcgatatgcacgttcgaacgccgtcagccctgacagacgaagcgctgagacggttcggcaagttgtatgtcatcaaggcggaaataaggggacagtcggcatag

SEQ ID NO: 104139 - DNA, 348 bp, Enterobacter aerogenes
atgaaaaccctgtcacgccactcagcgctggcaaaggcgttcgcgtatgtactgaaccagtggccgacactggaatactatgccgacgattgctgggcagaagcggataataatatcgatgaagatgccctacggatggttagtctgggtcgtaaaaactggctcttcttcggctctgaacgtagtgatgagcacggagcggtgttttacagcccaatcgggacgtgcaaactgaatggtgtggagccagaacgctaccttcgtcatgcccttgacatcatcgttgactggccgatcaatcgggtcagcaaactgctgccgtggcgcatagcactgcccaccgaatag

SEQ ID NO: 104140 - DNA, 2100 bp, Enterobacter aerogenes
atggatcgagctcaggcccaacagttgctgcaaacttctttagccaatcccactgccgattttcgtgatggccagtgggaagccatcgatgccctcgtcaatcatcggcagaaattgttggtcgttcagcgcactggctggggaaaaagttcagtttattttatcagcacaaaaatctttcgagatcgacacatggggccaacaattattgtttctccattattggctctgatgcgtaaccaagttgatgcggcgggtcggttaggccttaatgctgttcgttgggattcaacaaatagagaagagcagccaggaattcttagaagtctgcaacgtaatgaaattgatgtagtttttatccatccaaaacagttttcaaatcaagattttcttgatgatgtacttgcaccgatctccgatagattagggctaatggttattgatgaagcacactgtatttccgactgggggcatgattttatccccgaatatcgacttatcgccaacattttacgtgggttaccagctaacacaggtgtgcttggcacgactgccactgcaaataatcgggttattgaagacatccaatctcagcttggagaaatccaaatccaccgtggcccactgattcgcgagagcctcgccctccaaactttattactccccgatcaagcctctagattggcctggctggcccaagttattccaactttgccgggaacagggattatctatgcattaacagtacgtgatgcagagcaggtggcacaatggttgactaatagtggcataattgccatggcttaccatgggagcgttgtggccgaaggttttgaggacagtaattcttaccgcctgcatttagaggaactgttacttagaaaccaacttaaggttctagtagcaaccacagccttaggcatggggtatgataagcccgatttaagctttgtaattcattaccaagctcccggttccattgttgcttactatcagcaggtaggccgtgcaggtcgtggcattgaccatgccataggagtgcttatgtcaggcatggaagataacgctatacatgagttttttagagaatcagcgttcccatcagaggctcaggttatccaaattttagagacactggaaaacaatgatggattgtcactcaatcgtatcgaagagcaaaccaatctacgccgaaaacagatagagaaggtactcgacttgctgagtatggaaaatccagctcccatcatcaagaatgaaagaaattggtttagaacagcagttcactaccaaatggatcatgcacgtatcgctcacttaacagggcaacgtgttcgggaatggcaagaggttaattcctatatagctgatatggggtgcaaaatgacctatctacgccgctctcttgatgatctcgacccagctcgttgtggcaaatgcacttcctgtatcggtcaaaatctcattaaccaaatccttgatccggctatagtgcatcgtgcaagtactttcctcaaacatgcagaaatgatcattacaccaaaggcgcaggtcgcggccaatgcttttgtagaatatggttttagaggcaacttaccaatgcgccttagagcacaggaagggcgagtattgtctcgctggggagatgcaagttgggggcagacggttgccgataataaacatgcaggccactttagtgacgagttagtggaagctatggtcgagatgattcaacagcgttggcatcctaacccagcaccacgatgggtatgctgtgtcccatcacgtgctcaccctcagctggtaccggattatgcgcgccgtctggctgcacgtttgggattgccatttgttgatgtggtcaggaaagttagaaataaccagccgcaaaaaggccaacaaaatcgttttcaccaatgtcgaaatctggatggtgcttttgcgataaatcagcccttagacaattcgccagttttaattgtagatgatattgttgactcaggctggacactgactgtcattgcagcactcttacagcaagcaggcagtggtatggtataccccgtggcacttgcttcatcttcggtaaaagactcatga

SEQ ID NO: 104141 - DNA, 1335 bp, Enterobacter aerogenes
atgaatgtatccggtttattgtcaaaaacagcccaagcaacattactacttacttgctatttttctaaagcaaatagtgaaaatgcgaaaccacttactaatgcggagtggggacggtttgcgttgtggctgaaagaaaaatcaacgacgcccgcggacttgttgggatcggacccaaagaccttgcttcatggctggtatgatgtccgtatcagtacagagcgaatcatagcactactaaatcgtgggcatagtctcgcactcgccatagaaaaatggcaacgggcaggcctttgggtagtgacccgctctgatccggaatatccatggagattaaaacaacgactcaaaacagactcaccacccgttttattcggctgtggtaataaagctttgttaaatgctggtggtttggcggttgttggttcgcgcaatgcgaatgatgcagacctacattttaccgatgaagtaggtgttaaagcggcggaagaaaatatatctatagtgtctggtgccgcccgtgggatagatgaaacagcaatgctgggggcaattaggcaaggtgggattgtaatcggggttatggctgatagcctgctaaaagcagccactagtgctaagtggcgcaaagggcttatgaataaccacgtagtgctggtatcaccgttctaccctgaagccggtttttatgctggaaatgccatggctcgcaataaatatatctattgcctagcggacagttctttggtcattcattctggtaaaaaaggcggtacacttaatggggctgaagaaaatcttaaaaaagcatgggtgcccctctgggttaagcaaacaactgatgaagattcggccaatgctgatttagtgactaaaggtgggcgttggcttgaagctgatagcaatagcctaataatttccaacctgcttaaagataaagagaaatcatcaatattatcaaaggaaaggtcactagatcttttttcagaaacgatgaaatcagaagttttaatcaactctgagaccaagttattaaacaagattgccaaaacagttcaagccggttcggttattaataattgcacagataatctaacatctaagaaagaagttgcacaggttgaaggaacaactgtaaatcaaatagatttttatcagttattcattaccgagctcactcgattggcaaaatcaccaaccacagttgatgagcttttggaatgtactaagctgaataagtcacaattacatgattggctgaaacgtgctgaagaggatgacattgttaataaacttaaccgtcctgtgcgttatcaagtaaaggaaaggcagtag

SEQ ID NO: 104142 - DNA, 894 bp, Enterobacter aerogenes
atggcaagaacaaaaaaattaacatatggggcagtgaatatcactatccatccgcatactccggaaaaatatattgagttatttagaatggcacgacgaaatgccagaaatgttaaattaagaggtgattcgtatgcaacattatcatttttcaacccttacaaaagagggcaatccagtaatgagccttttgaaggagaggttctaaaatttatagatatcgatattgatggtgagtggtttaatattactaaaaaggatgtagcaacagatgaagaaaaagataaaataaatatccctgaaaatcttaagcccaatgtcggtcgtttttcttttatattcctgcctgaaagccacttattagtatatgagatgcaggataagaacaagtatatctcacctaaacaaatggaaacgttcctaaatgggatattttcagacgctaagatattagataaattcggtattgtaaatgttacaatactaacagagcctgaaagtgttgaaaaaatgttatcactaaaaggcatcacattaataagtatgattacacgcagaccaaaccctgacgatcttatatctgcagaaagtatcatgcagaaaagatttaaaaaattgggtgtaattgaagaagataaaacttataaatctgaacgagggcaagaaattaagccagataaagaattgaaacaggatgcgttaatagcatctagaaatggcgaagtaagtattaggagaataaatgaaacaggtctagtagaaatacatgcatccagtgaagtgccgttacgacgagtagaaccttacgattcagatgtaacttctgtgacggagctattaatacaaaaagctaaatcattagccagcgaatttaagaggttactgaaaaggtaa

SEQ ID NO: 104143 - DNA, 204 bp, Enterobacter aerogenes
atgaaagaaaaaacaaaactaatccgtatctctgaggtaatcgatcgcacaggattttgcagagcttggatttatcgactgattaaaaataatagtttcccggctcccgtaaaaacaggtgaacgatctatcgcatttattgaaagtgaaatcgatgcgtggattgatgaaaagattttttattcacgtaatcaggctgcgtaa

SEQ ID NO: 104144 - DNA, 258 bp, Enterobacter aerogenes
atgaatatagttttatcagtatcaaaatgtttatacataaacgatttagatcgcttacttccgtgtgatcgtttttttgttcatttagattatagagatattagcaaaaaagagtcatttgagatgaatagacacgacaaagaaacatacaaacttatctttgataaacttgtaggtaatgacgtaatgctttctattgatgaagacatctacagcgaagttctcgaaaacttactttattattcaaataataaataa

SEQ ID NO: 104145 - DNA, 174 bp, Enterobacter aerogenes
atgattatagcaataggaatgatgcttctttgtatcatgttgggaggtttcatgatccgtagttgtatgggaaaaacaaactcttcaagtgaagcaaagcaatcaatatcagatgttagaaaaataatcgataaaaaagctctgattaaatataaaaggaataacagaatatga

SEQ ID NO: 104146 - DNA, 264 bp, Enterobacter aerogenes
atgattgaggatgacatagagaaacaaatgagccaaaaaatgaagtatgagttattagcacgttttttttactacatagaacaagataaagatatacctttttgtgaaataaatagtgatgaaaaaaggctgtgttattttgtagctcataggtatatacaagaaaataaagctgatgatcttctaaaatctttgattgatgaaaatgatgaagactatataaaagctataagagattatatgttcactactacaggggtataa

SEQ ID NO: 104147 - DNA, 369 bp, Enterobacter aerogenes
atggatacagacagaaaaagagggcgtataggattaaatcacgaagtacgtagagatatatctatacagtttagagtaaacaaagcagagtttgaatatttaaaagaacttgtggaagcctccggccttgagagaggccactatatcagaaaagagattttaaactctgaacctattgttaaaagaaaaattccggattttgaacaatccttgtttaaggaaatacagcatcaaggtaataatataaatcagattgctaaaaaactaaataccaatgaagactttaaacaatctgtagccgcagaagctaactttgctataaagcaacttatgaaaagaatattaaaggcttgtgaggtttatgtatga

SEQ ID NO: 104148 - DNA, 1470 bp, Enterobacter aerogenes
atgaaaggaaacgtagctaaatctggtaagtcctttaaaaatagagttggttatatcttaaaagatgatcacgatttcatatgtagcaacatggcaagtgattataataatgttagtgatttaactgatgagtttaaagctgtaagcagctttagacaagatataaaaaaaccagtgtttcatgcatatttatctcttccaaaaaatgaacatttaacagatgagcaatggcaagagatagcaaaagactatttgaaagaaatgaatattgatatagaaaaacatcaatatatttgtgtgcgtcataacgatacagataaagaacatatccatattgtagccaaccgcataggtttagacggttctgtatggcttgggcagcactcagcatttaacacaatagcagcttgtgaacgtttagaagtaaagcacgacttaaccattacacaagggcttaaaggtcaaaaatcagaggtatcagcaccaaccaagaacgagatcgagcaagccttgaggacaggtgagaaaccagctcgtttagtgctacagaacgcactacaagcggctttagtcggtaagcctgatttgtccacgttcgtagaacgtctgcaggccgtaggcattgaaccaaggttcaatgttgccagcactggcaacgtggcgggttgttctttcagtgtgggagatgtggcattcaagggatctcagttaggtaaaaaatttagttggaacactattaaaggcaaggtgaaatatgacaaaaatagagatgatgaactcgttaggagcttctcagcaagaaaagatgatgaaccaaatagtattggacgatcacttgttgaaccaaatatcaatgacagtagagccgttgacggaatcgatgatgatattatccgaatcagtcagcacagcattaaatcagacacaacagacactaaccagagtgaacaactcattagaagcaacaacaacggctttaaactcagcgaaaaatataatagaccaacaagccctaaagttagaagaacaacacaaaaagctgcacaaatactcaacagagttaaaaaacaatacaataaaaaatcaatcaagccttataatcaaggtggcatcaatagttggcgtgataaatctgatagcggttctatcagtaggatacttgatcatgcagaaacagccacaacagccacgaataactttagactcaaaggccgtcgcaacatcaatagtagagcaactaatatcgaagaaataaggcgtaggcttggaatagaaaaacctgttattcagccaaggaaaatagttaaagaagaaataaagaaaaagcctttaggttttactatggatgaaaatagatttaaatcgaagttaaaagaagctcttaaaaaagaaaaaccaaaaaatgaaacaccaccaccacagcatgaagacgatcagcatttaaaacctcttggttttaaaccgcgataa

SEQ ID NO: 104149 - DNA, 348 bp, Enterobacter aerogenes
atgccaaagtctacgacatacctcataaatatactactttgtataatactattgattttactcatatggggatccaatattgtagtaaactggtttaagagccagagctaccacggttatgtaatttataattgtccaaaagatatcaacatcgaaaaaatgacatggttcgaaattactgagcgttgtaaaattgtagaaagtgtcgatgataaattttttagaatagacgaaagcaaagttaaggaaagagccagagattgggctaaaactgctgattacatgacaaacgtaaaagtaatgggtgaaacttccaaaccgcaaaatacttattataaaatctggtaa

SEQ ID NO: 104150 - DNA, 1272 bp, Enterobacter aerogenes
atgcgcttaactgatattgctgtaaaaaacgccaagccttccgacaagcagatcaagttatcggatggaaaggggctgtatctgctggtgcatcccaacggttcgaaatactggcaggctgcttatcgttatgatggtaagcaaaaagtcttctcaatcggcacttatccttcggtatcgctctcagaagctcgtacaaagctcttagagatgaaatctctgttagccaatggtgttgacccattgcagcaaaaaaaggctgcaaaagctgaggagcgcggagattttacgtttgaagctgtagcgcgggactggcacaaaaaaatgtctgtcagtgagcgttggatacctcagcatagtgaacgtattttaaacagccttattaatcatcttttccctgctatcggctcaaaagatattaccaagttgactacgcgcgatctgttgcttccgctccgtaaaattgagggtaaaggccagcacgaaacagcttcacgcctgaaacaacgtattacagctatcatgcgttatgctgttcaagaagatatgattaaccataatcccgctaatgaactcggcggcacgttaatcacacctaaaagaacgcattacccggcgcttgaacttgagcagatacctgattttttaagtcgtatagatgcgtataaaggccgtaggctcactgtattagctttaaaactcactttattagttttcattcggtcgagtgaactacgctttgccagatggcctgaaatagattttaaaaatgccttatgggttattccgccagaaagagacgagatcgaaaatgtcagattttctgagagaggatctaaaatgcggataccgcattatgtgccgttaagtcatcaggccattgaaatattaaaagagctaaaagatattagttatgatattagcaatggtgaaggtctgatatttatcggttgtcatgattatcgtaaacctatgagtgagaatacagttaataaagcattgcgacttatgggctatgacactcaaactcaaatttgcggacatggcttccgtacaatggcttgtagtagtttggttgagtcgggtatatggactgaggatgctattgaaagacaaatgagccataaagaacaaaataatgttcgggctgcttatactcataaagcaaaacatattatacaacgccgattaatgctacaatggtgggcggattatcttgatgccaataaagagaaacatattatgccttttgaatatgcaaggattatttga

SEQ ID NO: 104151 - DNA, 606 bp, Enterobacter aerogenes
atgcggcacaccaaccgcggataccgtatccagcagccccataaactcgatactgatggggatgcccagcagggtcgggccgcctggcaccccggtccccgccggcagcatatttgtcgcatcgagcggcatctttgcatcatcgagcagcgactccagcccgcgggcgaaggcgcgcgcggtggcggccccccggcagtagccgtagacgaacagcttgattttggcgatgcgccgctgcgagcgctggatatgcagccgcgttggctgccgcggccactggttgacaacgtaccccagatgatcgttgcagaatttgtcaagcgcgcttttacggttgaacttctgggtcagccgcgagaagggccagacggtggccatactgttccggtatctggtcagttcgctgtcctcgatcctttcctttttcaccgcataacaaatgctgctgtaggttttaagcagcgcctggttgatacgatcctcaccgccgttggcaaacagctcgccgtccagggagtagtgctcttcaccaatctccggaaagcgtgcgccacagccgggaaagtagtaacaaaagtaaccatcattctccgccttatctaa

SEQ ID NO: 104152 - DNA, 705 bp, Enterobacter aerogenes
atgagcttctttgaaatcgactcccgatttttgatcgatacagcatttcaccgactggaaatcatccgtgatgatggcctgtatcgccacctgcgtatgcagcagcccgaaacgtcctgttattactacgacgttatcacctggcctggttacttgaccgtaaccggcgacatgggaacttggacattcagtcgcatcgcggacatgttcgacttttttggcgcctgggaaggtgtaatcaatacccattactgggctgaaaagctggaggctggcgcgggatgttcggcacgagaaatgctggcaaaagagtatgaccacgacgcgttctgcaaaagcctgaaagagtctctgagtgattacctggagggcgacgaaagcgaggagccagaagaagatgacgactgggacgacgatgacgacacacccgatagcgacaaagcagtggtacgcgaaatcgtccgcgacttgtgccgggctgggttcaacaatgaatgggaggcttatcaggctgtttatgatgctgattggccagagggctggagtgcatgggatgtttgcgatggactgacctttaaaacgtataccagccatttccggtggattctgttcgctatcacctgggcaatcagcaaataccacaacgcaaagattgttgataaagcgatgactacgtttctggcagttaaaggagtttcagcatga

SEQ ID NO: 104153 - DNA, 198 bp, Enterobacter aerogenes
atgaaaaatcaagagaccggggagtttgtttgtgacttctgcggaaagcaccaggacaaggtggccaagatgtttacctcccattccaatgaggtagcgatttgcaatgactgcgtggctctgtgtgttgacgtaatccttcaggacataaagaccaaaggtttcgtggagaccttaaaaacaggcggtgcagcatga

SEQ ID NO: 104154 - DNA, 711 bp, Enterobacter aerogenes
atgaaagaacgtggaatgatttttaacggtgagatggtgcgggccattctcgacggccggaagacgcagacgcggcggattatgaaacctcaaccagaaccatgcccccgtggtggacattggtggccaagcaacgtgtttaaaacaatgcttcatgtcgaagaagaaatgcagaacggaaaaggcggctggggtgggcttgttggagatgcttgcccgttcggggacgtcggcgaccgcatctgggtgcgtgaaacatgggcaaccctgggcaacgaagacggctgctgtgtcgactgggaagacaacctttgcaaaggggatgagcgctcagctgcgaggatttaccgcgctagctgcgagcagagaccaggtgattacggcctgtggtctattcccgatgacgcctactggaaaccacataccaaagagcacaagttcgaaggagcatggcgcccgtcaatccacatgccgcgctgggccagccgcattctgctggaaatcaccaacgttcgggttgagcggctgaagagtatcagtgacggcgatgctgtacgcgaagggtgcagtaccgccgacatgaagagtggcgactgtgtagctgatgtgttcgcgcgcctgtgggcatcaatctacggctcagatagttggaaaaccaacccttgggtttgggttatcgagttcaagcgcgttgaaggcggtgcagtatga

SEQ ID NO: 104155 - DNA, 660 bp, Enterobacter aerogenes
atggccaataaatactcacttatctatgcagacccggcctggtcttacgggaacacggttagcaacggtgccgccgtcgatcactaccccaccatgagcttgctcgatatgaagcggctcccggtgtgggagctcgccgcggataacgccgtattggcgatgtggtacaccggaacccacaaccaggaggcgatcgagctggccgagagctggggttttacggtgcgcacgatgaagggcttcacctgggtgaagttgaaccagctggccgaactgcgcattaccaaggctctggcagagggagatgtgaccgacttttacgacttcctcgacctgctgaatgcagagacgcgcatgaacggcggcaatcatacccgcgccaataccgaagacgttcttatcgccacccgcggcgccgggctggaacgcaagcacgctggcattaagcaggtggtctacagcccgctcggagcgcacagcgagaaaccgtgggaagttcggcaccgcctggaactgctctacggcgacgtgccgcggattgaacttttcagtcgcagcgcagcgccaggctggagccactggggcaaccagtgcgccaccgcttccgttgagctgatccctggctgcgccattgacgttgttaagacggaggcagcatga

SEQ ID NO: 104156 - DNA, 546 bp, Enterobacter aerogenes
atgaatgccgaaaatgatcagttaaaaattgttgcagttgtccagtgtaacagcagtgaagcattggtgttaaaccgcccgctcaattttatctatgaagagattggaagagatttaattggtgttgacggaccattcaaacgaccactcctttattcgccagcaggtggatacttcaaagcgtttgctggaagcgagatgacgctcaatatgcgggacggaagccagaagaaaatcaaagaccactggtggtcaggttgtttgccggatcatcaaagcgtaactacctgcgatctggcatcactcaaaaaatgctacgtatttttcggcggcatggttatagcgcctgaagattataagacattgcgtgattcctacaccggctgtgtttacccgtactgggattacgagaaggttattaagtacgacgatgttcgcatggatttgtaccgcagactttggcacgaagaaaaacgcgttaaatcactaatccttgaagttaagaaaaagcattctgcttttttggatgcaactcatggccaataa

SEQ ID NO: 104157 - DNA, 282 bp, Enterobacter aerogenes
atgaacgcatacctcacttacgaccgcatcgaagaccggcgctgggctgagcagcagctcgacgacgagaaagagaagtggatcgacgaccgggcgaaagaactgatcgccatgttcccgaaatatgctttgcaaatgagtagcctgtttctcccaaaagaagcgcaaatggcactagtcggtgaaaaggcagaggaagcctataacgactatgtcacacgcatctgttacgaccgcgccgaagaagagtgggatcgacttcatccaacctgcccgttttaa

SEQ ID NO: 104158 - DNA, 972 bp, Enterobacter aerogenes
atgagcgaagtaacggacttaagtgtcatcgaaatcaagccggagcaggcgccggtgctctacgtagcaggcggccttgacgcttatctcgagcaaatccgccaggcagtaaacgaagtgccggacctgtccacgaagaaaggtcgtgaccgtgtcgcctctctggcggcgcaggtgtcccgcagtaagacggcaatcgaaaagcctggccgtgagtacctcaagcgactgaaagaggctgtgcgccctgctgaggccgaaattaagcgtttcgttgatgcctgtgacgagttgcgagatgccacccgccgccctctaaccgaatgggaagccgagcaggaacgaatcaaggcagaacaagccatgaacgcgatgcacgtcgaagcgctggtgatgaacgaagagttcgaccgtcagcgcgccgcgcagatcgaggcagaccacgaaatggccctgctgatgaatgacaagtttgaccgtgaccgcgaagagcagcgccgccaggcggaacaggctcagcgtgagcacgaagagcgcattaagcaggaagcagctgacaaagccaagcgcgaagccgaagagaggcataaagcggaattggatgctgcagcacgtcgcgaagctgatgagaaagctcgcgctgatgccgccgagcgtaagcgcaaagaagatgctgaccgtgcagaacgtgagaagcaggacgcaatcgcagaagaaaaacgcaaagcgcaggaagaagcagatcgcatcaagcgtgaagctgaagcgaaagagaaagcccgtctggccgaagagcagcgcaaagccgacgagcaagccaagcgcgaagctaacgtgaaacaccgcaagacggtcggcaccaacatcgttaacgcgctcaccagccacaccagcctaacccgcgaacaggctatcgaagtgctcaccgccctgaaagatgacctgatcccctgcgcgaaaattcattactga

SEQ ID NO: 104159 - DNA, 210 bp, Enterobacter aerogenes
atgatgcaccactacggcaccaccccgcttattcgccagtgcgtcacgcccggcatgatggctatgcatgaaggccgaacctatcgcgtctcagcagtcattcaggagcgcaaatgggtctacctgcacaccgacgcagaaattatccgcctcagtgactgcgtgattgacgttcttctggacggtcacggcaaccctatccagcactaa

SEQ ID NO: 104160 - DNA, 159 bp, Enterobacter aerogenes
atgacagtcacccacaacggcaagcagtacaccgccaaaaagcttaacgataacgagtggcagctgacgtcggtatcggcaccgcgggaaaaactggtgctgaaccgctggcagatgcatatcgctggcctcctggaacaggttgaggtgaaggtatga

SEQ ID NO: 104161 - DNA, 510 bp, Enterobacter aerogenes
atgactcttatcgaattgaccaaaaagaaaatggcaattgaagctgagctggctcagttgaaggcgaagtttgttgacgatacctcacgtatcggaaaggagttgattgccgtgtctgaaggaatcaaccaggccaataaaggccttacggttgagatggtccagcatggcatgacgatcgttaatttcggagacccgaagcaaagcatggagcggcgcgggtgtgttgaagatgcgattaacgacattgcatccgggtttccgcgcctgagcgagcgttattttggcactaaaaactacgcccaatggagcgaccagcgtgaagaccatcgttatggatatggccctaagcacggctctatctgcttcaagatcggcttaactggcaccgcacttaacaagctggcaagcggcgggctgagtgattacgacgcagaatgcgctatctactgcctgatgaacattgacgccatcaatgcggcaaatgccaaagccagggaggcatcatga

SEQ ID NO: 104162 - DNA, 156 bp, Enterobacter aerogenes
atgccagaattcgaaattaatcaccagacgggtatttctctacgagaactaatcgacttccgtcagtggactgaatctcagctatttgagctatggaggctgcagccgggtgacggggtgaatgtccaagggcagttagtaagacgcatcaaatag

SEQ ID NO: 104163 - DNA, 546 bp, Enterobacter aerogenes
atgcattcacttgcgtatcaacaaggtaacaaattttcgccaacggcgatgattttccagaatcgccgggaacctgattccagggcgttaaacatcgatgggatccgcgcagctgttcgcgcctgggcagctgattgccgcagccgtgaatttgttgcggcgctgattgtggaagagtggcggtccactggcggcaccggtctggatatcccgactgactcacaccgccagatgcagaaggtgttccgctggatcgacggcgacaccgaatatgccaccaacaacattcgacagctggcaccggcaatcatggccgttctgccgctggagtaccggcaccgccttcttccagaagacagctttatgtcccgcctagcgcgacttgagaaggaaacgagcgaggcgaaagtggctgttgcgatgaacgctccgcgtcaccagaagctcaaggaactcagtgaggggatcgtagagatgttccgtgtcgacccggacctgactgcgcctctgatggctatggtcacgtcgatgctgggggttatgtga

SEQ ID NO: 104164 - DNA, 870 bp, Enterobacter aerogenes
atgtcaaacaccgcagaaattctcaactttcccgctgtagtttcgggaatacaggagcaacgcgtggccgatacagacgatgggtacacccgtctggcaaacgagttgtatgaggagcttatcggcgcgaacctgaccaaaaatcaggccaaggtagctcatgctgtttgccgcaaaacctatgggttcaacaagaagatggaccgcattgcagactcacaactttcggagctgaccagattacctcgccagaaggttaacactgccaaaaacgaactcattgcgatgaatgttttggtgtccgacggcatgctgatcgggcccaacaaaaacctgagtgagtgggtaattccgggcactaagcctgcgccaaaatgtcaccatagtagtgactgtcaccatggtagtgacagtgtccctacggtggtgacaaaaagtgtcaccaaaacagtgacaaccatgtcaccaaaatggggacacacaaaagacactattacaaaagacaataaagacaatattaataacccccctaaatcccccaaaccggcttcgttcgatccggctggtgttgaccttcctgaatggctgtcagtttcagtctggaagtcatgggtcgattatcgtcgcgacctgaagaaaccgatcaagtctcagcagacggttactcaggccatcaacctgctcgagcgttgcaagtgcagcggatatcagcctgaagaaatcatcaaccagagcattgcgaacggctggcagggattgtttgagccgaaaggtgctaagcagcctgcccgcaatcagtctcgcgtatccgagaacttcgctggcaaggactacggccagactgaaatcccatcatgggcgagggactga

SEQ ID NO: 104165 - DNA, 855 bp, Enterobacter aerogenes
atggaactactcgaaaaaatcgacgctatcgaaaaaatgctggaggttctcggcaggccgccagagcaactccctaactgcgagactgtctgcgaaacggtgctgtgcgagaaacatggcgagtacgaacagcgtaaacgcgttcttaccagcagcctgataaaactaccgtcaccgccgactcgctgccctggctgcctgcgcgatgagttgaccttcctgtatgccgagaaaaaacgctgggaagaccgcactcgtcagcagaacatcgatcgcctgctgcgccagctcgaaatccctgagcgctttgtaacgtgcacgctggaaaactatcagccggtggggaaggagtcagagcgcgcgctgcgggtttgccaggcgtatgccgcgaagtggccagagcgcctgaagcagggtggcgggctggtgatgtgcggaaagccgggaaccggtaaaaaccacctcgccctggcgatcgcccgctacgtcatcgagaaccaccagagcccggtaattttcaccacggcgctgaagattgcccgtgagttcaaatcaacgtggtcgaaaacagcgacgcgctgcgagaacgacgtgatttcgtacttcaccactcctgacctgttgatcatcgatgaggttggcgtccagttcggcagcgaagccgagaagctgatcatgttcgaaatcatcaacacccggtacgagcgtatgaagccgaccattctgatcagcaaccagaccaaagaagaactggcagcgttcgtgagtgagcgcgttattgaccgcatgagcgatggcggcgggtgcacgctgtcattcacctgggattcttaccggtccaagggggcagcgtga

SEQ ID NO: 104166 - DNA, 345 bp, Enterobacter aerogenes
atgaccataacaatccgtgagcaggtgctggcagccctgcgcaataacccgggactaaacaacgccaagctggcaacgctaatcggcatggataccaaaaagatatccgggacggtgagcacgctgctggccgacgggctgatcagctgcgaaggcaaatacggccagcgcctgtacagcctgaccagttacggcatgcgcttcgcccctgacacgataccgggcatgaagcagggcaagtcgaagttaatacagcggacggaaacaaacgtgatctgccaggagtgccgcaacagcgcggctatgaagcgagtattgatggttttggggagggcaggggtatga

SEQ ID NO: 104167 - DNA, 504 bp, Enterobacter aerogenes
atgaaaaagaaatttatagagtggtttaccaagaacaacaacggctgctcgccagcgatggaagacgacagaagctttgtgcacgagaagacgcagcatatgttcgaagcgtaccaggctggcgtggcagaaggtgaagccagatgcgcggcgctggctgcggagaatgcggggctgaagagcatacaggaatgggcagttgcagacgtatttaagacaggagctaagcggttcgagtcaacaaaagcagcaggttttgacactgatgactgcctgcatgatgcagtgcttgtgatgctttctgaactgcaaaccccggcgaccgacgctttcctggctgaagtgcgggccagtgcactcgacaaatttgcaagagcacaggatgagcaagccaaaaaatattatgagatgtcaccggggtgctccgcccaagatgaatgtcaattcgccgctagtcaggcgtggtatttcgcagaatgcattcgcaaaggagtgcagtcatga

SEQ ID NO: 104168 - DNA, 420 bp, Enterobacter aerogenes
atgagcaacatcgacaaacagcagatacgcgccgatatcgccatccgtaaatcgatgcctggttttagcgttagcccagaccatagccttgcgcgcctaaaggccattcaggagacgcagcgaagctttggcttggaggtagttgaagcgctgctggatgagctggagcgcaaagaagagcagcgtgctaactggtttcagatggcgcaaaaacttggttcagatctggacgccgcagagaagcggattgctgagctggaggcggtgaagttcaaattgagcgatccgaaattgctctcactggcgaaggatatcgttgagaacctggttgatacgggtagttcggatcaagagtatacccagcaatacgttgactggacattcaaacgcatccgcgccgcagccggtaaagaagggtga

SEQ ID NO: 104169 - DNA, 192 bp, Enterobacter aerogenes
atggctgacaaattgaacatacgtgccgaagacgttgagcctggcgatgtggttataacttcacacggtaagcgctatacggtcaaatcattctggatggaggatgacaccgtgaccctgttcggcactgatggttctgaaaccgaatatgactacgacgaaatgctcgacgttgagagggggtatccatga

SEQ ID NO: 104170 - DNA, 672 bp, Enterobacter aerogenes
atgagcgctatttccaaagagagagtgaaagatattttagagtttggtgctggccgaatcatatctccaatcactgacgacgaaattatggagctggcgcgtattgcgctggcatcgttcgaagcggagcctgtggcttatgttatggcggatgatttgaaggatagcagcatcatatcaacgccagcatatcgtgatttaggtgaggcaatggagcggactgttggggatgtggttgcgctattcaccgccccgccagcgccggtatctgtgatggatgaagacctgcttcacatggcagcatctgcgatagaagacctgctcagcaacgaagacaggtctggtgccggggtatgggctgacgtgccagctaaattacgccgcgccgccatgcttcagtcgttcggtaattccgaacaactcaactctccggttattccggattgttgggtggcttgcagtgagcggatgccggaaagcgatgactttgtttacattttgcctcgtcctgattttggtgtcgagttgcatgttgctcagtacggaaaattcgataaaagagatgctggctggtacgcgcaggtatacgagcaaaattacggcattgaatattatccggtaagggtcacccactggatgccactgccagcagcaccgcggcaggatgcttaa

SEQ ID NO: 104171 - DNA, 288 bp, Enterobacter aerogenes
atggttaaggtattggtttatggtggtggccataatggcgttgttcgtgaagttgagtccgcaagttcacccgtaagaatcacccgtggcgactggattcgggatcgtgatgctcatcatgtaggcgggaaggtagatccagtcaactacgatgaagagttctctgtgcgtgagtttgaatatactgaaggtcagatttattttattgccgagcatggcgtaaccattccagatgaagagatcaggaagcgtattgacgtgatgcgcagcttaaagtctctgccatga

SEQ ID NO: 104172 - DNA, 243 bp, Enterobacter aerogenes
atgagtgaattcaatattgcagccaaaagccaagatgaacgcgacaaggtgaacgttgaccttgcggcctctggcgtggcgtacaaagagcgtctgaatatgccggttatcgccgaagtggtgatgcgtgagcagccggagcatttgcgtgattacttccttgagcgccttaagttttatcgtgagaagtcgataactttgccgaaaggtagcgatccggtttacctgaaacaggatgactaa

SEQ ID NO: 104173 - DNA, 222 bp, Enterobacter aerogenes
atgaaagttgcattactaaagaacccaaaaatcgttatggacgcagagttcactgacggatcgccggaaatgttagttttccctaaagactcagtcacggaagtcatttttgacggcgccgccgatgatgagttgttcgagttcattttcgatgagagaacagccaaggggttttatttccatgattttgacggagaaaaatatactttcctcggagaataa

SEQ ID NO: 104174 - DNA, 456 bp, Enterobacter aerogenes
atgattctccctaaagacggcatcaagctacaccgtggaaaccttggcgctatcactcagcatctgaagcccctcctcgaaaacggtgaatgcttccggctgcagctcaaagactggcgagagaagagaagcctttctcaaaatagcttgagccacgtttggtacaaggaaataagcgactacctgatcaagtctgggcgcactgacgccacgcctgcatgggtaaagcgcaacctcaaaaagacctatctcggttatgaagaggttgaatacaccgacttcgtgaccggaattaagacgattgaattagagctgcgccacacgtccgatctggacactggcgacatgcaccatttcatgtgccaggtggaaggctggtgcgctcagtttggcctggtgctcacaatccctcaaagcagcgaatttcaggtgctgcgcgataagcaggaggcctga

SEQ ID NO: 104175 - DNA, 690 bp, Enterobacter aerogenes
atgaacagtcagcaactggaatacgtacgtcagcagctcattgtggcgaccgcagatctgagcggggcgacgaaagggcaactggtagctttcgccgagaacgcgcaattcaccgcgacggcgcgcagccggggcaggaagaaaatcaccgacccgatcaccggccggaaggtcaacccggacggcccggcgatgagcggcagccagtcccgcgccaagggctcatccatcgcgctggtcagcccggtagagttcggtaccgcgtcatggcggcgcgcggtcctgtcgctggatgaccaccagaaggcttggctgctctggaactacagcgagaacatccgcttcgagtaccagatagcgattacccagtgggcgtgggcagagttccgggaacagctaggtgcgaagaaggtggccggcaagacgatggagcgcctgaagaaactgatctggctggcggcgcaggacgttaaggctgagctggcgggcaaggatgtgtatcagcaccaagacctggcagcactgtgcggcgttaagcctgataactggtgtcataactacgccgactactggcgggccatgtgcgccatctttaagcggcttgatggcgattctcttctctgtgctgtgagaacacgatcacaacaaaaggcgactttttcgcagcagggtattgcaaaagtcaattaa

SEQ ID NO: 104176 - DNA, 402 bp, Enterobacter aerogenes
atgtctgagaccttcactatcgtaggcgttggtcttacatcgtcatcagtcggtgtaacctttgccacgctgtttccggaggcgactccagcagtgatgctaggatcactcgccggaactgcgctatacgttctgacctcagatccccatcaactctggaagcaggctatctttgcgctgatatcgtttatcagtggcgtgttcttctccgtacccatggcgaaaatcatggccggaatcatcaacacgccgttaagcctgatgaagccaccggccagcattgaggtatcgccagctgtcggtgcaattgtcactgcttccatttccgtggcagtcctgctgcgtattctccgcaaatccaaaagcgggaagatgccggggctgggggaggaagataaatga

SEQ ID NO: 104177 - DNA, 276 bp, Enterobacter aerogenes
atgacatggcaacttcttctgatggatgcaaacgccatagtttgcctgttaatcatggtcaggctgatgtttttccggaaagagggaaagcgtcatcgcctgagtgtcgcggtactggcctacctggtcatacttgccgccggattcaacgccttcaacatactgctcggccactacgtacaggttaacctcggagatctgctgctgaactccgtcatttgcatggcggtgtggctggcgcgtggaaacctggcgaaggtcgttataacggagtag

SEQ ID NO: 104178 - DNA, 441 bp, Enterobacter aerogenes
atgcaaaccagcgaaaagggcgttgccctgatcaaagagttcgaaggctgcaaactcaccgcctaccaggacagcgtcggcgtctggacgatcggctatggctggactcagcctgtcgacggaaaaccgatccgcgctgggatgacaattaagcaggaaacggcagagcgcctgctgaagaccggacttgtcagctacgaaagcgacgtatgccgcctggttaaagtcggcctgactcaggggcaattcgacgccctggtgtcgttcacgtacaacctcggcgcccggtcactgtcgacatcgacccttctgcgaaaactcaacaccggtgattacgccaccgcagccgatgagttcctgcgctggaataaagctggcggtaaagtcctgaatgggctgacccgtcggcgtgaggcggagcgcgctctgtttctgtcgtga

SEQ ID NO: 104179 - DNA, 387 bp, Enterobacter aerogenes
gtgattagcgcactggttaagcgttactggctgcaactgattgtggtggcggtaatctgcgtgctggtgttcttcgtgaaccactaccgcgacaacgccatcacctacaaagaccagcgcgataaggcgacggtccgggcaaacacatcggaggcgatcaccagcaacgtgatcaccacgatgaacctcatccgtgacatctcacaggctacccagaatgcaaagaacgaactggccaaaaaaggcgagacgcgcattgtctacatcaggcaggcgcttgaaggcgatccgtgcgctaaccagcttgttccttctgccgctgctgacagcctgcgggaatacgcagacagtttacgttccggccccagtggtgccgataagcgatga

SEQ ID NO: 104180 - DNA, 519 bp, Enterobacter aerogenes
atgaataatccgtcagttattccggccttcgacttccgcgaaatggtcacgaccctcgacaacaagataatcaccacatcactcaaggtggcggattactttggcaagcgacacaaagacgttttgcgtgccatacgtaacctgaaatgctccgatgacttcacccagcgcaattttgcgcccattgatttcattgataaaaatggcgatgttcagcctatgtataacatcactcgcgacggatgcatgatgctagtgatgggattcactggcaaaacagctgccgcagtgaaggagtgttacatcaatgccttcaactggatggccgagcagctaaaccggcgcatggcgatgggtgaagaattgcagcatcgctacgccatcaaagaaacgcgctcaaagctgaaaggcacaatcggcagccggttgatgaacgagcggaagaaagagaaacgtgttctggctgtggagcatgagcacatcatgcaggtaacgcagcctgaattgctgatcgaataa

SEQ ID NO: 104181 - DNA, 207 bp, Enterobacter aerogenes
atgaagagcgcatttatccctgtcaccctgagcctggatgtttcagctgcgggagaagaggctcaggccgtagccagcgaactgctgcgccgaaccaatggccttagcccgcgcatctctgaagatgaggcgcttcgcatcctgctggtcgacgtgacccgggattatctgaaggccaagagcaaggcagaacaaacaacggagtaa

SEQ ID NO: 104182 - DNA, 171 bp, Enterobacter aerogenes
atgaagtacaaatcagtaactgaaggcaagccgaagccgctcacccgcgtatgggtcgaaaccgacaccgggcgggaaactaccggttacgttaaatcggacggcgagtggttcatcaactgcccgcgcatacgggctactggcgcgaaggttctgaggtggaaggagtga

SEQ ID NO: 104183 - DNA, 669 bp, Enterobacter aerogenes
atggctcatcaaatcttaagccatcagcaccataatgcgccatcttataatggcgttgcaggcgtctatcagattaccaacaccatcactggtgaggcgtatatcggctctacggttaacatttcaggacggtgggcgagtcatcgctataagctgcggaaaggcacgcatggaaacagaaaccttcaggagtcatgggataaacatggcaaaggtgtctttcatttctccgttctggaagtagtgagtaataagtcagagcttattgccgccgagcagcgattctttcgcgaattaaacccgactttcaacatcgcgccaaacgctggtagctgtctcggggttattcacaccgaagaatcaaaggcgaatatggcggaaagtcgacggggagaaaagaactgctggtatgggaaagtgccaccctgcgctactaagccacgaagccaggaattgaaagatgcgttatcgaagcgtcactctggcaaaggcaatcccatggcaggagtgacaccaccacatgccaagttcactgatgaccaggtcagagatattcggcgcgccatttcagatggtgattctcttactaccatcgccaaaagatatggcgtctcaaaggctaacattgcccatatccggcaagggcggtcatatacgagggttatctag

SEQ ID NO: 104184 - DNA, 1320 bp, Enterobacter aerogenes
gtgaaagacgcgtcaacgtcgtcggatgccgtagaagagagcggcccgacgcttcatcgcggtttacagaaccgacatattcaacttatcgcccttggcggcgcgattgggaccggcctgtttcttggcattggtcccgcgattcaaatggctggcccggcggtgttgctgggttacgccgtggccggtattgtcgcttttctgattatgcgccagcttggcgagatggtggtggaagagccggtatccggttcttttgcccactttgcctataaatactggggcccgttcgccggtttcctgtccggctggaactactgggtgatgttcgtgctggtaggaatggcggaactgactgccgccgggatttatatgcagtactggctccccgatgttcccacctgggtttgggcggcggctttcttcatcattattaacgccgtcaacctggtcaacgtacacctgtacggcgaggcggagttctggttcgcgctgataaaagtgctggcgattatcggcatgatcgcctttggcctgtggatgctgtttggcggccacggcggtagcaaagccggttttgataacctgtggaagcatggcggtttcctcgccactggctggcatggcctggtgctgtcgcttgcggtgattatgttttctttcggcggcctggagcttatcggcatcaccgctgcggaagcgcaaaatccggaaaagagcattccgaaagcggttaaccaggtggtttaccgtatcctgctgttttacatcggttcactggtggtgctgctggcgctctatccgtgggtagagattaaatccgatagcagcccgtttgtgatgattttccataatcttgacagcaacgtggtggcctccgcgctgaacttcgtcattctggtggcatcgctgtcggtctataacagcggcgtctattccaacagccggatgctgttcggcctgtcggtacagggcaatgcgccgaagtttctcgcccgcgtcagcaaacgcggcgtgccggtgaattcgttgctgctgtcaggcgtcattacctcgctggtggtggcgacgttgctgctgaactggatcatgatctgtatggcgcacctgaagtttcgcgccgcgcagcgtcgtaaggggcgtgaatcgaagttcaaagcgttactggcgccagccagcaactacttctgtatcgcctttctcggtttgattctggtgctgatgtgcaccattgacgggatgcgtctgtcggcaatactgctgccggtgtggattatcttcctgtttgccgctttcaaactgctgcgccgcccggcgtaa

SEQ ID NO: 104185 - DNA, 1497 bp, Enterobacter aerogenes
atgctctcggcccggttggcgcagtggcggcgctgcttcggtgagaaggcgccgcctgaagacgagctgccgccgccacgcggcgaagtcaagcatcctattgcgcataccggcgtgcgcaaactgcctgatgccacgagcgttggccgctggatgcgcgataaaaccgacctgtgggtacaaccgaaagtcgacggtgtcgcggtgacgctggtttatcgcggcggtaggtttatacgggcgattagccgcggcgacggtctggcgggtgaagactggacggcaaaagtgcgccagatccccggcgtaccgctgaccacctccgggacgctggcgaatagcgttctgcagggcgagatttttcagcggcgagaggggcatatacaaaaggggatgggcggtatgaattcacgggcgagagtggccgggatactgatgcgcaaagcgccgtcggcggcgttgagcacgctgggggtgtttatctgggcctggcctgatggcccggcccagatgtctacccgtctggcgctacttgctgacggtgggtttcctgtagcgcagcgctattcccatccggttaaagattggcagcaggctgccgcctggcgggagcgctggtttacctcgccgctgccctttgtcaccgacggtatcgtaattcgtactcagagagaacccgccggtgacggttggcttcccggacagggggtctgggtggcggcctggaaatatcagccagtttcacaagtggcggaagtgagcacaatccagtttgccatcgggcgtagcggtaaaatagccgttgtggcgcatctacaaccgataaagctggacgacaagctcgtgcggcgggtcaatgtcggttcggtggcccgctggcggcagttagatctcgccccaggcgatcagatcctggtgagccttgcggggcaagggatcccgcggctggatgatgtagtatggcgtggcctgaacagaacgaagccgttggtgcctgatactcgctatcactctcttacctgttttgaaaacaccgatgaatgccgggagcagttcatcgcgcgattggtttggataagctccgagcaaggattaggcattgatagcctgggagaagcaggatggagacagcttgctcagtcgcgccatttccaacatatcttctcctggcttgagttgacggtgtcgcagttggaaaacattcctggcttaacggcaacccgcgcagagcaactttggcatcgctttgcactaacacggcgcgcaccctttcatcgatggataagcgcgcttggtgtgccgcttccgcgcgctgccatgcgggtcttaaaagataattcatggcggctaattgagaagcgtgatgtcacgagctggcaaacgttacccggcgttgggccaaagaatgctcaacggcttgttgagtttattcaccatccggtcatcaagtcgatagtgctaaaacttggtcaactggaggtggacggtttttcgtaa

SEQ ID NO: 104186 - DNA, 1239 bp, Enterobacter aerogenes
atgaataatcacctcgaaaaaaaggttatgcgcaaggttaccctgcgcattattccttttatcatgctgctgtatttcatcgctttcctggatcgagtaaacattggttttgccgccctgaccatgaaccaggatctggggttttcgcccaccgttttcgggctgggcgccggcattttcttcctcggctactttctgtttgaagtcccgtctaacttaatcctgcataaagtgggagcccgtatctggatcgcccgcgtgatgatcacctggggcttagtctctggctgcatggcttttgtgcagggtacaacaagcttctacattctgcgttttctgctcggcgtggcggaagccggtttcttcccgggcattatcctttatctcagctattggttcccggcagcaagacgcgcgcaggtcactgccatctttatggccgcagccccgctctctacagcactgggatcgcctatttctgccgccctgctggagatgcatggcttcctcggctacgccggctggcagtggatgtttgtgctggaagccttgccagcgctgatactcggcgttgtggttctgttcttccttaccgatcgtccggccaaagccaaatggctgactgacgaagagcgtgcgtggctggaaaacaccatgcaggccgaggagctggcccgggcggcaaaacagagccacagcagcgcatggaaaggactggcggataagcgggtactggctctggcgctggtctatttcggtacttctgccggcctgtacacgcttggcatctggtccccgcaaatcatccgcagcttcggtgctacctcgctggagatcggtttcctcaacgctttcccggccgtcatcggcgtcattgccatgatcctgtgggcacggcattccgaccgcaccaaagagcgcagctggcatgtgattggcgcctgtctgctggcggcagtcggtctgatttacgccggtaacgtcagcacactctttaccgtgatcgtcgccttaacgctggtcaccgtgggcatcagcgcatccaaaccgccactctggagtatgccaacggtgtttcttagcggcccggcagcggcagcgggcattgccacgattaactccatcggtaacctcggcggctttgtcggcccgatgataattgatacccttttcgagaccgtagcggatgatgtcccggcttgctgtttcgtccagcgtccagcgatgctggcccgttaa

SEQ ID NO: 104187 - DNA, 909 bp, Enterobacter aerogenes; identical to SEQ ID NO: 92537

SEQ ID NO: 104188 - DNA, 354 bp, Enterobacter aerogenes
atgaaaaaaagcacaatttctatggtcatcattgccgttattgttgtcctcgttacatatcttttatttaatcctgcattgaatgaaggttcccaagccgactgccaaacaggatatgataaccaagcaattgatattattaagaaagattatcttgaaaacaggttgccgaggtggagtgaagaggtttcaaaattaggcacaccgactccagccttaagctttggaaatgtaagaaccgacgctggcgcctattctgtcgattttaagataactggaccacaatcaacaattgatagaattggtatcgttgattgcaaaaatcattcagtagaatactccataattaactaa

SEQ ID NO: 104189 - DNA, 801 bp, Enterobacter aerogenes
atgactgataccctgaccgttacagcaactattcccaatggaagttcctttaattttcagtttgaaggtatgggaaattattatgctgctggttcaagtacgtgggatgatcctgcaatggctgatgcggcacatctctataacgcgattcaatcaatggaggatggtagctttacaaaagccttatttgcagactggctacagtttaatgcgaaagggcgggaaaatattccaatgattaacgcccgttttgcaacaatggaaactatgaggtttaacgatccggggaaggcttatttccagtttgcccaatacaatgaatatgagggccatacaccgggtaataatttcacctcaggcgcctttgcaccatttctcggtttgtggcactacatctcagggaatggcgttgaaacctcgctcgatatcacaactattggattgactttcaatcagtcaaacctcaccccggtaaatgatgcattaaaatcacaaccaccaggcaactacccgatttcaagcaactttggaaagagtgtggctgaagataatttatatgttgctgctttgcttggtcgtatttctatgaagaccgagggtactctgtcaattggtgagtcgggtgaatggtcttacaatggcgttgtacgagcttataacgatacatatgatgcaaactttgacccttcccgaggggttattgctcaggcatcaacaacagttttaagctggtttaacggtaaaccatatccaattgcgctgccaggcgaaatccctgtacaactaagtggacatcgttaa

SEQ ID NO: 104190 - DNA, 195 bp, Enterobacter aerogenes
atgaaacaattaatcgtgctaacgctggcgctactgccagccctcgcccacgcagggcgcatcacgttaacactgactgacgaacaggagacagataacacaaagatttgtatctatagcaacgccaactacacggagactgtgacagttaagccatcgcagcaatgccgttacacaatgacatttgaggaatga

SEQ ID NO: 104191 - DNA, 579 bp, Enterobacter aerogenes
atgaaaggtattagccaggcgctaaagagtgcagacgaagttaaggcagtggcggcagagctacagcgcaacaccaccaccaacctgttttattgcctgtgggtgtttatgtatgaatccggcttgcgtatctctgacgtgctcaaactccggtacgaagatgtagaagggcaatctcacctcaaggtgaagcaggagaaaaccggaaacgtggtgaggccaaaagttacagcgtccatgctgtcagtggtggcacaacgcaaggcagagcaagccaatatgccagtgcagacggatttgatctttagcaagggcgatctccgtagcaaaggcaacgccgtaacccgtaacacggtattcactgaatttgggaagatgggacgtagagcaggattctctaacgtaggctgccatacgccgcgaaaaagtcgggggcgaatcctattcgagaatggggtagctattgaaacaatcgcccatttcctggggcagacagatccgcgctcaaccatgtattacatcgggtatggtcaggacgtgcaggatgatctagcagaggaattttctttagagtggtga

SEQ ID NO: 104192 - DNA, 159 bp, Enterobacter aerogenes
atgagcgatacaaagaaacaaccgcgcacttgcctacacgtacctgatgaaatctttcaagtcttatttaaggaggcgagaaatcagagagtgacagttacagaatacatcctcaatgttctgcaaaaagaggcaaccaatcttaacaagggcaagtga

SEQ ID NO: 104193 - DNA, 828 bp, Enterobacter aerogenes
atgacaaaaataaaatacatcaatactgatgtgttccaatacgtgccgattgaagacgcattcaatgaatgtacgcgaattaccaatctgaggacaggtattacagaatctctatctgctgctgataagctgttttacgtaaaaatgcgtcaccgttaccagttttttgtaaatgagcgaggaggcatttatcacgatgacattgaacaactaggcgctagcattggagttagctcatctacagcaaccagaatcatagccactttaaagaaagtaggtttagttgttgctacgctatcagggcgatctaataaatggacaatactaccgctcacgccggaaaacttcctctttgaacgtgatattaatgcgatgaaaagaggagccgcgccagaatgggtggattgtttaaaaaatccagtgttcggtaatgccaaggaagatacatctcaagaaatgaaggaagagaagcagcaagctgtgccggaaatcgatcctatgtgcgaaatggatgaaattgaagtgggagaggatgagccgcctgtcattcgtgtaaaaaggcagaccgttaaacctaaacaaaaacgtaataaatctaaacctgtgcaaaataatccattcgagtttaagagtccacgtgatgaaaaaagggattggttttatctaaaacattatcaaggtgcagagcggtttaccacatttacagattttgatctcccatatttggcactattcaaggcacagggcgcactcactaatccttatgctctggattatctccagcttagaacagatcaaatacaacaacagttagcgaggaacacatga

SEQ ID NO: 104194 - DNA, 285 bp, Enterobacter aerogenes
atgattcaatatatcaaaataaataatacaaaccaaatacagatcaacgatgcaggaaaacaagtttattattccctgctgtggttttggaaaaaccgtaaaacatctatctcatggggagagattacagaaaaatctggagtgtcccactcaggatgtttattctggatgcgagcattacaaaatctaggtgttattgagatagacgatgagagccattacctctcattcactctaaaacgtatagaacaagattcggtagaattcatctactctaatttctaa

SEQ ID NO: 104195 - DNA, 408 bp, Enterobacter aerogenes
atgggcagaaaagaacgtaacgtattaaaacgactagagcagcaatctaatattctccctccagctcaatcactagcctctcgtcgccaatttaaggaaatctccagaatagcactggaatggaattcaaagccgggtgaatggcacacagagattatcgagcacgatagccccccattatcagaggaggagcagaacgctctagatgatattctctcatcctgtgatgatgtatatttcaaacctcgtaagcgtaaacaatatattatggattcctctgatttgaggaaatatcaggtgctgggattcgaaaactatgtacattataccggatatctcagcgttaacggattaaataacctagtaaaggattttgacgcagtatattcagataaggaaagtgaataa

SEQ ID NO: 104196 - DNA, 225 bp, Enterobacter aerogenes
atgcatcaacaaacaacacagacaaaacgatttaataaaatcctcaattggtgccaggggcaggtgagagagatggagtttattttagaagatgcctatctgagcgaagaagagaagatagcagcgcttgaggaacttctcgataaatgcctaaccatgcaagcgcctctcatcgtactaagcaataaaatcaaaacaacaattaagcaattacaggatcaataa

SEQ ID NO: 104197 - DNA, 360 bp, Enterobacter aerogenes
atgaacaattctacttcttataacaccctacaatctgtattacagacataccacgataattacgccacccctatgctgaagctattgaacgggctcttacgcgacagaacgcctgaaagcctcctggcggcgattaacgcgcaagacctggcacaggcaatgctatctcatattggcgacgtagcgaaccgtatagccagcctggaacactcaacgctaacacaggatgaggctgatagtatttcagaggaaatctctgatgccctactgatgctattccagtgtattgaggaaacgcgcgaggtagcattggaactggtgccgaacaccaacacacgagaggcgttatataactactag

SEQ ID NO: 104198 - DNA, 222 bp, Enterobacter aerogenes
atgcttctaatgaaccagcccgaaaaacataaaatacagaaaatgaatgatgagtttaaaagcctgaatctagagcagaaaacatttattgctaaatcgttagatgtctctctagatgaggtggatacgttaatcattaagttttctgctgaaatgcccacgaatgataaatcatctaaagggcttcaggaactattaaaacaattagcaaaaggaaaataa

SEQ ID NO: 104199 - DNA, 378 bp, Enterobacter aerogenes
atgcaatttggaacatttcaaactctgaatggtgataacagccatgcacgatataaagtaatttcgtatgcctcggatgctgtactccaggataaactcattcgcgtagatgcaggaatccccgactccttaatcgtcggtgatttggtcgatggtaacggcaatcttgcaacctcagttgatgggattgaatacgtagtagttgagccaacgcttgcaggtaaaaaaggtttcgtagtggctgacccgcatcatgttattctcgctaaagcggggattgaattccgtaatctcgatgaaacagcggttttgattgctcttgcaaacaagggttttacatttgccgattatggcactttagcactacgcacctcttaa

SEQ ID NO: 104200 - DNA, 1038 bp, Enterobacter aerogenes
atggcatacgcagatattttttctggcaatatgtatgattttgccagtccattcacatttagtacccagatcaaccaaatcgttagtaatctatcattgttcaaggttgaacatcacagtgttaacagcattgccctagataagattaccgatattaaaaatcttgtagcacctgaaaagatgccttatgcgcattcagattggaatgctgcttcacgtcctgaatatacctcggtattgtaccagcaaaaatatacaaattctctgaacgaggtgagtagtcgagacctagagcagtatcgccagcgtggtattatggatcagggtgatcagattgcactagcaattaatgatttcagcgatgcacaatacgcgcaggtgagtaataccgtagaggttgacctcgtagaggcgctgttaggcctgaaagtggcttcacaatatgcaggacagggggatttagatttcctcgcaggtggaagcaaaaccacctatacaatggatattagcgccagtgctaacgtattccagcaactgagcgaaatcggacgtattcagaatgtgaaactaggctcagggcttgcacaagctaaacagggcgtagtgatccttgcctctggcaaagctgccgtagcactacgttaccatccatccgtgaaagatttcatggtctataccctgccgcttgagcaaggcgataacttctacacccgcactaaaggtgccaatccagctttcgaaacctggacgctaaacggtgtcaccgtgatcgatgtaaccggatactctctgattactgatcgtattggtgttgattcgttcgtgagtattccggtaatggctcctgaatctaacgcctacgtgcttcatagcggtgttggtgttcgccatgcaacgcaagggaaagatgcaaatctgtatcatcaatacgttacagttgatcagcgttggggattccccgccgtagccacggaatgtagctatctcccgatcgtgaatattcccgaagcgattatcttcggtagcgttactgaataa

SEQ ID NO: 104201 - DNA, 192 bp, Enterobacter aerogenes
atgaaattaatactcaaatcacatggtgtccacattgctttagatgccagtaatgctaccgacctaattagaataaaggcgttggcagagatgctcgacattagctatccagcactgaaacaacgtattcacagagggcaggatgtagacacagccattagggaactattagctaaaggaggcggtgaataa

SEQ ID NO: 104202 - DNA, 1863 bp, Enterobacter aerogenes
atgcttgagctaaacgtaagcaaaatcaacaacgtagttacatttaccgttgataaaagcgcaatagccgaagcgaaaaaagcggctgatgacctgcataaatattttcagaagatacaagaccctaaaatccgcttccggcagcagaaacaacgccgccagaaagctcgacaaatggtggatgatgcaaagtttaacacttcgcctaaaaacacctctgatatgaaacaacaacggattgcagagaaagcagctaaagcgcaagctagggaagcggctaaaattgccaaacgtaacgaagtcgccgatcttaaatttcgtagtgctaacatgcagatgaaaggcgttgccgggaaatatggcctagatgcagcggcacagcataaatttgctctgtttgccaaacaacaaaccgaattattcaggacagggcagcagaccgctgccagaatgaatcatgagatccgagaacagttaactctactcagacgttcggcagcagcccagcaacgccttaccgctggtgctcaggctcaatcaagagcagtgcgcagcacgaataagcgtatggattataaaggggctatatcggcagctaaagagagaggacttaatctaataggcggcggtcctggcttaatagcttccaccgcagcggcagcagcgggagcggggcttatgtatcgtatcaagcaaaagggagatgaaaatctcaacctgatcagaatgagcgagcgagttaaaactaatcccaatgcgataaaaacgatggtggcatggggacagcaacacggggttgactccgctaacgtggataaggccacggacaatatgaaagatgtgcgtgaacgtctcgctatgacggttaacgatgctcagatgaaaaatggtgaatggaagggcggggatggtggtattacagccattatgaacaaatttggatggagtaaggagcagatttccaagttccaggattccccactcgattttatccaggcaaccgtaaatgaaggtcaacgtcgagggatgaaacaggctcagattggtacgcttatagagagtttaggtgatgatctgatgcattacaccgatatgttcctgaataacggtgcagagtatagtaaaaccctgcaacagcttgttgatagtggtcagacactcaatgatgagcagattaaacaaactctagcatatggtgatctaaacgtagccatgggtaatctgatgaatggtatttataacagcttattcactggctttatgaaaggcttcgctgatggtggtgatgaattagtgagaaacacgcaggtaatcacccagacaacggagatactgggtactgagttggggaatctgactaaaaatattaccgggtttgtcggggagatttcgggggttgtttctgatttgaatagtgctcttcgttcccgtttccctgaatggtttagcgatagtagcaaaccagctacgcaagccttgtatgatggcgtaacaggaagtgctaacagtgcggcctcgtgggtgcaggaacatacaggatggaatcctcaaacagtagggcaatcggtgaaggattggctgggttttggtactcctcaagccggaaccgctgcaagcaactacggtctgaatggcgacactctacgtaatagtgctatgtcactcaatagcggcaatgcgccagcctacaatctgagccctgtatttcatctccgggtgaatccacaagtggggctaactctgcaaagcgatgtatcacggttgagtgactatatcgactggtctgcaaaagcgagtgcagattcgttcactcgttctctcacgctacaaataaatagcggtcagagtacatctggcggatga

SEQ ID NO: 104203 - DNA, 672 bp, Enterobacter aerogenes
atggatactacattaattgctgagcctatagtgagcattgacgagaggttgttaggcgttgagcttctcactcgcttcattgcctcagatggacgcccccttcaccctgaattcgtaatttcatcttgggatttagataggaagcggcttttcctatacgaacaatgtggaaacattgccactatgcaaacgtggttcgaacgaaagaatctattttgtacactgaacattgatcagcaaatggcttttttaatacgtcatgactacatacttagacaaactttcgaatcgatgccattcatcaaacttgaactttctgagcatttccctggtttggataagggattgaaaagtcccttattaaaatcgctgagccagggtgtaaatgggctatggctcgatgaccttggggcaggtaatgcaaatgtagttagtttgatagaaggttactttgaagtggtaaaaatagatcgtattttcttcaatgagcaggtgaaaaaatcaaccttcaaccagttaattgcatcaattaaaaaacactgcggcaaagttattatcgaagggattgagaatcgagaacatttgggaatactgcgtgaggtgggggtttggggattacaggggtatctttttaaatctgtcccttttaaaaacgtggatttattgctgtag

SEQ ID NO: 104204 - DNA, 420 bp, Enterobacter aerogenes; identical to SEQ ID NO: 92004

SEQ ID NO: 104205 - DNA, 573 bp, Enterobacter aerogenes; identical to SEQ ID NO: 92629

SEQ ID NO: 104206 - DNA, 2424 bp, Enterobacter aerogenes; identical to SEQ ID NO: 92008

SEQ ID NO: 104207 - DNA, 1116 bp, Enterobacter aerogenes
atgattagatttgttgatggtgattttttcgattatactgctgacattagaattaatacagttaattgtgttggtgtaatgggggcaggggtagcttttgcctttaaaaataaattccctgaaatgtataatgagtacgtacaactgtgtaaaagaggagaaatatctccaggaaaaccagcagtttggaaaaatattgatgcatatggtaaagaaatagaaatcataaatttccctaccaaagatcactggagaaacaaatctaagtacgaatatatagaaaaaggcctgctttggcttgccgaatatctagataacaaacatggtaaaataattaccctgccagctttgggttgtgggcacggcggtcttgattggaatattgtaaagaaaatgatacaggatactctttctgaaaatgagaacgaaattttagtttttagcccacaggcatcaaaaaacaataaacgagaaaaagcttctataaaccttatctacccatcactaaaagacctaaacgtatctgaaatccgacgtgatgataagagattcccagtaagattatcaaatttatcaaataataacctttattataccgggcaacttttcactgactttgatctatctataatttcgagcacgtcgcctagtgatgtagaaaaacaagctattctagatactattgatatttctgctaagaaaggatactccttgctctttggaggaactgctttcgataaaatgatggcggttattgctttacgtaaaggtatcaggaccggtgtttttttaccaagtggcatagctaaatcagctgagaaattgaattctcatggtaaattcaatcatctgactattctttcttttggtgacccttttgttcaatttaataaaagtgagtatcttccatcagtttttagccgcatttttctacctcgtagagtattattcaccacaggtaaattacaatggctcaagaagtataaaaagaatatcttacaaaaccaagttgattcatttttcctcatttcagagacaaatgataacgacatagaggcagcgaacttaattggttcaaaggctattgatgaacatgcgttatttaatctaatttga

SEQ ID NO: 104208 - DNA, 1344 bp, Enterobacter aerogenes
atggccgttcctgatcaccatagacatcgaaatgtatatcattttacgtcccttgagaatcttgagtcaataattgaaaatggacttttttcgactaatcagaaaattgcacgtcaaatatcgcatgtgaacgttgctgatgagggaatacaggggcgtagggcattgatgcaggtacctgatacgaatggttcttgtgttcatgattatgttcctttttattttgcaaaaaaaacgcctatgcaacttgctgtccttcataaaaaaaatgtagatcaacaattgattatttacctttcggtttctatattatcgctcgaaacaaaggttggttcatattttactaatgcatctgcgaatacggttattccgccaaccttttattctggtaacaatcaagcggacctgcttgatgaactagattgggctaccatagaaaataatgggtggcggtatgatgacgatgctcagaggcatcgaaaaatggcggaacttttgttaccaaatcatgttcctttttgcgaaatcaatcagataatcacatggaatcgttctatatctgacattgttaggaatatctttcaacaaaaaagcattgctgcaccaaatattgtcgaaggtgattttaaacattattatcaccaaccaggaaactggacttcatctttggtcacgggaccactatttttaaaaattttccttgatgaggcgattgaatatgtaatctcattccaacgagaaatgatgccaaaatttcaaagcattagcgatgctttacatgcaattcgtggcaacttctcagccattcaggaactcgatgatatcgatggattagatgcgaactacggacctcatcatgaagatgttggctctcatagtcgacgagtggcaagtcttgtggtgaatgcacctgagtttcatcagttagacccaattcatcaagaagttttggaattggccgcctatttgcacgacataggcaaaggtccaaaatctcgttggaacaataattacatgcatgaggcagatggggagcaccctaagaagtctcttcctatgctgaaacgaattttgacagaagatctaccagcaatgcaaatcgatctagtcagaaagataatgatattggttacctatgatgacttattgggtgaaatagtagctaaagggcggaacaaaaatcagttgttcgatatagttacctcatctgaagatatcaacatgctggtagcactaagtaaggctgatattggctcgttaaatccagtttggttggctcaggtttctgacgggatcgatgctctccggaatgaagtgctccaaagattggaggggaacggttaa

SEQ ID NO: 104209 - DNA, 309 bp, Enterobacter aerogenes
atgattgaaatatcccttaaagcggatatactcaaaatatctgttatgggggataaaatgaacgtaacctcacccaaaatgctggctcaggcagtcagagatgcacgcaagcaacgtaagctgactcaacgcgaagctgctgaaagtatgagcatgaagcaatcaacggtttcagagtttgagaaccatccggaggggacacggctggacacgctttttaagctgcttgccgctctggatcttgaacttcaggtcgtaagccgaaagggtaaaaacaaaacatctgagggttgggaccaggagtggtga

SEQ ID NO: 104210 - DNA, 1296 bp, Enterobacter aerogenes
gtggaaagattaacggttgcgctaaatggcatcattgttggtacgctggagaaaacagcgggcggtgaaatgtctttttactaccaaagagactggctggaaagagctggttctcgtgctatttctctttcgatgccgttacgggaagagcgttatcgtggcgaaatcgtttataacttttttgataatcttttgccagatagtgagcaaattcgtagccggattcaggcgcggttccatgcgcccacaaagcaacctttcgacttgttagcacgtattgggatggactgtgttggggctatacagctttggccttatgaaaccgatattccatctattcagagagtggatgccgaacccttaactgaaaacgaaatagaacatctgctgcagggatacaaagatgctccattgggtatgcaggcagaggtcgatgattttcgtatttcactggcgggtgcacaggaaaaaacagctctgctctggtggaataatcgatggtgcaggccacgcgggagcacaccgacaagccatatttttaaactacctattggctatattgccaataacggaattgaccttcgcgagagcgttgaaaatgagtggctctgttcaaaaatagcggctgagtttggttttcccgttgcggaaacccgagttgcgtattttgggcaacaaaagatactgattgttgaacgtttcgatcggcgatgggctaaagatggtcagtggctgatgcgtttgccaacggaagacttttgtcaggcattgggtgtagctccggcgcttaagtatgaatctgatggtgggccaggaatcgccagaagcatggatttgttactgggttctcaacaaccgcttgaggacaggattttgtttttcagaagtcagatctttttctggatgttggcggcaattgatggccatgccaaaaacttcagtgtattccttgagccaaacagcgcttaccgtatggccccgctttacgatgtaatgtctgcataccctttgatgcacccgaaaggtattcctcccagaaaagctaaaatggcgatggcgctatccggacgtaatcgccattttcactggagtacaatcatgccccgtcattttctttccactgcgcgagaagtgagctttcccgttttgcaggttgagcaattgctggcggagatgaaacaacgaactgaatcggtgatctcaaaagtggaaacgatgttacctgcaggattcccagagcacataagcgaagctatttttgaaggattaaggcatcagtcagcgcgtattccgtag

SEQ ID NO: 104211 - DNA, 678 bp, Enterobacter aerogenes
ttgaatgatgtatatgcttttgatctaaaattggtctgtggtgggtatgcttatttctcgacagatactttaggttctgctcctgatgatcaaggcctggagttccgtactccatcgcctgtaataagtgagcgattttctcgtgcattggaagagctaggccaaacttacacaataattaatgatacaaagtctctttatgagtggacatgttttcagggctgggctcttgtcgatatttcttttgcttatgagcacatgcctcattggttgagaaaaaagaaatgcttaatatctccttttggttcgtttacagatattgcgttggcatcagattccgttaggaaacgaacattccgaggtaaatttaaaaaaagaattcttgatagagataataatcaatgtgtgatttgttcaagcacagaaaaccttactcttcaacatgttgttccttattcaaaaggcggggaaacaagctacagaaatttagttaccctatgtgaaccctgtaatcaaaaacttggatctgattgttatcgagagttgttcagattggcgggtttaaggggcgattacgaaccttcacttgtaaacaaagttatgccggatgataaagctcttattcgtgcagttcaattctcgagtaatattatgcatacacgttgcgatctttattga

SEQ ID NO: 104212 - DNA, 234 bp, Enterobacter aerogenes
atgactatttcaaaagaagaatttgaacaactcaaagcaagaactctcgcgaccgaagtcgcgttggcttatacgattacaaacctttcagcaaaatttagtgatattaagccatctgtggccgaggctttaaagttagatgcaaaatcaaatacggaaaaagcacctcaaattgcgaaagcattgaacgatttagctgggttgatcgagacttttgcttttacgcaagactaa

SEQ ID NO: 104213 - DNA, 222 bp, Enterobacter aerogenes
gtggaagcgctgaaaaagcagctcgaagatgttactaaatctactagctgctcaattgaagcgcttcgcgcagatgttcattcggctttaaatcagacgagtcaggagctgttatgtcggggggggggtactgaaaatacggcccaaaataagaccgtatttaataaaatagagaacgaaatgatgaacgctacgttctccgggatcattagtcttgcgtaa

SEQ ID NO: 104214 - DNA, 1104 bp, Enterobacter aerogenes
atggaacatcgggtgaataacttcgctgagtatcgtggggataagctcaaattagccagaatggctgttgggctttcctgcgaagagttagctgagaaaattggtaaaacaaaacaatttgttagtaaaatggaaaaagggttcaaaccatcagaacagttgttagaactaatttcatctgcactgatgattaaacctgatttcctttttactgagcgaaaatatgctctagaaagcgatgtttgccattttcggagtaaaaaatcaagaacccaaacattaaccaatagcgttctggcaagagccgagattctcaacataataatctccgccgttgagggtgaaatcgagttccctgatgtttgcatacctgagcaccccggtgctgaattactgacacctaatgatattgaacgcgtagcggaagactgcagaagagcatggagtttaggactgggtcctatatcgtcaatggtcaaactggctgaaagtttgggggttattgttgctcatgttacaggtgtggatgatcgtgtagatgcttttactgtccacaacaacaggccagtaatcattcggaacaatgtcaaaaagagtatatgtagatttcgctcagatttaggtcacgaattggggcacttggttatgcacgaaggtataactacaggtgataaactgacagaatcgcaagcggatcgtttttcgagcgcattgcttgttcctcgactgtcctttataaaagagtttccccgaataagaggaagacagttcgattggaacgccttagttgagtttaagcttcggtggaagatcagtcttaaaatgtgcatttaccgtgcaacaactctagggctactcacacaggagcaggcaagaacgggttatatgcatttgaactctaaaggatatacgaaagttgaacctggagatgagtttattcgcccggaagaaccaggtatgttagctgaggcgatcgaaatgctggatgatgttacatgggtgaacattcttatgaaaactggtttaagccaggagttggttagggagttattctcggtcaaccgtccactgtcaaatcctaaaaatctacttcaactagtttga

SEQ ID NO: 104215 - DNA, 651 bp, Enterobacter aerogenes
atgagtgaaaatcagctagcaccttgttgggaatttcagccttacctcgctgaaaacaatgttcgccaactgttagcagagatcgctaacgtgctcgaacagctctactatcacaagcacacattggacagcaactggtctgaaggcgtaagagcttatgactgggtcagaaatcatcttattcaaagtgaaggcacgcttccgggtcttgaaatggtctctaagggactggattatgttgttgcgttaaataaagttccactccagttttccaaagattgcattaataaccctaagaagaagcatcgtcttctccgaaatagggtggagcatgagcaactttcattgttcggtgaatctgaagccgagcaagatattacatggcggatcatcgcagagtcatttatttccgacgaagaagatggcgaactggaatcaacattacctcgttgggaagtagccttagttgggtttaacgcatatggcgcccaagtcagtatggtttcgcaccaatctactgcttcagcaccgcttatgtctcttgataccaactcccttccggatgaagctgagattggcaaagcctcccttcgccgtcgtaaaaaagatcaagatttggatgtgagcagtaatggaacatcgggtgaataa

SEQ ID NO: 104216 - DNA, 795 bp, Enterobacter aerogenes
atgactacagcatttggaaaaacatgtagtttttgggccgttgactcaagatggacgtttaagttagacaacacccctggagacaaccatccaacccaaaaatttgtggttgcagacgctgaaattacaatttttgctggtgatgagaatccaattctggtagaacaagcaataatccttgaattgatctcacaagaagattacttcaaactaattgcaaacttgactggcgaatctctggaatccattacagtttcagagaacaatggttcgataattgactttagtgggagtcatttttacggtgaagaggatcagcaaccgcgaaaacagactcatcttcactatgtaggaagtggaggatcacacgcttgtgattttttctactactctggtaagaagaaaaattttttaagctctctcggatgtaatgttcttggcgcaatgagatatgcgtcttacaaagatagggctactggcggggctaccaaaatgaagatttggacaccttcgcacaactacgggaacatgtctcattacgagcaaatcaccggtggtgacgttcctgcatatcattcgtatgtttatcaaaaggtacatagcatgcttactcagctgaatcatcaggatgatttgcagttgagcgctgaaagctctattccaagtgctcgctgctcttctggcactcaagaaaacgggaatctgcgtaaggtttcttttgcttctgcggttcgtcgtcagcagaatcgggaagagcgtaagcgcatgcgtgccagtagcattaacgaatcatga

SEQ ID NO: 104217 - DNA, 204 bp, Enterobacter aerogenes; identical to SEQ ID NO: 8890

SEQ ID NO: 104218 - DNA, 315 bp, Enterobacter aerogenes
atgctattgtcgctgatttgcggcattccgtttctctccccggtgctcgggccgggggcagccatctcgcaggtcatcggagtgatgattggtacgcagattagcgcgggtacgatatccccggccttcgccctgcccgcactgttcgccatcaacgtgcaggtcggctgcgacttcgtgcctgttggcctttcgatgcaggaggcaaagccggagaccatcgcgaagggcgtccccgcctttctgctctcacgtcagttaacagggccgctggcggtcatagtcggctggctgttttccctgggcttattctga

SEQ ID NO: 104219 - DNA, 1014 bp, Enterobacter aerogenes
atgagcaaaatcagagccgccgtggtcggcgcaggcatctacggcaaacaccatatgaatgcgtaccgccataacccggacacggtgctggtcgccatctgcgacaccgatacagaacgctgcgacgaccttgccatggcctgtggcgtaatcggctatacccggctggatgtcctgttgcaggaggaagctatcgacgtggtctccgtagcgacgccggacccgtaccacaccgaatccatcctcaccgccctgcgccacggcaaacatgtgctggcggagaaaccgctcaccacctcggtacgcgagtgcgagcttatcgtggagatggcgcagcagcggggcctgctggtcggcgtcgattttcataaacgctgggacccggcagtgatgcgcatcaaaaccgaactggagaaaccggagaccgggcgcatcctgcgcggccatatcagtatggatgatgtcatcagcgtgccgacggagtggctgaactgggcgggcgcaagctccccggtgtggtttctcggctcacactgctttgacctggtgcggcacctctccggccaggaagtggtctcggtgtatgccgtcgggcagaagcgtctgatggtcgagtgcggcctcgacacctttgacagcgtgcagagcctgctgacgatgggcgatggcagttcgtgggtggtggaaaactcgtgggtgctgccggagggctttccgaaggacaacgacgggcgtatcgatattctctgcgaggcaacgtatatccgcagcacttcacagcatcgcgggctggaaatcaccacgccgggcatgacgctcacgcccaacagctatttcatcaactaccgcaacggcgttgccagcggttttggtatcgaccccatcaatgatttcgtgcactcagtcagacataaagcgccctacccggtcaccgccgaaaacgggctggcggtaagccggatttgtgaggcggtacatcgcagcctggagagcgggaaacctgaaaatgtttaa

SEQ ID NO: 104220 - DNA, 231 bp, Enterobacter aerogenes
atgaaacatcgtatatccctgaatgtcaccgtcatgctggaacgcaatctgttcgccgccggccgtgctgctggagtgaacatgagtcagactctgtgcgtagcccttaatgccgaactgaaaaagtacgcagccactcactggaaagaagaaaatcgggaagggttggaagcgcttaaccgctttcacgatgagcatgggcattttagtgacgactacaggacgttctga

SEQ ID NO: 104221 - DNA, 189 bp, Enterobacter aerogenes
atggctggcagccaccgagaacaactgaaattcctcgggcacctgttaacaatggttaccagcctccacgccaaagccaaccaaatcaagttgaaaaccctcccccaaaaaaacgctaaaatctcagttggggctatgcaggccccaatatatcttcgagaattttgctatccaagaccaccacggtaa

SEQ ID NO: 104222 - DNA, 615 bp, Enterobacter aerogenes
atggatatatgggaaaaaagtaaacttctaatttttgtactgtttgtaatgcctggatttattagtatgaaaatatatgatgtgtttcagtctagaccggggcaggactattctaaaacactaattgatgttgttgcatatagttgtattaactacgctttgttattgatacctatctactatgtagaaacttcgtcggtgatggttaaccaccccgtttattactatcttttttatttgtttactttctttatccttcccattacgttgccattattgttgatccttataaggacgcggcgttggtttactcgttatatgcctcacccaactggtagaccatgggattattattttaggcaaggtaaaaaatgttgggtgatagtgacgcttaagagcgggaagaaatacggtggtcgatatgattcagagtcttttgcatcaagttctcccgaacctgaacaaatttaccttgaacagcattgggccttagatgttgatggtgatcttgatcataaattaagagatacacttggtattatcattttgactagtgagattgaaagtatagagtttattgagataaccagtactcctgtgactgggacaccatag

SEQ ID NO: 104223 - DNA, 1038 bp, Enterobacter aerogenes
atgggttttctatcgaaattacgtcaatttctttcacccgaaaatagcaccagacagaccgtaaagcattcaagtgaaaatcatacaaaacgagagcgcaacgcaagtatccggaaagagtggctaacgttaaacaatccctatttttttggcagagcgcatatttcacctgacaaacggtgggtcttgggatgctgtgattcagatggtaacggtattggcggttatcgagaaaaaggctatggcagagttctgctcctagattaccacgaagatcgcgtcgtttttgaattgacaaacgttgctcgccctgtagcggcagcaatagccgactcagggcgctttatcgtacaagatgcctgctttggctctagtctgcaaagtgaactcattgcagtgaatcctgacaaaacagaagaatacaggcgtcactttaaggcgattatcttcagtctggagatttctaaatgcggtagatacgccgttgtgcaaacctgtaatgctcctagtgaagacggaaatatcctgtcagtgatggatttgcagaccagatctattctgttttctgttactccatcaaccggttgggcgtcccgctataaattcaaagtagacgctgatggactgttggtatcggtcagttgcgagcatcggggtattggctggttcagctactcgccggatggaacattcagcgatagctgcgcttacctaaaggcaaggctgaaaaaaggagattacagcctgaaaattcaagctgcgagagagctgttggattcaaggggtgaagaagaaaatgcccggatcgttttaaaggtagtggacacggcactttccgaaggagctgatgctcggtctgactggggcgctactgcacatcgaattcgtggagaagcctttgaaattttgggagagcctgccaacgcactaagcgcatatgagatagcactggaactcaatccaaagattggcgtaaagagaagactaactgcacttaagaagctgttatcgccaaacggattgcagcacgatatttga

SEQ ID NO: 104224 - DNA, 597 bp, Enterobacter aerogenes
atggacttagacatgttcatggcattcaatttaaagacacttaaagaaataagcgagaaaacatacataagttgctggcatagcagtgagcatgaatccgaagccatgtggaaactgtattgcaaaaatccggctaatggtgttgtcataaaaacaaagaaaaaaacactccaaacacatcttgaaaataaaggcctaaacaaactgcagttaaagtcggtaaagtacgtaccgaatttttggataaagcaatacaacccagaatcagatgttttctttagcaagagaccatctttcgaatacgaaaaagaatttagggctgtttttcaagaaaatacatttactaccccttctgtaaatggcaagctaattccagtatcccttgttgaactattagaagaaataagaatatcaccgtttgctgatcaaaatttcaaaaatgaagttttagaactttcaaaagcatatggactagacacaaaagtcaaaggctctgaaattgaaatgcacccaatcatgagcgttgaggaaaaaataattgcagaaggccctaattggtatcagtcaacaatcaggctggcagtgcgtggcgcataa

SEQ ID NO: 104225 - DNA, 237 bp, Enterobacter aerogenes
gtgtcaactgagtttatatggcgataccttgatatagaaaaattttctatgcttctcaaacaacaagctttatttttttgctcagcaaaaaaatttgaagatccgttcgaaggcgagtttgcttgggggcgtataggctacgaaaaattcattgagacacaaaaaaaaactatgcgctacccatggaggtggcatggacttagacatgttcatggcattcaatttaaagacacttaa

SEQ ID NO: 104226 - DNA, 240 bp, Enterobacter aerogenes
atgtattttatgcgggctttactggcccgtttcacgcttcccgcatttttttacaaagttttgctaatttttccacgcaactatagcttccgctggaggcgtataaaactataccctatacttggaagcgatcttatcgcaaacaccttcataaatatcttgatggattcgatgtactggatccccatcagaatcggcatcgctcttaaaagatcatttacaatctgggaaaataaataa

SEQ ID NO: 104227 - DNA, 876 bp, Enterobacter aerogenes
gtgattttatatataataggtaatggttttgacttatatcatgacatgaaaacaggttatagcgatttcaagaattacgtgaagagagaaaattatgacgtatacaatgctgtggagaaatttgcacctgccggagatgaatggaatgagctggaatcatctttaggtgatatagatttttataacatagttgaagaatgtgcgatgtatttaactccttacggagcagaggcttttaaagccagcgaccatcatgactatgaatttgaaatcgatagaataattggaaacctaacaaccgacttactggggcagttttgtaattgggttagcaagattgaagttcctgaaggtgatcaattcaaaaaattcctaactcttgaccctaaagcaacctttcttaccttcaattatacaaatactttggaacggctttactcgataaatgaagttaatataaaacatatacatggggccattgaagatggtagcgatattattttaggtcatggctgggagcgaaccagaactgttaaccctgctccaggcattgatcaggacattcgggagagcggagcttatgaacttttggatagaatgtttgattcgaactttaaaaactgttctgaaataataagtcaagagagtgtatttttcaattcgttaaattcagttactcagatagtggtaataggacattctctttctcatgttgactctaagtattttaaagagatattaaaacacgctccccaaagtacaatctggcaatacgcgctacgtaacatcaatcaagaccaagaaaaaacagatttacttgttaatctaggagtcattagagaaaacattaaaaatgtgctaataagttctctttga

SEQ ID NO: 104228 - DNA, 1308 bp, Enterobacter aerogenes
atggctaaccataaacttactgcaggaaagcaattaattgagggaattgtccagttaggtcgggttctaggttatcatgttgaaaaggagttccctgttgataaatcttcatatggtgagccaccagcagttgatgttgcatggttttcacaaaagggaaatcgttttccactctttatcttcgaagttgaaagtaaagctaccaatgggatgacaaataacccattaaaaatttatgctcaagaaaacagaacattcgagaagcctctttttttctttcatgttgttgctcaaggaggtacttgctctgctcgacctagaaatttggaagctcaatatggtaaacacaattatagaatttacctcgttggtagcaatgcagcgaatgatctgattaaagatgttcttactcaacatgctcgcgtaaagaatgatgttagctatctgcggttacataatctacttacgtcagaaccgtgggcgggaaaagttgattattctcagttgctcatggatgcagttaatttagggatgtcgagggaaaatattatttcttcatacatcaaaataagtcgttgcgactctaatatcttccctgacttagtcaagttaattatggctgatgctaaaaataatttctccgatacgattttaaattcatatcttggtgaccaatggtgtgttccaattattacgtcacttttatgtgggttaaataaaaatactgaaatctctaagtactggtcttcgttgttaattaattggcagagaaataactcttatatgcctatgattacccctgcttttggtttggcaagagattatgacgaattcattttgggatgtgcgccacagttaatgacactttgtattgccatatcatacagagacaaagacttatgcatggagtttgttggggttctcagtgagacattaaacaaaatcggactgtgttgggaaggtttaaatactgcaatatacttgcttcacattagcgcctcgataaattcaggtgaatcatttgaaaaagccagaagctatattatggagtttgaggagctagatgaaaaagatattttcaatcctccctcatgtgtttctgtaatggaaggtgatgttgaagattattttctacgtggtaaattaattaaaattcccgaaataaaagaatttgccaaacaatgcaaaattaaatatcaaaaagaaaaaatgagtaaagaggctatggctctacaatcacttgacgatgattcatatatttatgagtggtctgctgatttacttgcagcgctttggtcaactaactga

SEQ ID NO: 104229 - DNA, 216 bp, Enterobacter aerogenes
atgactgatattttaaaatcgttatatgatgctgcatgggatgaagattttactaaggcaaaagcagctattgaggcgattagcgccgtgccacattcagctgaggatcttgaaataactgcggagcgcttggcgccaatcgctttacgtgatgcctctttagcccaggcagttgtattaacattggctaagcttgcggaaaataaagctaaataa

SEQ ID NO: 104230 - DNA, 1506 bp, Enterobacter aerogenes
atgtcaacgttgagaattggtatggaaatccaagagtttgtagggcattacaaaaatcatccagtgcttttcatcggcactggatttagcctaagatatcttcaaaactcatttagttggaatggccttctagagtttatatcctttcaactgactgaggatgaagagttttactatgatttaaaagctgaatctatggtaaatggggagtatagctatgatctattagcaagtaaattggagttagaatttaacaaacgattaaccgaagaccgaaacgggaagtttgtaaaaattaacgacatattttatgacagcatgaaagaaggtataaagttaagcagattcaaaatctatttaactcaattactgacccctctgatgataaagcccgaaaagagtaatgaaattgacgctttgattagagcgcgaaaaaatataggctctgtaattacaacgaactacgacagattgtgtgaaaaattctttgaatttaacccgctaattggcaacgatattttattaagcaacccttatggctccgtatataaaatacatggttgcgtcagtgactctaataatatcattataacacgtgaagactacgataatttcaataacaaatatgaattaattcgtgcacagttattatctattttcatacataacccgatcatattcattggttatagcattagtgactccaatataaaatcactcttgaagacaattttttcctatgtaaatgttaatactgcactagcaaaaaaaatccgtgataacttccttttagtggagtacgcgccagacaatcaatcaatagagataaccgaacacgatattgatattgaaggcatggcaacaattagaataaataaaatcaaaaccgataattacacagctatatacgacgcgctgtctaagctcgtactacctgtatcagcaatggatatcagaaaagttcaaaaagtatggaacactataaaaagtggcggtgaaataaaagttaacatcactgaaaatatcgacgaactcaaaaacgaggatatggtgttggctgtcgggtccgagaaaacagtcaaatacgagtttcaaaccaaaactgaaatgattcaaaactattttaaaatagttgatgaagcaaactcccaacttatttcactcctaaataagcaagtaatatcaacaagagaaaggtttccaatctttgccttttcttcaatttgcgaaaaccttatcaatgtagataagtataaatcacgacaaatagataagattattgatgatctaaaaagatatgttagggattgtgaaaacaattatacatcaattactgacataactaacaatctcgcagactggaaagttattggaggaattatgtatgcagtcatggaagataatatctcccttagtgagcttaaaaaatatcttgaagacaacgcaggtcgatgtgataccgatttcaggaagttattatgcctgtatgactatttagcatactga

SEQ ID NO: 104231 - DNA, 630 bp, Enterobacter aerogenes
atggaaaccgtaggacaacgtataaaaagacttagggaacggcttaagttaagccaggcggaacttgctgagaaatgtggatggggataccaatcccgaataggaaattatgaaagggatactcgaagtatcagtgtcgaggacgctgtagtccttgcttcagcgttaaatgtttcccctggcgagctgctttttggtacccctgataatgcagactttatatctcctgggcaaaggtctgttcctgttgttagctatatacaagcagggatgtttgccgaggcggatagcgtactttcgccagagggtatcgaagaaagcatatctttcgacggccctgcgtctaacttggtctttgcgctgagaatcaaaggcgattcgatggaacccgaattcaaagagggcgatacggtaattattgatcccgcggtttacccgcatccgggggagtttgtcgtcgcgaagaatggtcagcatgaggctacctttaaaaaataccgttcaaaagcggatgggggttttgaactggtccccctgaatcaggactacccgaccctagattcagcaaagcataaagttacgatcatcggaacaatgattgaacaccggatacatcgcagaaaacgctga

SEQ ID NO: 104232 - DNA, 213 bp, Enterobacter aerogenes
atgaacaaaatatcagcggtaagaaaaagtatcggtattacgcaaaaccaattggctttgattctggggtggaaacaatcccggatcggaaattatgaggcgggagtacgcacccccgatttacgttcgtgccggcagatcgtaaacgcactaaatgcctttggcgctaaatgttcattggactccgtttttccacctgatggtaaggcgtaa

SEQ ID NO: 104233 - DNA, 2220 bp, Enterobacter aerogenes
atggcggacatcgtaaaaagagggacgacgcctgagcaatgggatctggccgtgactttattcggacgagagaacctaatcccgatagcctcagaaggggatctgtcgccaaactcgtcactggaccctaaatcagtcggtaaggtcccgagcgttcacaacagcaacggtaagattgttgggtttaaagactggtctgcgtaccgcgccagcgacgctgacgtaatacgctggaagagacgcggatacggtatcggcctgatcctggggcgagaccgcggcgacggttacgcgctgcatgccttggatgcggataccgccagcgatgcccatcaggacgccgtgtacgaggagctgttccgacacctcagcgtttaccttccgtaccgcgggcgggataacagcgctcgccgggcgtatctggtctgggcgccgccggtgccgaaacatgtgcatgagctacctaaagaggatggcaaaaaggctgctattgagttgcttggcgtcggccagcaggtggcaaccttcggcccccatccgtcgggcagcgattacacctggtatgacgatccgctcctcggcaacgagtacacacttacccccgaggatatcccggtgctgggtgctgaagcgctggccgcgttctgggcgtcgcttaaagaccgcttgccggttgtcgacagctatgtcgccggcgttcgtcggctgcgtgacctggcggataacgaccctggtgcaaccgatgacgtggccgactggctcgatgcgaacgggtggacactatccgtcagttccgacggctcacgcaaccttaaaccctttcgcgacgaatccgagtacagcaatggctgcagcgaaacgtcgattaagtatttccccgcgggtactggcggttttcagcaggggcatttcaaaagcatgcatgccactgatactggcctttcagataccgaatggctcgacggctacggctatcgtgtggacgattttgaagacctgaccagcaccgaagtgtccgagcccgcgccgctgccgcctttcagaagagacaataaaggtgccatcgaagcgatcatggataacgtagctatggccttatcaaggccggattttaccggggttgatatacgttacgatatcttcagggacgccattatgctggcccctaaagggtccgatggttggcgagcatttggcgatgaggactatagcgagctccgcgttatactctcccgtcgtagcttcaaagaggtcaataaagagctaatgcgcgatgcggtatttatggtggctaaaagacagcctttcgattccgcgactacctggctgaacgggctcgagtgggacggcgtgccgcgcatcgagcatttctaccatacccacttcggtaccgccgatacgccatacacccgcgcggtgtctatgtacatgtggacggcgctggcgggcagggtgctggagcccggcatcaaagccgacatggtgcctattctcgtcggtgctcagggactgcgtaaatccgcgggtattgccgctctctctccggacccagaattttttgctgatatatcttttgctgataaagacgacgacctcgcgcgcaagatgcgcggttgcctggtggctgagataagcgaattaagaggtcttaatactaaagacctcgagtctattaaagcatgggtaaccagaacgcacgataaatgggtaccaaaatttaaagaattcacgaccatattcgctcggcggggtatccccctgggctcgtctaacgaagacgagttccttgcggacaagaccggtaaccgccggtggctgccagtagacgttattgaaatggttagcaccgacgccattgtccgcgatagagaactgctgtgggcggaagcccgcgagacgtttaagcgcctcggcggtatccagttccgcgatgctgaacgcctcggcgcaagcgtccatgagcagtacaccattaaggacgcgtggctcgagacggtcgagaaatggctcaatacacctgacctgatgaccaatgacattccgcgaaattgcgaatttttacgcgctagcgacgtgttgcgcgatgcgattgggttagacccgcgccacatcggaaagcgcgaagaaatgcgaattagcaatgttttgcaaaattgcggttataagcgcgttcagcgtcgtgtcgacggaaaaatgacgcgtatcttcgagccagtgtaa

SEQ ID NO: 104234 - DNA, 309 bp, Enterobacter aerogenes
atgcaattagctattgatttcgaacaaggtgaactgctttgcccgcattgcggtgggaattacgtacaccacggcgctgtggaggtttttaactgtaaggaagatgccaacgaggggcttcatgttcgcatcgaaggagattcgcttaccgcagacaggaatttaaaaggtaacccaagctctaggcgtcatggattacgaattgcgctttggtgtgaatcctgcaaaggaaactcgtaccttacgattgctcagcataaggggaatacgctaatcgacgtcgcaccagacaacaacggcaaggagtaa

SEQ ID NO: 104235 - DNA, 294 bp, Enterobacter aerogenes
atgccagtcgtcgtcacagttaaaacggactggttgcgagtggtgaccgatatcactaacactgggataccactgcaggagctggccaccgggcttgatgtttcaaagtcagcgctcattggctggaagcaggggagcagccccaaccatcatacgggggaagcgcttatcactttctggtgtgaagtgacacatcggcatcgttcagaacttccggtgcaggtcatcaggcgtcgttttgttcgcagcggagcccgtaatttttggccgaaagaaccgacgatcccccggtaa

SEQ ID NO: 104236 - DNA, 276 bp, Enterobacter aerogenes
atggctaaaaaagactggcaccctgctgacatcgttgccgccttacacaagcgcggcaccagtctggcgaaactgtcgcgggaagcggggctggcctcgtcaacgctgtcgaataccctgacgcgcgcgtggccgaaaggagagtggctgattgccattgcactcgacgtgcatccgtctgaaatctggcccggccgttacctcaattccagtaacaaacgtgaaccccgtaaaccgcttcaccccatgacaacaaccgacaactccgggacataa

SEQ ID NO: 104237 - DNA, 180 bp, Enterobacter aerogenes
atggaaaccgctgcacggatagctgatgtgctgaatgttcccctaccatggttgttcacttcggatgagaatcttgctgaactgattctcaacttcgctgccctctctcctgatgcgcaactccagttgctggaaacgtcccgccagatggtaggtatctcccctaaagatgatgcttaa

SEQ ID NO: 104238 - DNA, 327 bp, Enterobacter aerogenes
atgaatacaagtaaccattacaacgatattttttgccgtcgcctgaagcaggctcgactggcaagtgggttttcccaaaaacgtctggggatcgccgcgggtattgatgagttcgtcgccagtacgcgtatcaatcgatatgaaaagggtgtacatgaaccgggtacagagattgtgcagaaattggctgaggttttgcgagtaccgttggcttacttttatgctgaagatgatgatttggcggagttgatgttggtgtttttgttgctatcacaacaagaccgttctgaaataatgacttatgcgaaaagcaaaattataaattaa

SEQ ID NO: 104239 - DNA, 1338 bp, Enterobacter aerogenes
atgattccacaagactttttagggcgttttgtttaccattttacctcagtatataatttaaaaagcataataagagacggattattaagtacgaatttgaagaacaaactaaatataaaaaacgttgatatttcgaataaaaatattcaagcgcgccgaagccaaatgctcgttccttgtggaagaaaaggggtggttcacgattatgttcctttttattttgcaaaaagaacgcctatgcttcttaatgtggtaaaatccaaaaattacgatcaggtcgatataatgtttttagccgttccgatagaaaaggtactcgaaaaaaatgttgtgttttctgatgcctcggcaaatacaaatctaccgccatctttttattctgaaccaaaagaccttgaaaatctaaactgggaaataatagataatccgaaatggtcatatcctgatgataatgaaagacatcaaaaaatggctgaaatgctcattcatgataaagtggaaattaatgaggtttcttttattgttgtgtggaatgataattttaaagagtacgttcaatctattttaaacaggaactcgcttgagaatattaaagttgtaactgattatgaaaaatattttaagcaccattatttttctttatttaatgaatctggaagaaagaatattattacagggcctcgtgttctgttgaagttaactaatgataatatagataagatttgtgataatcggcaacaggattgcagatttgatgggttagaggaattggtcaatgcgatagaagacgacttttcatgcattaaggagctaaaagaaattgaagggcttataacagataacattatccataaagagagtgtgagtgatcatagttgtgcggttgcagcgttggtaaaacaagacgataaatttgaaaaatacaataaaaaccaaaagttaattttagttctttctgcttatttacatgacataggcaaaggtcctaaatcaagatggcctaaaggcatacagaaagtagatgatgatcaccctcgaaaatctcttcctatgttagagagaatattgtgcaatgaagtgtccggactgactaggagagatatcagaagaattcatatgcttgttgtgtatgatgatcttgttggtgatatagttgcaaaggggcgtaataaatgccaattccaagaagttatttgcaataaaatagacgttgacttattgatatctatagcaaaggctgatatgggagctattaatccagtgtgggtggaaaattatcaggaggcaattgaggaattacgacaagagatgtatgattttttagaaaagaccgcgtga

SEQ ID NO: 104240 - DNA, 351 bp, Enterobacter aerogenes
atgttctaccctgccctgaacaagcttgcagagaccattttcatgcataaacgctcgcaatttctgttactggccctgctcacagggccgcaggtctgggcctccccggaatccacccagctcgcccttgcgctgaaacaactcgacggcgtgaaaacctcgctggaacgcgcccggagcaactccagcaccgatccacaatcgcgctacttcttcgactacttacaggcgcagcaggacatctccgccgttgaacagggcatccgccgctaccttaccccggtgagggtacagccgcgcgtcgtccagcccctgagcaccagctaccagcgggagaaccccgatgactga

SEQ ID NO: 104241 - DNA, 951 bp, Enterobacter aerogenes
atgaaaaatcaaagggcttgggctttcaaaacaataaataaaaacgaactgcgttatcgtggcaatgatggttatgatgacaatccatttgaatcatattcttacgataactttgttgctaattataaacaggtggaaactggcgatattgttgtgatatatgacagggaacgagtaattggtgtggcaaaaataatctctcttataaaagaaaactctcataaagaaataaatcaatgccctataaataactgtgatgcagaaaaaataagaaccagaactaacaaagctccagaatggagatgtagtaatggccatgaattcgataagccattaaaaaaaagcatacctgtaataaaatacacagcactctattctaataattttaaagtgctaaaaatgagttatcttgagttggaaggtaaaataataaatcataataaacaactatctatccaagaagtgaaattagaatgggcgaaaaatctatgggagggtaatgggagttatatcgataatttaggaagtctggaggctagtgagcctgaagccttattcgacaaggaagacttaagagagatagttaatcgttctataaaacaaaggcggggacaacgttcgtttagagaaaaaatcctcaaaaaaaataaccattgcgctataactaaatgtgcaattttagatattctagaagccgcccatatatatccatataggaataaatcccataaccatataagcaatggtattttgcttagagcagatatacatactctttttgatcttgatctaatagctattgcgcctacgagcttaacagttcatataaataacaaacttaaagatagtgagtattcgatatatgaaggtagtacacttagtatttcccacgaactttcactcgaggcaatagaagaaagatgggcgatatttattgataagaataaatga

SEQ ID NO: 104242 - DNA, 633 bp, Enterobacter aerogenes
atgagtgaacagcaaccgcctccatcacttccgccacaaggaccgattggctggcttctgtcgctggccggacggcttattgggctggttattggcgcgctggttctaaggatcgtactagagctggcggggctgtatttctggtggccgcaggaggggtgcaggcatatttttcaagtgatgaggcaagagcaaactgagctggttattgcgttgcagtcacatccgctgaagaatgaaatggtgatgttgctggagaacgggacaactcacgggcttttggctaacaggttcctgcagaaaccgttcaccgtcctggcttatatgctggtgagttttatgctgcgtctgacatggctcgtcgccatgcttcccctgctttgcctgtgtgttgtaatcgggctggccgaaggtctggtacagcgggatttgaggcggtttggttccgggctggaatcggtttttctccaccgctacgtcatcaggtccggcagttcagtcgccaccacgctatgggtgttttatctggcacagccgctgtttgtacccgcgatgctggttttactgcccgccaccttatggcttgggataacagtcaggatggcggcagggagttttaaacggtggctgtaa

SEQ ID NO: 104243 - DNA, 378 bp, Enterobacter aerogenes
atgaagatggtaaaaatatattcaacaggaagttgtgatgctgcaacacgtgaaggttcggcggaagttgtgctggaatgcgaagggaaaataaaatatctgaccttctcctacagtgatacgaccgcaaatagatgcattctccagggctttattgatggtgtgaattgtttgaagaaaccctgtaacgttgaattaatcagttcatgtgagctcggtgtgaagaaagcgcagaaaggaaagggagttaatgtagatttgcacaaggaattatgtggaatcttgataaagaaagaatgtgaatattctttttctgtcatgcatggtgaaggcgacattttgaatgcttttattcgtaagcatcggacaaaacaatag

SEQ ID NO: 104244 - DNA, 3516 bp, Enterobacter aerogenes
atggatgaaaatgctttagggtttgcctcatactggcgcaactcgctggcagatgctgagtcaggaaagggcagttttgaacggaaagacgccaaaaatttcactcactggcatgggatagcggcgggacgtcttgacgaagcgatcgccgataaattttttgaaggagaaaaagacgacgtcgaaacagtcgatgtcatcttgcggccaaaggtttatttccggttactgcagcatggaaaggaccgttccgctggtgcgcctgatattgttaccccgatagtgacgccagccctgttgagccgtgaaggttttttatatccgacgccagcgacctccattcccagagacctgcttgaacctttgccaaaaggggcattttcgattggtgagattgagcagtatgacaaatataaaacgacacatacgtcattctctatcaactttgatgacagcgttgataagaatgccgaaacggatgaagaacgagaagcacgatatgcagcctggcagcaggattggcgtcgatatctggatgattcagagaggctactgaagaacgttgtcggcgactggattaaaaatcccgaacaatatgaactcgctgagcacggttatattgttaaaacggcgcaatctggcggcgccagtttccatatcctttcgctttatgaccacctgcttgtttgcaaaaaggatgtgccgcttttcaatcgtttcgcctcgcgggaggttcatgccgcagagtctttgctcgctccagaagcaaaattcagcgacaggcttggacactccggggataagttcccgctggcaaaggctcagcgcgatgccttaagccattttctggatgccaggcatggcgatatccttgccgttaacggccctccgggaaccgggaaaaccacgttggtgctttctatcatcgccacacagtgggccagagcggctctcgaaaaagcagaacctccggttattatcgcgacttcaacgaataaccaggctgtaatgaacattatcgaggcgttcgggaaagacttttcccagggtactggtgcaatggccggacgatggttgccagagctgaaaagcttcggcgcttatttcccctcaagcactcgtaaagccgaggctgccaaaaaataccaaactgaagatttcttcaaccaggttgagtcaaaagagtatgtagaggatgcactgctgttttatctggagaaagctaaggcagcctttcctgaaaaagattgttcatcccctgaaaaggtcattgaactcctgcatggccagttggcagaaaaattcgaacaactggtaagactgaacgcaacatggcaaacgttaagccaggttcgggaggcgcgagagcttattgctaacgacattaagcaatatctcgctaatttaaataaattactctccgggcaagaacaaaaagtcactcagctaaagagtgctaaagcggaatggaaaaaatatcgcgccggtgaatcgctgatctattcattattttcctggcttccagcggttcgcagtaagcggcagtaccaaatacaactgtttctcgaagataaattaggtgcgctgattgcgggaaatcagtggtctgatcctgaaaccatcgaacgtaatatagatgaactgctcaactccgctgagcgcgagcaaacaacataccggcagcagattgactccgcccatgaaattgttcttaaagaacagcaggcggctcaggaatggcagaggctggcacttgatttagggcatgagggcgacgaggagctgagcttctcacaggcagatgaactggctgatacgcagattcgcttccctgcattcttactgacgacccactactgggaaggtcgttggctaatggatatggcgaagatcgatgatctgcaaaaagagaagggcaagaaaggagctaaaggggtaaccgcccgctggcaacgccgaatgaaactcacaccatgcgtggtcatgacttgctatatgctgcccggcaatatgcagataagtgaacacaaagggcagcgtaaattcgagaaaagctatttatatgacttcgccgatttactcattgtcgatgaagccgggcaggtgcttcctgaagtggctgctgcctcgtttgccttagctaaaaaggcattggtgattggtgatacggaacagatcccgccaatatggagtattgctcccgctattgatataggtaacatgctggcggaaaaaattctgtcaggtagtacgcaagaagagataactgagaaatatacggcaatcgcagagcttggtaaaagcgctgcatctggcagcgttatgaaaatagcgcagtgtgcttcacgctatcaatatgatcccgaactggctcgtggcatgtatttatatgaacaccgccggtgtttcgataatattattggatactgtaatgcgctctgctatcacggtaagttgttgcctaaaagagggcgtgatgagagcaatttaatgcccgccatgggttatctccatattgatggtaaaggagagctggcaagtagcggaagtcgatataatttgcttgaggctgaaacgatagctgcctggctgacagataaccagcaagatattgaagcgcattacggcaaatcgcttcatgaggttgtgggtattgtgacgccttttagcgcgcaggtatcgaccatcaaacaggcgctgggtaaacaaggcatcagtacaggcgcgaatgaaaagtcgctcacagtgggaaccgtgcattctcttcagggcgctgaaagagcgattgttatattctcgccagtctattcaaaacatgaggatggcgggtttattgatagcgataacagcatgctgaacgttgcagtctcccgtgcgaaggacagtttcctggtcttcggcgatatggatctatttgagatccagcctccctcatctccgcgaggattgctggcaaaatatctctttgagtcagagaagaatgcgctcacttttgattataaagagcgtaaggatttaaaaacttccgagactaaaatctacacactccatggtgtggagcagcatgataatttcctgaatcaaacgtttgaaaataccggtaaacacatcacgatagtttctccgtggctaacctggcaaaagttggaacaaaccggttttcttgattccatgatcgcggcgtgttcacgtggtattaatgtcacgatagtcactgacagaagctacaacactgaacataatgattttgagaagcgaaaagagaagcagcagaaccttaaagcggcgctggagaaactgaatgcccttggtattgcgacaaaactggtcaatcgcgttcatagcaaaattgttattggtgatgatggtttgctgtgcgtgggatcattcaactggtttagtgcgacacgtgaagcgcgatatgaacgatacgatacatcgatggtttattgcggtgataacctgaaggacgagattgaggctatttataatagccttgagagacgtcaggtttag

SEQ ID NO: 104245 - DNA, 1083 bp, Enterobacter aerogenes
atggtaagtttgcgggaggatgagcttttcaaactcatcgagcaaggcatcaaaggcaacgcaaatgcatttacactcctatgtagaaagatgattaacaatatccgcaaaaatgatgaaatcttagcttctaaattggcgtcgttagttgctgaaggtacggtattgcgtggggcatccagtaattcacctttgcctgttgatggggactctagacgaaatcttttgcaagaaacatatgtcaattcaattgtagaagagccagtatggaatacagatatttccaagaaactagagtcaattgttaacgaaagagaaaatgctgcttcattgtttaaagctgggcttgaacctgtaaagacagttttactttctggtcctcctggtgttggtaaaactatgtcagcgcattggcttgctgcaaagctaaatctaccgcttctaacattagatctttcctctgtaatgagttctcttttggggaaaacaggcaataacattaaatctgttatggattatgcaaaggaaaagccatgtgtccttttgcttgatgagtttgatgctgtagcaaaaaggcgtgatgatgatagggatgttggagaattgaaacgtttggtcactgtactcttacagactatagatgaatggcctgcgacatctcttcttgttgcggctacgaatcacccggatattttagatcccgctgtttggcgtcgatttgagcacattcttaaatttaatatgccatcagttgatctcatcgatagatatctagtcaatcatgatattgatagcaaattgtctaaaaggctttcgcccttacttgatggtatgtcgtttgctattattaatcgcatattaaacttctctaggaaaaatgaggtccttaaaaacattccattcgaaagctcattgattgaagcagtcgttatggaaagagtttctctggatgactttagtgataatgatctcaatatagtgaaataccattttgatggtgtttcaaatagaaaaatagctgaattagttggtgtttcacatccaacaattgcgaataaattacaaaagtgggggattaaatga

SEQ ID NO: 104246 - DNA, 2202 bp, Enterobacter aerogenes
atggaaaggaacttacttttaggtaacggtcatgttctaacaaaaaaagaaccattaccaaaaggaagggatggtaaacgttatccatacactattgaggaagtaagagatcatttaaaccctgagttagataccttactctcacgcgttcgtagcttggatgacgcagctaagcctaggggtgagagtgtttttcatttaacattgcacccagcttttttaggtaaaagttactttcctgagggactgctcagagccacaggtttacgagatgttggtagccgtcaggtaatcattcgtccaagaaaagctgcacgtcaatgtgatcagaataaggatttagtaacggcgcaattgtttgttagcggtgatgacgattcagttctaagatttaaagagatcttaaattctcctacagcgccaaaaagtgtacaaaaggatttgattgaaattgaaagtgttagtttttttgatggaaaagaaagagcacgaaattttgagtatgcaaaaaacgaattgataaaatttgaagtggttctgcatgccggagtcgaagacgacgatattgttaaagcatatattaactatgcattacaatttggtatatctgtcgattacaaaagtaaaattcaagtcggcggactaaccttcatcgttgcatatgcgaagcctgaagatatgagaaggtctctcgatttttcattaatccgcgttgtgcggcctatgccgtcattaagatgtactcagcctaatatagttagaaaactatcaaatatagttactccagaatttcctgattctaaagctgttcttgactctgagcgcattgcaatttttgatggcggtttgggaactgcagacttaagcagctgggtcacggaatatgtgtatccagacaccaaagagacaagtggacttttgttgcagcacggtaatgaggtaacatcaacttttttatttggtcgtgtagaagaaaaagcgccttcttttgaaaggcctttcatgaatgtggatcattaccgagttctttctccggcatcaggtgaaaatggagattgggatttgtttgatgttcttaagaaaatacagtcagttcttgatagcggtgactacaagtttgctaatctaagtatcggcccccatcttccaatcggcgacgatgaggttcatgcttggaccgcagttttggaccaaatatgtgcaaaacacggaatactacttacagttgctgtagggaacgatggtcatgaggatggtgatgctgcgagaatacaaccaccttccgatatggtaaatgcgctagcaattggcgcagctgatcgaagtggtgaaaaatgggggcgggcaccatatagctgtattggtcccggtcgaagccctggcttcgttaaacccgatggcattatttttggtggaagtgatgatgaacctttttatacctataatccgttgcttggttctattgtcggggttcagggaactagttacgcctctccgctagcattaagaacggccgctggtgttgcagctttgtcgggaacacctttaaatactattgcactaaaagcattactggttcatcatgccgaaacatcacgaaaatatactcgtgaacatatagggtggggtcggttcagtgaggatcctaacgatttaatcgactgtgcaaatgatacagctacagtaatttattatggttctttagccaaaaataaatatttaagagcgcctatcccattccctgatgttccctttgacgaagcatttgagcttactgctactttgtgcattcaaactccggtcgatcctgaacattcggttaactatacaagagccggtatgcaggtaactttccgccctagatttggccttgatgatgccgatactgatgatttcttcggccaaaaaagtcaatataaaacagaaagagagtgccgaagtgaaggccataagtgggaaacctgtttacatagaagcaaaaaattcagtgctgagacattattaagcgatccagtttttgatataaggtatcacgcgcgcgattcatcacgtcatgttaagggggcttctgcaccggatatgcagtatgcgatggtaatcagtattagggttaaagattttgatttgtataatataattcgccaacgctatactatactcaatccaattcaactacgcacacaaatctcgctcaacacttga

SEQ ID NO: 104247 - DNA, 873 bp, Enterobacter aerogenes
gtgaaaaaaccagtcacctatggtgcccatcgaattcttcatgatttatttaaaaatggagcgatgttcaaacatggcttacatagtgaaaaattacgcgaactggaagagcgtggttatgctgctgttagtgccaacagccttgtgtatctgacccctacaggccagcaatatgcgattgaatcctttgttggtgagagtcttttggcttctgaatattacgcgcgagctacagcgccagcagataatgctggaccgtatgaagccgagctttgcggtaactctatcgagcaagaaacgctttcggcggtgttagtgcattaccttccaactactaacctggataaagccagcgatcacgctgtaaagcttgcgtctgcggtaaaagcttcgtttaacgaactgaatgctactaccaataatgccattactgaccagaacggtgccaagcttactgctaccgggactttatcatccggggataaaccggatacagctagcggtcgccctcctgcaagctggtttataaaggcaacaggcggaatccaaacgcttgagtgtcgaaattttgtggtaggtattgaccctgctgataaaccagattctaccgtgaaggtaaagctggaactggataccagcgaagcgatgaagtcacttgatgaacttggctctatggcgaagaaaatcgacgctattgtggcagaagcacttcaacaaaacggcagtatattcagtgcaattaatcaacgagagcgtaatgcagcatctcgcgatgatttgttggtacgagtgagagcgctggaaaactgtgtttgtagccaaggcaatgctattgctgatttaggcttacgcatcactaagtttgccctctag

SEQ ID NO: 104248 - DNA, 270 bp, Enterobacter aerogenes
atggaaattccattagttggtggaccttatgatgcgaaggttttcgacattgatgtagacagaaacggaatgccgaaacttgaagtgctgaatatgccgcgccggacaactattgaagaagggagcattgaacttctagccgacgctccgatggctccagtaaagtatttacgctaccggttggtccgggttactgagaaagaattggttaatggacgcctgtgtgattctccaaagaaatggcattgggagtatcactatgaaagctaa

SEQ ID NO: 104249 - DNA, 663 bp, Enterobacter aerogenes
atgggcttcactctgccgcgtacatccaatggccgtgacttccacctgattaaagctgtaacgggaaaccagttccgggataaatgcgggttccatcgcatcggcataggcgttatccgggtcagaccacgaaaccagggcattggtgtaccgagccttactggtgctgctggaataacgaggactaccgataatattcgcgcgcgtatagttgaaatcgacatcacgcggcatatcggcctgcacgataatctgctcaccactccagcaggtcataccccggaaaatagcagcaaaatcgcgcaatacggtgtaggcgtcgttgcgttcctgcacataaacgttacaggtatggcgaggctccataccatcgccgcccctgccatcgggtatcagctgatcgcaatactgcgcaatctggtaaagcgcccatttggaaatattcgcgctggtcagacgctcaccaagaccgaagcgcccctcaacgacgatgtcgtaataaatccacgccgggttgtcggtccatgcccatttaaagcctcctgtccatgtaccggtgtattcgcgtgtttccgggttgtagttatccgggacacggataacacgcccacgcggctcgcaggagatttgggggatggaaccattgaactggctggagtctaa

SEQ ID NO: 104250 - DNA, 1851 bp, Enterobacter aerogenes
atgaaactcataaagcaagtggaaattgcatatttccgttctatttataaagatgatttaaataattgttcggggactaatgtgatttttgggagaaacgatgctgggaaaagcaacgttttgcgagctctgaatctattttttagaaatgaaacaaatccaaatcaagcttttcgttttgaccgtgacttttcacatgctcgccgctctgaggcaacaccagaaaatgatataaggaagtttgtttatgtgaagatttggttcacgaccccagtaaactggagagcatcattgggagactcattttgggttaagaaacaatggagtataactaatcaagaggaaccgaaattttactcatccataactcaacctaatctacagcaatatctaaccagatttcttaataaaatacaatttcattacataccagccataaaagacaggaaaatatttgaaggactccaggcggaaatttataaagttatttctgagcacgttgaattctccgggtcattaataaattttaccgaagccctaagaaatagaaccgaacaattaacccaagggcttttaagctctctcaaaatcaatagttctgtttctacgcctagagatctaactgacttatttaaatcgttagattttgaagttacttcagaagaaggtgattcatacagtttgactttacaacgcggcgatggcattcaggtaagacatattcctcagattctttcatttctatccgacaatagttcaaaggaataccatatatggggttttgaagaacctgaaaattcacttgagctcgctagtgctattgacgaagctaaaacctttctagatcttggtaaagctaataacaaacaaatattcttaactagtcatagtcccgcttttttttcacttaaagatagtgggattagcaaatatttcgtttctaaaacgcacgagcatatggggcgtttgaactctgttgtgaaagaattatctaacgattcaacgcaactcccaagtgagttaatgggtgagacaccacatcttccagtgattagcagttaccttgaacaggcccatgcagagatagaaaggtctaaagcgttaagaacctctttggaacaagagttagtacagcataatgcatcaatcgtttttgttgaaggtgccacagatgcagctatatttacaaaagcttgggagctatttatcgggggagacatgcctttcactttcgaatctggcggaggcacaactaaaatggaggctcttgcacgtaatggaaaagttatcagcacgttagcacctggacgagctgtttttgcattagttgataacgataaagaaggacgtgatctttataaaaataaaagattaggtgatggcggagcttgggtgcaggacaactccaacaaagtttattggtgtcgattaccatttgttaatgaactgcagcaattgatgactagctgtagagtggaaaaagcattttggcctggctgcttggagaatatattcactgcagaggtgaagcatagagcatcagaagcgggttctttgacacttactaaaacaccgcatagtgaatttttgacagataactttgggaaaatagctgattatataaatgaaagagatgatcatttacattaccacattctttgcctagttccggaaagtaaagatacatttgctgaatggatagtacaacatgcagatcgagaaccagaattgttagagcctctgcgtaatacaataacgggacttcgggacatattgaattcgatttcagaagttgcaactcaacctgaagaagtgatgccagcagaagagcaagtaaaccgtataccttaa

SEQ ID NO: 104251 - DNA, 804 bp, Enterobacter aerogenes
atgtacaattgcccaatgtgcactgaggatgtaccaaaaatttgtgacagtcactttatccctcatcacgtataccgacgctcaagaaagatgcttcaagaaggaaaaacattaaactacgctgatagtaaaaacgatatatacgttttaccaaaggaattgaaaaaacatttattatgccctgaatgtgaacataaactaaagataaatggtgaagattatttctctgaaaaatgtttatcgccagtaaataaagttgacgttgctgaattatttaaaattgcaaaatataaactcatcccaatatggaatgcaggtggtaacttggctccccaagtatctataggtcctgggttcgctaatgaaatcgaaatgaatgatctttattactttgcaataagcatactttggcgtggaactttcgagtggggtggcaactataaacctattgaaatcaatgaacatatcaaggaggcaatgaggttatatttatatgacaaaaagacgaaccctttaaattttcgagttgaaattgcaccagcattttggaccaagaggtttagtgtagtattcccgacaagaaaaaaagaaaaagataattttttattttcaattttctctttcgattttcacattgatttatccagaccggtgcctcgtttttctaatcacaatccagtttcacttctcgctagtccctctcttgatgttaaaatgcataatatgttgtccagaaaacacgagacagcagttgaaagggggaagatagataaaactataacatggctaagaaaggaaaattga

SEQ ID NO: 104252 - DNA, 630 bp, Enterobacter aerogenes
atgatagaagactccaaacgcggcagcgcattaatctgcgccttaaaatctgatgtgatagtcgagttgagcaaggaatacgctgagcttagcattgacgctttgattgaatcaaagacgctcgaagctatcccttttgttagcactgtggttggactatacaaagtcgccagttctgtcaggagtcagctatttactgaaaagattattcgtttcctcactcacttctcagacctacccgatgctgaacggattaatatgactgaacggttgaatgaaaacgataagttcgctggcaaggcaggtgcaagactgattgaaatcatcgaccgaatggaaagcgaaaacaagcctgaagttgcggcagagtttctcaagtcatttgcacgggaagagatagattttaatgttcttcggcgtttgttggtcgctctggaacgtattccctcatttgatattagagaactggcggcttttgttgccatcgaccctgaccaatcagtggaaatggatgaggcctttttagacggtctggttaatgctgggttgggaaagagcaatggggcatggaaaagtgtaattgtccctacagagttaggcatagcctttgtgtgcgcaggaaagttataa

SEQ ID NO: 104253 - DNA, 435 bp, Enterobacter aerogenes
atgaaaaaagaccttttactggaacctcgcaatctcgctgcggctgtaagagcgcgtcttgatgagattgaaggtttgttagacaagggtattagtaggcaagaaattgctcaacttcttgatagtgaatacagcttttctgtgactgtgaaagcgttagatatggctttgtaccgggcaagattgaaacgcaaaaaaggtggattgcacaatccagaaagtacggtaaatactggattgcacaatccaaaagagcaggagaaagcggaaccggtggaaactggattgcacaatccagaaccagaaaaattagttgaggatatgggcgggaacaaagaatttttatccgataccgattttaaaaaaattggtgatgaggcaaagaaagtcgcaacctcattcaaaggtagcgtaggtaataagaaaggtttctaa

SEQ ID NO: 104254 - DNA, 306 bp, Enterobacter aerogenes
atgaaacttttcagtaaggtaaaggaattaatcagccgtgtatctgcttatgttctggctccggccatgagcgtttttgctgccagcccagcgttcgctgacggttttaatcgggcaaataccgtcatgcaaaaagtatcaactggcctgcatggtctggcggctatcacgatcaccgtggccgtgatctggattggttataagaccctgtggaatggtgaaagcctcaaaagctgcggctatatcatcattggcgggattctgattggtggaggcagtgaaatagccgctctgctgatgggctaa

SEQ ID NO: 104255 - DNA, 708 bp, Enterobacter aerogenes
gtgactgataagagtctctctatcaaatcgtccgtatcacctacgggcgttgcaaagcaaagcccctgttataacgttgcctcgcgcaagcgtcgccggttcctcaatcggtggattaagtcgcgggcgaccgaagccgggcgtatcaaaatcaaaaacgaacttcggcgccgcatccggcacaacaagtattgggtcaatgaggccaataaatacggtatcgaaacactctgcgagctgatgctggccatctttgacgatctggatttaagagactggcaaacccggcataacctggagacgttagccgaacgggctggccttacgacgcgtagcgaatcgccaaaaggtaaacaacaaagctcacgcgctagtcgcggatgtgatcgcctggtctggcttgatgcgattatcacagagaaagcccccttcaatccttatgacgcccgttgtgcctgtaagcacattgaggttacagagaatttctttgccattctcggcgttccgctgaaacaggtctaccgggaacgcgccaggctacttaaggccgacccgaatgaaatcatatcatctggggatgtgcggttaatcgcaatcagggttgaaaactggacgcgcaaggccgcagccggattagccaggatgaaagcgaggcgtgaagcagctcgccagcgcaaacaggaatactactcaccaacctttgcctga

SEQ ID NO: 104256 - DNA, 783 bp, Enterobacter aerogenes
atgtccgatatcaaacccgcaattaaggcatacagtgagcttcaacaggcttatgactggttcaatctttccctctttgataaggctttgccggatctgctgattacgttacagcgcggtcgtaacacctttggttatttcgcgcctgaacgcttcacaggggaatccagcgtatcggagctggcgatgaatcctgattacttcggtggccgttcgctggccgataccctgtcaacactggtacatgaaatggtgcatgtgtggcagcattacgccccggttaaaaaatgccggggcggctatcatgatcgtgtatggggcgcgaagatggaggaagtcgggcttatgccatcaaataccggcttacctggcgggaaaaagaacgggcagcagatgacgcactacattatccgtggtggccgctttcagaaagccgtgtatgacctgcttaaaaatggcttctctatctcctggtatgaccgctggtctgacggagcaattgttacctcaaagattaacagcgatatcctcgatgactggctggccgtcaccgatgaaaacgatactgaccttattaatcggctatcactgaccgtcagcaaatcccgcccggaactcattccagacgatgacgatctcagcgtcatgattaaaccgccagtaaagggtactggcacccgcatgaaatttacctgcccggaatgtgggctgaacgcatgggcgaaaccctccgctgtattgctttgcggtgagtgtcggtgtgagcttatggcgacagaataa

SEQ ID NO: 104257 - DNA, 423 bp, Enterobacter aerogenes
atgagcgcatacgtagtatctgataaagccatttctactatcgttaaaactctggtactgaccggcacacttcagcctgtcgaggctgtttcatttggtcagatgatgcttaatctgaatacccattctgttaatgttcgctatcaagaaagtagcccggcgcacgcttttgaatacagtgaaccggagctaaatattaacgacccaaaaacacaaattcaggtgattgtctgcattgatgagtatgaatatcagtcctgcgagtttgccgaatactatgaaacgatggtgcatacagtcctcaaagctataaaatcagcgttacatgaggcttatactgaaacattgcctaatcccgcccggtggaaagctaaaaaatcctatgaactgccgggctactcagaagctgaatggagtttatga

SEQ ID NO: 104258 - DNA, 564 bp, Enterobacter aerogenes
ttgccctgcctgcgcggtgatatccttcccttgctgggtaacggtcgcagtaagctgggtaacggcgttcgcggcgccggtggcggtgtcctgcgcctcctgtgcgtcggtcacatcgacaatgctgatatcgtccagatacagcgaataaccggctccaccattcggccccctggtggagatccacatctgcgcaatgctccggtcggtaccgacggtcgctactcccgtcaggagaacccatttgccgcgcgagatgtttgtctcggagatacggacggcttccggccactggtttgcgccgccattctctccgcgagcaaagaggccgacagacacgttccatccgttcggtgtcgacatatcactggccatgtaagcccagagagaaaaccgatacttaccgccaccgcgaacagcaagccagttcccgatcatcttgtcgctgttgccgttctcgccgttgttacgcgtgattttgagcgacttctggccattgcggtaaacatcggtcgagacgcgcgccagcgagctgctgcccagctgctggtttgcggtgtatga

SEQ ID NO: 104259 - DNA, 603 bp, Enterobacter aerogenes
atgtcggtacctaaccaaatcccttacaacatctatacggccaacggacagacaaccgtatttacttacgaattctacatcatcagcgccagtgatttagaagtaagtatcaatggttccgttgttaccagcggctataccgtatccggcgttggtaacaaagacggcggagatattacgtttctgacgccgccggcgaatggtgcggttgtcatgctcgaacgtgtggtaccgacataccggcttactgattaccaggataacggcgacctcctggcggataccgtcaataaggatttcgaccgtatctggatggctatccagcgtgcgtttattgatctcgggtttgctcttacccgtcctttttttggggggccattcaacgccaaaggctaccgaatcgaaaaccttgctgaccctgtcaatgaccaggatgcagcaacaaaaaaatatgtaagtcagactgtaaaaacgaatcttaacagagtgctgagagttcctgagcagatggtaggggtggttcccccagtagcagttcgcgagcagatgctattaggttttaatagttttggggatcctgttgctatcgcaggtcagacgtag

SEQ ID NO: 104260 - DNA, 243 bp, Enterobacter aerogenes; identical to SEQ ID NO: 71832

SEQ ID NO: 104261 - DNA, 318 bp, Enterobacter aerogenes
atgtgcttatttgaattgctagcggccagaggggttaagtcttttttttattttccagatgaggcatctatatttgatgggaatggaagaaaacttggtacattgcatcacaaaaaagatgcatgggtgatttatcagagaccattagggccggcattagaagttcacaaaaaagccatcatgattgcagatttagaaagttatgcagatatcgacaatcaatttagatgccataagatagttgtggatatttctggtaaattctttttgctggttcttttaggttgcaccgttgatgcaatcgaagcccgcacttaa

SEQ ID NO: 104262 - DNA, 834 bp, Enterobacter aerogenes
gtgtaccttgccaaatccgctattttccagacccacaacggtatagccggaacgcagtaccaggcgtggcgtcacttcctgaatcaccagtacggtgaagttgcctttcttctggatactgctgttaaccacatgctctttgccgttcagctctttggtgacggaaggaatggacttagacggggagaagcccacgaacgtaaagcggccatcgtcgtaagcaaaatcgggaacaatgttgaaactgcctttgcccggatatttggtgtaattccagttgcggggcgtctgcgccgaattcagcgctttctggacgctggcctgttgctgcttctgctcccactcgcgctgtctggccgtcgcctcccggctcgctttgtcccgttcttcgcccggatagcgatagctcacctggaaagcgggttgttgtgccgatttatcatcgatgacgttcagctcgacgttgtacaggcgcttactggtgacaaccagcatattggtatgccagtcccggctgttcggggggatcacgacctgcgttgtgttgccatcttctccgggcgctccctgcgtgagcgcgaccgggcgaacgttgacccggtttgcatccggcgtggcttcccacgcctcatcaaagccgggtttggcgcttatgaccgcctcatcgttatcaaataccagcgttgtcataaagccgggtttggtgttaacgacagtgacgttctgcgggttatagataacctgctgcacgcgggagtcatagcggcttgcctgcggtatggccgcagcccatgccgcgccgcacatcatcagtgccagtgcggtaaacgttaa

SEQ ID NO: 104263 - DNA, 210 bp, Enterobacter aerogenes
atggtgatccgcatgctggcgaaaatcggcgcggaaatgcaggaggacgcaccggcgggcgccgacagcaacccggcagagcagcagaccatccgtgacctgatgaagtccgaagcgtacatgaatccgaagcataccgaccatgagcgcgtatctgcacaggtgaaagcgtactaccagaagcgttacggcgatcaaaccgtagcgtag

SEQ ID NO: 104264 - DNA, 447 bp, Enterobacter aerogenes
atgcccgcgggcgtcggtgaaaataagggaaaatgccgaggcgtcagccttaactttgccggtggccacatcccaccaggcgacggcaccaacaatttgcgtctggcccagccacatcgagcaggaacggttcgcatagcgaatttcaggttggacgttatactcgcggatacggtcgggatcgaggcgaacctcaccaaccggtttactatgcagctggtactggctatcccattcgttgattgtgcgagtctcacgacggcgctttgtcatttcctccggggtgaacctttccggccattcacaatcggcgtaacagtcaaccgtggtaccaggagcctcggcaaactcgataccatcatcggtaagacgataatcaacgccttcaacgagcagtcgcgcgccaatgtgaataccgacaaaaacatattccggccggaacggtaa

SEQ ID NO: 104265 - DNA, 321 bp, Enterobacter aerogenes; identical to SEQ ID NO: 71838

SEQ ID NO: 104266 - DNA, 345 bp, Enterobacter aerogenes
atgcattcagattacaaaactcgccttactgctcttagcgataagctcaccgatgtagttctggaagaagccgatccggacaactggccgggggcagggaaggaaatcacaaagcataccaaacaggaacgcggcgatcggtactggcataagaagaatgcggccgcatcgctaaccctgctggtaaaagtccattcacttattggtatgcatactcgcggaggcacgccgaaacccggtggagaagatccggacgatgaagcattccgactggggcaacaggtctctgcggctgaacgtgcagcacaagaagttatcgaacgcatacaacagcgtaaaaaatga

SEQ ID NO: 104267 - DNA, 246 bp, Enterobacter aerogenes
atgatggtggtgctgaaaatccgggcgctgttaatcctgctggtaattcactactcagcaccggcgcgggcgaaccgggcgcgaatgactggatacctgaaaaataccgcgttatgggcgaaggtggaaaactcgacattgaaggctctgcccgcaaactggcggatgctcacacgtcgcttgaaaagcgccttggtagcgtcggcacgccgccaaaaactgctgatgactacgccccagaggtaa

SEQ ID NO: 104268 - DNA, 1092 bp, Enterobacter aerogenes
atgccggacttgattactgatacattgaaagtagttacttctttttttgtggcattagtcctcaataagtttttatctatatttaggaaaagacaactttacttatcctgctggaactccttaagtaaaacctcaatatctgacaatgcaatagtaataaatgcatcagtatttaataaaggtaaggataaagaaaaaaatgtagaaataaaagtcccaaacggtatgtcttgtactgtaattgcaagtgatcatgatgcaactaccgaaggttcttttgtaaagatagatagaatattagcaaataaaaaaatatccatggtgctcttgattgaaggaacaagaattcttgataaaagtaccatgccttccataagatcagaagatactgacgggaaaacatacctttcaaaagactcagtgccaccgagtgcaggttcttttatcttaggtggtgctatttttgctgcatttttcagttatatggtcatcagtatccaaacagaagacaaccctctcgcgggccccttgaaagcatataactacatgatttataacaatatgtacaattctgggctttcgattaatcctataggtaatggactgataactgaaaattacaatctaagagcgaatgaataccctattgaaataatagatgccaagatagaaaaaaatcaaataatgttcaaatttagaataattaacaaaacatcagaagtactgaaggtttcaggcggatggagaatatataaaaactttcaatatatttccgaacatgttgatacatttgattataaagatgaaaagaaaagagatgatgaagaaataagagtgtataaaaaatacaatgttgaatttgttaatgataatggatatcttatggaaaaaccgaaagaaagggttgaggttcctgcaaattcagttggctatattataataagcagaaaatactctccaagcattacttataatgacctaaacatcgagtttaactttagtggtggctcaggtgaaatataccaagaagcagatatgctttttacagctaagaattctaatataagcagtgctatattagacaaaaaataa

SEQ ID NO: 104269 - DNA, 2196 bp, Enterobacter aerogenes
atggctttcccgattcgaaaacttctgctcgtctccttactgtccgcgctgggaagcgcgggggcgctggcggcggaacaatcccattttgaacattttattactcgtgatggtgctgcgttaaaagacggcgatcggctctttcgctttgccgggatccatgccccggagctgcatcgtatagaggatgacgcgagaggaacctgcaaagcggatccgcgcgggtgggggcaatatttcaaatggcctactgctgaagagcaagaaaactggattaaagccctggtgcaaacgggtgctaaagcacagcgcgtgtatgtgctatccgttcagcaggaaaacgacgcggcctgcggacgtgaaacgcatatcctgtcgccggaaacgcctgacggcatgccgcggctgaatgaagcggcaatgaaagtttatgacaacatgattgctgaagcagataagcaggggcttcgcctgattctaccgtttatcgatcactggtggtggtggggtgggagagaacagcttgcctcattttatcatgaaaaacctgaggatttttatcggacggacagtaaaaccttccaggcttatcttgacgtgattcgtcaggttataacccggacgaacaccattacgggacgccactactacgatgaaaaggcgattatggcgtgggaaacgggtaatgagctggaggacactaacgccgattttcttcatcagacatctgcctggatccgtaaatgggcaccccatcagcttgtcgtagatgggacttataaaaaggtgaatgatttcgcgctcagcgatccgaacgtcgacatcatcagcaatcactattacaccaatgccaataacaaccaccccgggcaggttcgtaaagatctggaggcgattggtggcaaaaaagtctatctggttggcgaatttggtctcctcgaccaaaaagaccttaacgctatcatgcagtctattgtgcatactgaggtcaatggcgtgcaggccgcgggcggctttatctggggttttcgcggtcatcggcatgatggcggtttttactggcacaaagagtataccggacactatagctaccatctgcctggcttcccggatgaggggaaagcgaatcaggagatggaggttgtcaacctggtacggactgccgccgcacaaatggctggtctgagcaaggtgccagatttgccggtaccagaagcaccgaggttacgcgagagcgattccccctttgccattaactggatggggtcacccgttggtcgttattacgacgtggaaagagctgtgcagccacagggcccatggacacgcgtcggaaaggacatttccgacggcaaaaatgaatgggatccatcgaaaatgagtcttttccgcgataattatcgcagcctgacgctcggccagacttactactatcgggtaatcgctaagaatgatagtggtcagtcagcaccttcaaacgtgattcgcctgaaacatatgcagaaaaaccttccaccggttattaccctgcaggacatgctttctaccactgtcgataaaggcgttcaactcaatgctgcctggcaggatgacaatctacctggcccgaaagtcagcgtagcgtggagccatgacggtaagaataacgttcacttctgtaacagcagtaaagaggaaacccgagtctggttctccgcgccgggcgactatgcgttgacctttactgctgatgacgggttgctggaaagcagcaaaacgataaatgtcagcgtgaagcccgctgtgaggcctgtaccggcagattattgcagctttggcagcgggactatggatgttagcaagggaacacttaactccattaaaagtgaaaaagatacgttagccatcggagaagacggtttcctcgggcctttcgcgcatgacggagacagcgtgagctggcaggttagcgctccctgggacggtaaatttaccctacacgtgaaatttaacggcaaatggggaagcaagaaaaactcgttcatcgtgaacgacggaacgccagtcagcattgaatttccgcaaacggatgagaagggcaagaccatagtcgttcctgtttcgctcaaagaggggggtaataccatcagttttggaaagtttaccggcgactggggatatatgttcatcaaatcaattgaagttactgcagagtaa

SEQ ID NO: 104270 - DNA, 720 bp, Enterobacter aerogenes
atggcttgcgcaaccttcggcctggtgctcggcggcctgatcggcgggccggtggcgcgttatctggtgaagcactcttcctcgccggacggtacaccggacgaccagctggcgccgacggcgtttgagaagccggatatgggccgcatgatcacctcgctggtgctgattgaaagtattgcgttaatcgctatctgcctgaccgtagggaaggtggttgcgcaactgctggcgggtaccgtgtttgaattaccgaccttcgtctgcgtgctgtttatcggcgtgatcctcagcaacggcctggcgctggctgggctgtatcgcgtgtttgaccgcgcggtatcggtactgggcaacgtcagcctgtcgctgttcctcgcgatggcgctgatgagcctcaagctgtgggaactggcgtcgctggcgctgccgatgattattattctggcggtacaggcggtggcgatggcgctgtatgcggtgtttgtgacttaccggatgatgggtaagaactatgatgccgccgttctggcagccggtcattgcgggttcgggcttggcgcgacgccgacggcgattgccaatatgcaggcgattaccgaccgttttggcccgtcgcatatggctttcctggtggtgccgatggtgggggcgttctttatcgatatcgtcaacgcgctggtgattaagctgtacctgctgttgccgatatttggctga

SEQ ID NO: 104271 - DNA, 441 bp, Enterobacter aerogenes
atgttgcatctcgataccttatcgacgcttgttgccgcaaccatggtgttgcttttagggcgaaagctcgttcagaacgtcccattcctcaaaaaatataccattcctgaacccgtcgccggcggcctgctggtggcgctggcgctgctggttttgaaaaaaagcatggatatcgaaatcgatttcgatatgagcctgaaggacccgctgatgctggcgttcttcgccactatcggccttaacgctaaccttgccagtctgcgggcgggcggcaaagtgcttggcactttcctgattgtggtggtgggcctgctgctgctgcagaacgcgctcggtatcggcatggcgaagctgctggggctggatccgctgatgggtctgctggccggttctatcacgctttccggcggccacggcaccggggcggcgtggagcaaataa

SEQ ID NO: 104272 - DNA, 204 bp, Enterobacter aerogenes
atgatgaataatagcgatttgctggggctgacgccggagagtatgttcgcgctggtggcgaaaatctggcctttacaagcgatttcgtttccacctctgcaggaccagcgtattgatatttcgctccattacaaccggcaaagcgcacaggagccgttactgaaagagattatcgacaccattgtgcaaacttatgcctgctaa

SEQ ID NO: 104273 - DNA, 789 bp, Enterobacter aerogenes; identical to SEQ ID NO: 86926

SEQ ID NO: 104274 - DNA, 321 bp, Enterobacter aerogenes
atgaatgagctgctggaaggggcgccgcgctcgctggatgtcgaagcattaggccgcgatctacgccgctcgatacctgaagtccgcgacgttcaccacgttcacgtctggctggtgggggaaaaaccggtgatgacgctgcacgtacaggtcgtgccgccgcacgatcacgatgcgctacttgatagcatccagcattttattgagcataaatatgaaattgagcatgtgacggtacagatggagtaccgcccctgcagcggcccggaatgccacctgaatctggcgcattccggacatgagcatcatcatcaccattaa

SEQ ID NO: 104275 - DNA, 1212 bp, Enterobacter aerogenes; identical to SEQ ID NO: 89039

SEQ ID NO: 104276 - DNA, 456 bp, Enterobacter aerogenes
atggttgccggcgccggggatatcaccacgcaggcgcagcgcggcgccatacatatgctctctcagcaggattttacgctaaccagttcggacgggagactgcatggcagcgccaaacagggcatacaactggtgtgcggaggcggcgggatccgtatcagccctgatggccaggttgagattttctctcctgtcggggtcgatattaaagggccgaatctcaggtatctggggccagaaagcgcgcaggtgcaagcacctgcctttgataaaggaacctttacgcgtcgctatcaactgcatgcttctgacgatccggaacaggttctggcgaatcgtcctttcaggctcaagagctcaaccggcgaagtgctcgagggcgagacggacagcaatggttgctctccattgctcgattcggccgatcttgattcgtacaaactggaggtactgtaa

SEQ ID NO: 104277 - DNA, 2142 bp, Enterobacter aerogenes
atgtattttacaagaactgttgactatgacttagaagggatatgctgcgagttattagttaaaggttggggaggtgacgagaaactaaaagagaaagtattaattgaattggatttaaaatttaaccaaggtgtatttgaagttgaacgctatatttcttttttggtacgcgcgtggcctggagataatgatgttgccaatcatgtagttcgctatgtcaaaaaatatagtatcgccatgatgcatggaagtggattgtggcaggctattttatccgggtttggtggaaataaagaattaattaatgctataagagatgtattaatagagcgaaaagagaaatataaagctatttattgggggccggatacgaaaaatgcttatcttgcaatagttgatagtatcatggataaacattggatatgttcgacacttatgactgggtggaaaaatgatccggaggttcaacgatttttttctctagaatttttaaaaccaccggttgagaatgccattcttgccaattgggtgcatgtttttataaatgacaaagatgctagacgttcgtggttgcttggcgcaattactacaggtaatgataggggcgccttatcagctgttggtcggttacttgatgagtttaatgatgaagagtgcatagataccgttaaggatattttaaccaataaaaaatacaactattattcagaaattgatataaagaatagacttgttgaaattgtacctgaagatccagttgtcaaacaatgggtgatgaattcttttgaagaaattgatagtttgtctttatcttcaatagcgataggttatgaagataataccactgtaagagaaaaaatattaaatgcgttatgtccaattcattcttatgctagagcggaaatatttcgaattattcgagaacacttgatgccttcagaatctatcatgcgagtgacctcaagtatttttgtagaaactaagcccttgattcgtacttcaggtctcattgcgaggtgtattgcaattcagcattatccagatgattttttattgtttaaacagatgttgtgcaaggaattagcctcagtaggcatggtttatgaaatgcggaggcgtagcgcatttgctgctttattatttctaaaagagtacgattactgtgcggagtatctaagccgagaacaggggtcttccatgcattggttatttgatcataagcatgaagatattttatcagctcggatcttatttgaatcttgggatgccttaaaaaacaacaaatatctttctaataaagatgttaaaatatcatggtctaattttattcatgatggaactgctagaggaagtttaaatgatagttcttctagaggtcaacttgttgcctgtttgaaaaacatgtcaattaaagaacataattctcaaagcctttttttaatggccgatcttcttcctgcatcaaacgaattacgagattgtttggtcgagataatgagtcagcaaggaaatatttcttattatgttgaagaagaaaaaatagctattgctcaaagtatttatgcagaacaatttcatggtgatgctgaagcatataatgctttggaagagatctggaaatctctgaaattagatgaggatattcattcggaatatttatttaatgtgctttatgccttggctgttggatggccaaattcaaaattagttcaagcttacgttcaaataactgagcagccgaaagtatttttacatattgctttaatactttgtggtgtgacgggagatttagaaagagcacaggaatgtatagatgcgataataaaggaggctttacatgtaaatcatcctttcctctctttatacatagaggcacttaacaaatggtcatatacagagtcagctgatattcttttgcaaaaattccttaaaggggagatgtcttcacatttcattactgccttgaaattacttacatctactgggcgcgcaagcgaagaatttcgcctaaatatggttggttattttaacaatcaatttaattccgatgcgataattaatgaaggtgtcgatatttttaatggggaagttgtttcagttatccagataattgtggatgaatgtatgctaatgaccctttaa

SEQ ID NO: 104278 - DNA, 750 bp, Enterobacter aerogenes
ttgaccaatgataaccatggcggcatacgtcagttaactcgctatatcagttgggaaaagatccgcaactttgacggcgtactgttgcatattcatactttgaaggaaggagtgcgtggtgatttcgggaccatttccatcgcactgaccctgatgtggttaatgtttaccctcatgttgattgtgtcgtggggggttattcgccgtatggtcatcaacatgagcgtgttgcaggcgtcccttgagtggcaggcctggcatgacgcattaacgcggctgctaaatcgcggcgctctgtttgaacgggcgatcgcggcggcccgaagctgccggcggaataatcaaccgatatccgtcatacagctggatctggattattttaaaggcatcaatgataaacatggtcaccaggcaggggaccgtgttttgacgttggttggcagtactattatgggacagattcgcgagcaggatattgccggacgcgttggtggtgaagagttctgtatcgttctacccaatacccaactgccgcaagcgcgtgcgattgctgagcgtattcgtctgcgtatccatagccgggagatattgttgcacaatagcgttagtttgcggatcagcgcctcactggggataagtagtagcgagacatcagatgagtttaactttgaggagctgcagtcgattgccgatcatcgcctgtatctggcaaagcagaatggacgtaatcgggtttgttcggctgggtag

SEQ ID NO: 104279 - DNA, 600 bp, Enterobacter aerogenes
atgcggcacgccaaccgcggagaccgtatccagcagccccataaactcgatactgatggggatactcagcagagtcgggccggccggaaccaccgtccccgccggcagcatatttgtcgcatcgagcggcattttagcgtcatcgagcagcgactccagcccgcgggcgaaggcgcgggcggtggcggccccccggcagtagccgtagacaaagagcttgattttggcgatgcgccgctgcgagcgctggatatacagccgcgtcggctgccgcggccactggttgaccacggcacccagatggtcgtcgcagaatttgtcaagcgcgcttttacggttgaacttctgggtcagccgcgagaagggccagacggtggccatactttgccgatatctggtcagttcgctgtctttgatcgcggttttgttcaccgcatagcagatgctgctgtaggttttaagcagcgcctgattgatacggtcctcaccgccgttggcaaacagctcgccgtccagcgagtagtgctcttcgcctatctccggaaagcgcgccccgcagccgggaaagtagtaacaaaagaaaccatcgttatcagctga

SEQ ID NO: 104280 - DNA, 501 bp, Enterobacter aerogenes
atggctacgggcaacgtgccgcgcggattcccccggatcctgcagtggctactcgccggactgatgttaatcatcggtctggcaatcggcattttaggcgccaaactggcaagcgtcggcggcacctggtatttcgccattatgggactggtgatggttatcgcctccctgcttattttccgcaatcgtcgcggcggcatcgttctttatgccgtcgccttcgcggcggcatcgttctttatgccgtcgccttcgcggcgtccattgtttgggcgatcagcgacgccggctggacctactggccgctgttctcacgcctgtttgcgcttggcgttctggcttttctgtgcgccattgtttggcctttcctttccagcgcaccggcaaaaaaaggcgcggccttcaccctcgcgggcgtgctggccgtggtactgctggtcagttttggttggatgtttaaatcccagccgctggtcagcgccagcgaagcggttccggtaa

SEQ ID NO: 104281 - DNA, 126 bp, Enterobacter aerogenes
atgattgcggtcggtcactacggccagccgcaagacatcgccgcggcggtcaccttcctggccagcccggccgccgggcagatctccggtacggggctcgacgtggatggcggcctgaacgcctga

SEQ ID NO: 104282 - DNA, 411 bp, Enterobacter aerogenes
atgggtacgcaaatgagtaaagttccgctattttttgtgctggtggtcgcggtgattgtggtggcggcctcgtttcgctacgtgcagcagcgccgggagaaaatggataacgacgccgcgccgctgctgcagaagcgggtggtggtcagcaataagcgagaaaaggtgattaacgatcgccgctcgcgccagcagacggtgacgccagccggcagcgagatgcgttatgaagcgagcttccgcccggaaaatggcggtctggaagtggtgttccgccttgatgcgccgcaataccacgcgctgagcgttggcgaccggggaatgctgagccctcgattaaccgttacttcttcttcagcgtggccttcagctttttctgccaggccaccagttcaaatacgccgaagatga

SEQ ID NO: 104283 - DNA, 381 bp, Enterobacter aerogenes; identical to SEQ ID NO: 102439

SEQ ID NO: 104284 - DNA, 291 bp, Enterobacter aerogenes
atgttactaaaccgcggaaacaacgcaagtattaccgcccgtagattgcgcaactggcgcaaagataaacagcgtgcacggataagcggaagattgcggtttatagttgaagtcatggttgcgtacgaggatgaggtcatgagtgatgctatacgggtagggctgataggttatggttatgcaagcaagacatttcacgcgccattgatttccggtacgccgggcatggccctgacgaccgtggtcagtagcgatgcgcagaaagtgctggcggactggccggcgacctag

SEQ ID NO: 104285 - DNA, 816 bp, Enterobacter aerogenes
atggctttttcacttaaaggtttaactcattcattggccctcgttagcgcgttgctgctagcgggctgtgggccaaaagatcaggatcctaatcatattaaggtggggattagcgcgggtatcgatcagcaagtctgggcggtggtgcaaaaagtcgctaaacagaaatataaccttgatgttgaagtggtgacttttaatgatttcgttctgcccaatgaggcgctgaataatggcgatctcgatatcaatgctttccagcataaaccctatcttgataaacagatccaggagcgcggctataagctggtagatgttggtactacttttgtctatccgattgccgcttattcaaagaaaatcaccgccatttcacagcttccggacggcgcccaggtagcggtgcctaatgacccaaccaaccttgggcgttctctgttattgctggagcagcaggggctgatcactctgaaagagggggttggcctgctgccaaccgcgctggatatcgtgaataacccgaagaagctgaaaatcgtcgagattgaagcaccgcagctgacccgtgcgctggatgataaacaggtgaccatggctatcataaataccacgttctccagccagattggcctgtcgccgacgcgcaatggtctgttcatcgaggataaaaattcgccgtacgtcaatattttcgccagccgcgaagataataaagacagcgaaaaagtgaagaatctggtgaaagcctaccagaccgacgaagtcgccaacgccgccgacgaattgtataaaggcgatgcggtgaaaggctggtag

SEQ ID NO: 104286 - DNA, 636 bp, Enterobacter aerogenes
atgatggtaatcattagaaatctgaaagtagaacaattgcacttaattatagatctacgatacattcagccaactgacataaagcgactaactgacatggctgaatactttattctaaatgtaaataaagactttcactttgataagtgtattatatcagcctcttcgataccggctaatatttcctcattacttgaaacctatcaaagaaaatcgttcacgagagcggagtggaaaatttgggacacattagttaacgaaaagaaaattggtaatattatatacggggattatggaattgttagccctgattattctgatatagatttagatccgaagctatttagaaaagtttccgcaccaaaagtattttatacgtataagaataatatgttttgtgttagaggtggatctttccagaatgatgagagaggaaatggtcaatattatgatattgccacaataatccatgaccaaaaattcttcagggcaactacattctcatatggggaacaatatgtttatgatagaagtagttattcgcctaaaaaaccagataaagcaggtaatccctcatcctggattaaagccatgctgacttcacatattaagtttgttttacactgcatcccttaa

SEQ ID NO: 104287 - DNA, 564 bp, Enterobacter aerogenes
atgctcaatgataataaaattcgcactgcattaataaattttttactggctaaaaaaccagcgccagaaaggattattgaagaattgcatatcgagaacggaagagcaatagctgatgtcgtagcagcatatagttatttgcattgctacgagattaaaggagagactgattcaattggaagaatccttactcaagctaattattataatacttctttcaacaaaattacacttgtaactacaaaaaatcatttaacatgggcattaaagcgttccccatccttctggggaatcatattagtagaattaaaagataataacattactttcaaatatataaggggggctaaagataatattttcttcagaaaagaaaatgctttcatgatgttatggaaggacgagatgttgaaggtagcaaatgaagcctctgtaccagttaaaagatcacacacgaggatggaaatagccgaaatgcttagtagttcgcttaagaaaagtgatgctttgcaaactatacaaagcatcatatctaatcgactaaaattaagggatgcagtgtaa

SEQ ID NO: 104288 - DNA, 438 bp, Enterobacter aerogenes
atggtcagtaataataatttcaataagaccattataaatacgcgagcttcctgtagaagctcttgcgaaacgaagctttcacgcaagcaaattcgtaatcattgcgtcagtgtcaggcttaatgataaagagctgacgcttctaaatgaaaaacgtggccagcatcgcaaaggggaatggcttcgtttatcttttcttaatgcgcttcctggtgttgttccagctattaatataaaagcatggagatctttagctgacctttcacagaaactaaataaaattgttgcccaccttgataacaaaagtaccggaagccacctgacaaaaacggaactatttgcagtgaagcgacaaattgccgatcttcgcttacatctcatcaccgccgacttgtggggagactccgatgaagggaatgcaaaagatccgcagaggtaa

SEQ ID NO: 104289 - DNA, 1269 bp, Enterobacter aerogenes
atgaagggaatgcaaaagatccgcagaggtaagaattttatcgggatcgtcctctatacgttaaaaccagattctcatcatagggtagctcctgtcgtgatcgggggaaatatggatgggtgtgcagcgaaagatctgatcactgaattcaatctaacaaaaacgcttcgccctgatgtggataaacctgtttggcacaattcgcttcgtttaccaaaggacgaagtgctaaccgatgctcagtggtccgctatagctgatgactatatgaagcgcatcggcttctcggaaacgcatctcagatgctacgtgttgcatgacgatgcggtcggtcaacacatccacattatcgccagccgcatagaccgcattacaggcaaactctatctcggaaaaaatgaaaacctgattagtacacgcattatccaacagcttgaacacgactattcgctactaagaaccaaaggccctaaaacaaaaacctctttagcattgccctgccctaaactaaaacgaaaaaaaacacgaaatgaggcgatgcaagagaaaaggacaggtgaacaatgcccaaaaaccatcatccagaacgctttagagacgttagtttctaaaagagtatcgaccactgagtttgtccaacagctttttgaacaaaatattaatgcattacccaatatcacatctacaggtaaaatgaatggtttctcattcgaatacgccgggattgctttcaaagcttcgcaattagctaagtgttattcatggtcgaccttgcagggtaaactcgattatagaccagaacgcgataacggctttctgtttgacctaaaagcaactatcactaaagcgaatccaaacgaaatattaaaggaaaacgttaaaaactccttcgaagcatttattattgataggcatgcaggtaaagacgaaagtgctgtcgcttatgtagaagagaagtgttcctcggaagctttagcagagagtaagaaagagatagcaactatagccgtaaaagagatgcctaatcaaagctacgaggtctcagcattcagatggatggaaaccatcccttaccttgatacgatttatcgtctgctgagacaacttaaaatcccaattcttagacgccccgcaaagcaccaagtcatcactgaagcgatgaagatagaaatccatcccatcaatcccaaaaacacttttgtggagcctttacttgacggcaatttagtgccgccaaggcaacattaccaccttacatgtagattttag

SEQ ID NO: 104290 - DNA, 672 bp, Enterobacter aerogenes
atgagcagctccatcacgaaacactgcaatgaagaagttaacattgacccgttaagtcgccgtgaaacgaaagctgagatgacaacacctaaattcgagttgttcggcgaaacctacatgttcgttgagaccttttctgctactgtcatcagtcccctcccaattactgaccaagtttgggttaaaaccgatacgggggatgagacacagattccagcctttggtatcacatttataaaatctcacaaaatttgtaaatacgagcttcgccagtatagagttaatggttcatttagtgtcttcaaagatgctctcattgttaatacaaccacgggtgaatacgaagtcaacttaaatagaaagacaattattatccctgcgtttctcaccgtacttttccctaacgcttcgatggcattttattatagggcgatgcctgttcctaaatttttttccaccatatttatcttgctttgttgcattgcgattatttcattttttgtattgccatgggggtttaaatctggatatgtttttgacgaacacaaatatatgtggttaacctattttgcctcacgacttggaagctttacctgcattaaatggataaagagaagaagccaaagatttgataacgcactcagaagcgttattaagtcaatacaattttaa

SEQ ID NO: 104291 - DNA, 903 bp, Enterobacter aerogenes
gtgagtaaactggatttgaatgcactacgcgtgtttgtgaatgtcgtggaaaacggcagcttcagcggggcggcgcgggcattacgtatgccttcgtcaaatgtcagtcgccagatttctcaactggaagaaaaactgcaattgcgccttatccagcgcagcaccagacacatgcatctcaccgatgccgggcaggctttttttaatagtatgcgccccctgcttgatcagctcgcggcaaccgaagcggccttaactcaacagcaggccgatcctgaggggctgttgcgcttatgtcttcccaacgagattggaccgacgctttttggccccatgctggcgcagttcgccatgcgttatcccaaaatcgaagtaagctgtgtggtcagccttgccggagccgacgcgcttaaagaagatatcgacattgccgtcgccatcgtccgaggcaaaatggaggatgccagctatatcgccatgccgttggcgacatttccctgttgtgttgtcgctgcgccttcgctgctggaaaaatgcggacagccagtacgttgcgagcagcttgcctcacttccctgcatcaccaccgtcagcgcgctgaaggggcaagcctggcaatttatcaccgcacgaaacgcgtttaaaaaagtgaacgtccaggctcattttcgggtgaatagcggagagatcgcccttcatgccgccgtcgccggcgtaggtttcgccatcctcgctgaacaggcttgccgcccgtttatcgcctcaggtcagttaaaggtggttgaactggagctaccgccggcaccgctacatttagtggcgctgtatcgcgaacgccactttttacctgcccgctctcgcgtctggctcgatttcatgcagcagcatttggccgccaattaa

SEQ ID NO: 104292 - DNA, 897 bp, Enterobacter aerogenes
atggacattaaacagctgaaatatctgatcgcgctcgatcagacgcgccatttcggccaggccgcggcggcctgccatatcacccaaccgacgctttcaatgcgcattcgcaacctggaagacgaacttaatctcacgctgattcagcgcggccaacgcttcgaaggcttcaccccggaaggggaacgcatcctcgcctgggcgcgggcgctgctggcggcgcacgatggcctggcggctgaagcggcgatttgtcgcggccagatggtgggccagttacgcgtaggcatggtgccgttagccagcttgaacccgatgcaattgatcaaaccgctggcggaaaaatacccagaactgcagttcagtctgctgtcgatgacctctgagcaaattattgacggcgtcagccgtaaccagctcgatctaggcatctgctatttgcaccacgtcgatagcgcattatttaacgtcacctggctgccgaaaacgcgaatgggcctgctgcacgacagtcgccatttccagtttgacgcaggcatacccgagtgggagacattagcggggctgccgctcggtttccttaccaagggaatgtattatcgtgaatcgattgaaatgagctttaaagccaaagggttaacgccgaaatatgtctttgaaagcgattcgacatttcagataatccaggcggtacaggccgggatctgttgcgccatcatgccgctcaataacggcctggaagcgctgagcgacaatctggcgattatgcctattggggaaaccgaggttgattccacgcttgcgcttatcatgcgcaaccaggagccggtgtcgtcgttggcggaaaaatgtttcgccgatgcgcagatgatttttggcgaagcgccgcaaatttaa

SEQ ID NO: 104293 - DNA, 2301 bp, Enterobacter aerogenes
atgaataagaaaaaacgcgctgtccccggtgttcatccctatgatggcccagcgggtggatggggggcgttaaaagcgaccgccatcgccgtgcgtacgcaaatggacgcgcttgacgccccggtcacgctgctgcgtaccaaccagcctgacggttttgactgccccggctgcgcctggccggataaagaacataaatcaaccttccagttttgtgagaacggcgcgaaagcggtcacctgggaagctaccagcaaacgcgtgacgccggagttcctcgccgccaataccgtgacctcgctactggcgaaaagcgactttgaactggaaggttacggacgtattacccatcccttgtcttacgatcgcgaaagcgacacgctgcgcccggtctcctgggaaagcgcgtttgcccgcattggcgaagtattacagggcatgcagcccgatgaagttgagttctatacctccgggcgcgcctctaacgaagcggcatatctgttccagctttacgcccgcgagttcggcaccaataacttcccggactgctctaatatgtgccacgaggcaaccagcgtcggtctgccgcaatcgatcggcatcggcaaaggcacggtgtctttggacgactttgataaaaccgaactggttatttccatcggtcacaaccccggaaccaaccatccgcgcatgatgggtacgttgcatgaactgtcccgccgcggtgtgccgattatcgtctttaacccgctgcgtgaaagggcgctggaacgttttgccgacccgcagaacgttattgaaatggcaacctacagttcgacgaatatcgcctcaacctatttccaggtgaaagcgggcggcgatgccgcggcgctgaaagggatcgctaaagcattactggagatcgaagcggaccagggccaggtgctggaccaggcgtttattaacgagcacaccctcggcttcgaggcttttgccgaagatttacgtcagaccagctggccggaaattgagcgtgagtccggattaacccgcgacgatctgcagcgcgttgccgttgcctacgccaaatccaacgccactatcgtgacctatggcatggggatcacccagcataacaaaggcacctctaacgtccggttgattgccgaccttctgctgatgcgcggcaatatcggcaaaccgggggctgggatctgcccgctgcgcggtcactctaacgtgcagggcaaccgtaccgtcggcattaccgaaaaaccgagtgcggagtttctgaataacctcgaaagcgtgttcggttttgtcgctccacgcggacatggccacgatgcggtgaaagcgctgcaggcaatggttgccggcgacgcgaaagcgctgatctgtcttggcggtaatttcgcggtggcgatgccggatcatgaacgggcgttcccggcgatgcgcgggctggatcttagtgtgcacatcggcaccaaactgaatcgttcgcatctgctggtggcgaaagagacttttattctgccttgtctgggccgtaccgaactcgatatgcaggagagcggacgccagtcgattaccgtggaagactcgatgtcgatggtccacgcctcatccggcaaactgaaaccggcctctgaccggctgcgctcggaaccggctattgtcgccgggatggcggcggcgacgctgccgaacagtaagatcgactggttatcgctggtggctgattacgaccgcatccgcgatctcatcgagcagactatccccgggttcgaggattataacgaacgtattcgtcatccgggcggtttccgtatgccgctgccgccaaccgagcggatctggccgacgccgaccggcaaagcgatgttctcggtattcaaaggcgtccatgagaattcccgcgttgacggcgacgacgtgatgcgcctggttacgctgcgcagtcacgatcagtacaacaccacgatttacgcgatggacgatcgctatcgcggagtgtttggccgccgcgatgtgctgtttatgaatgagcaggatatggccgagcaggggctggagcatggcgaccgcgtcgatatttttaccgcgctgccggatagcgatctgcgccttgaggatatcaccgtggttgcttacagcatcgcgccgggcaccgtgggcgcctattacccggaagctaacgttctggtgccgctggattacatcgatgaagagagcggcacgccgtcgtacaaatcagttcctatccgcctgacgctgcgttcgaaagaggtgcgcgccgtccccggtctgcgttaa

SEQ ID NO: 104294 - DNA, 858 bp, Enterobacter aerogenes; identical to SEQ ID NO: 74968

SEQ ID NO: 104295 - DNA, 282 bp, Enterobacter aerogenes; identical to SEQ ID NO: 95940

SEQ ID NO: 104296 - DNA, 213 bp, Enterobacter aerogenes
gtgtcgctgacgccgtggacgacgcccgcgccgattggcgcctcgtgggcggctaactggaccttaagcccggtggtgatgtgcgttatctgcatggtgatgtcggcagtgatttatctgccattcctgcgcgcctatgagcgttcattaataaaaaatgaagtcgaaaaggcgaaaagcgttgcatcggtcgccggggccgttagccagtaa

SEQ ID NO: 104297 - DNA, 420 bp, Enterobacter aerogenes
atgaaaaaaacgctattgagcctaaccctgttagctaccacctgtcaggcaagcgcccagccttgcacagtgatctttgaaaatggtcagttaattacgttaccggcggctgtcactcaggcagaccaagtgaaagggctatctggtgataatcacaacaccggcttaatcctggcatggaacacagcagaaccccgcgcagtctggatgaaaaacacaccgaatccacttacagcggcgtttatcagtgcaaatggcgtaatccagagcgttcaggatatgcagcccaacagcgacaccgcgcattcatccctccacccgaccatagcaatcattgagatgaggacggaaaaatttaaacagttcaaattatcaaaaggcgacaaagtcatttccagccaatgtttccccctcaaataa

SEQ ID NO: 104298 - DNA, 282 bp, Enterobacter aerogenes
atgaatacgaccctttttgttttaatccttgccgtagctggcgcgttgtatctgccctggcgacttgtgcgcgatggttacaaagagcttgtacagatgtgtctgttttgctcctgtatcgtcacgctggccgctgtatatgccgtgttggtcaatctcaataacccacacccatttatgcctatgtttatcgcggtaacggcgttcggtgcggtatttgtggctgattgcgctttatctctctggctctatcagcgtaaagctaagacggctaaacactaa

SEQ ID NO: 104299 - DNA, 225 bp, Enterobacter aerogenes
atggccgagaagctaaaaggcgcggtttccgatgaatatgaagtgtatgaatttgagggtatggatgatttgatccggtttcgtaagaaatacccggaacaaatgaagtatgaatattcttactgtctatctggcggtacgaaagattttcaccatattgcgctcgtcgaagctgaccattttaagcagttcaaaaagcaggttgaccagtaccaggctcgataa

SEQ ID NO: 104300 - DNA, 315 bp, Enterobacter aerogenes
atgagtgataaacaagaaatcaatgatgtggcaattgtaaaatgggtgttcggcattatttttgctgttgttattattggaatgccgaccctgggtttttttaaatttgtgatgttgcttatttctttaacaattacgataggtacggttttttactttggttcaattactaaaaataaagacaacaaaattccaatgatgattttgggcgggtttgttggaataattatcagtgcaggtcttgttttatacaacgtgcacgaacgtaacgaaatgtgtagcagtgattttgttccggttttttgttcgctgtaa

SEQ ID NO: 104301 - DNA, 309 bp, Enterobacter aerogenes
atgaatactttcaacgctgacaaaatccgctctgaactggatgttttagcgaaagaaacgatgcccggttgtggtcttatttacgagctgtatcagcgtcgtttgagcgctgccattgataactttgtcgctaccctgccagcagaacaacacgcccaggcatttgaactggcccgccaggagtttgattacctttctgcggaagatattgctgatgaaatccgccgcgactcagaaaacggctattgcagccacggcattgatcgcaattgctgcaatttgggttgtggggatttggacgattattaa

SEQ ID NO: 104302 - DNA, 423 bp, Enterobacter aerogenes
atgagcgcatacgtggtatctgataaatccatttctactatcgttaaaactctggttattgccggtacgcttcaacctgtcgaagctgtttcttttggtcagatgatgcttaatctgaatactcattccgttaatgttcgctatcaagaaaacagcccggcgcacccttttgaatacagcgacccggaattaaatattcatgaccccaaaactcaaatgcaggtgattgtctgtattgatgaatatgaatatcagtcctgcgagtttgccgaatactatgaaacgatggtgcatacagtcctaaaagccatcaaatcagcgcttatgcaggcttacacggataagctgcctaacccatcgcaatggaaagaaaaaaagtcctatgacttgccaggctactcagaagctgaatggggtttatga

SEQ ID NO: 104303 - DNA, 282 bp, Enterobacter aerogenes; identical to SEQ ID NO: 104298

SEQ ID NO: 104304 - DNA, 225 bp, Enterobacter aerogenes; identical to SEQ ID NO: 104299

SEQ ID NO: 104305 - DNA, 156 bp, Enterobacter aerogenes
atgaaaaaattcattggcaaccgtaacggcaaggcggtttttcaggaaggtgatcgtgaattggtagccgcttaccagatgaaatcctccccgattccggtaacgccgcgcaagctgaaagctgaaatggatgctatcgccgctacagcccgataa

SEQ ID NO: 104306 - DNA, 183 bp, Enterobacter aerogenes
atgtatctatctttgatggagcaagcacgacaggcagaggaattgcgcgactggaaaaccgccgcgcaactctacacccaggcgatggccgttagtcctaaagccagaactatgcgccagcgccgcgaaaggctgaatctgcaacagcgcattgagttttgcgagcgtaattcgaaaatgtaa

SEQ ID NO: 104307 - DNA, 771 bp, Enterobacter aerogenes
atgatcatccctacccaggaaacttacgacgagcttcaacgcgcatacgaatttttcaatcagcggctgtttgatagtacgctgccgccctgccttatcacccttcagcgcgaaaaacgaacgtttggctatttctcaaatgcccgttttgttggccgcacaaccgggcaaatcgttgatgaaatagccatgaatccggtctatttctcgatccgcacgatacgcgacacactttccacgcttgtgcatgaaatggttcaccagtaccaacaacacaccggccaaccgggacgccgtggataccacaataaagagtgggcggcgatgatggagcgcatcggcctgataccatccgacaccggccagcccggaggaaagcgcgtcggtgagtcgatgagccactacatcgaggacggcggcccgtttgataaagcctgcaaggagttgctaaccacggagtttaaactgagctggctggacaggttcccaccgcacaaaccaacgccaccaacgccaaccggcgcagacggcaaaggttatgttgatgatggcgatgatgatgatgagggttatagcgacaatggcgagctggatgatgagatcacgcaagccctttcactggtaaacccgccaccggatacgccggttaataaatcaaaccggacaaaatacacctgcccgaaatgccataccaacgtttgggggaaaccgggcctaattctgtactgtggcggcgaacactgcggaaaggcagaataccaggcagcctaa

SEQ ID NO: 104308 - DNA, 369 bp, Enterobacter aerogenes
atggaaaagcaacctgataaattagatgtcctgatggactggtttttaggcgatgctaaagaaatcacctcaaaactggaaagcgtaagcgtaagcgttaccgaagcaatagaacggctggataaagcctccgacgagatagcaaaatcatcggagactgcgaaaacagaagtgatcgcaagccagcgcgagctggtcaacactctgaagaaggagcagaaggttagcgaacaattttttgaacgtctggccggggcgcatacagggttttcgaaagcgcttatcaggcagatactgattatcacggttgtctgttcctttgttggtggagcgctcggcgcggcggctataacgttcctgctgcactga

SEQ ID NO: 104309 - DNA, 711 bp, Enterobacter aerogenes
atgaaaattgcagtaatgaattacagtggcagcgtcggcaaaacaattatttcgtcatacctgctgtatcctcgcatggctggcgctaaattctttgccatcgagacaatcaatatgtcggctgctgatttgggtgttgatgaagtgatgagcttaaccggcgataactttggtcaactcgttgaagaaatcgtatttgaagataatgccatcgtggatattggcgcgtcgaacgtcgagcggtttctttctaccatgacaaaatatgagggtgcaattgacgaatttgataaatatctgattcctgttaccccggatgataaagcatggcaggaaagtattaagaccgccctcgcgttaagtgccgctggcgttcctaaatcaaaaattgttcttctgcctaaccgcattaaatcgactccgcaggaggatattgcatcggtatatgaatgggcgaaagattctaaaaaagcctctattcataaagatgccgccgtttttgaaagtgaaatttatgaatacctcgcgtatcacaaaatttcgtttgaagaactgctagcagaagatccagaaacctttaaagcaaaagctaaaacttgcaccgatgccgatgaacgtgcggcggctgcgcgtcgttatcgctggatgaaattagcattaccggttaaacgtaatcttgatcgcacctttgaaatattaacggctgaataa

SEQ ID NO: 104310 - DNA, 435 bp, Enterobacter aerogenes
atgaaaaaagaccttttactggaacctcgcaatctcgctgcggctgtaagagcgcgtcttgatgagattgaaggtttgttagacaagggtattagtaggcaagaaattgctcaacttcttgatagtgaatacagcttttctgtgactgtgaaagcgttagatatggccttgtaccgggcaagattgaaacgcaaaaaaggtggattgcacaatccagaaagtacgataaaaactggattgcacaatccaaaagagcaggaggaaacggagccggtggaaactggattgcacaatccagaaccagaaaaattagttgaggatatgggcgggaacaaagaatttttatccgataccgattttaaaaaaattggtgatgaggcaaagaaagtcgcaacctcattcaaaggtagcgtaggtaataagaaaggtttctaa

SEQ ID NO: 104311 - DNA, 348 bp, Enterobacter aerogenes; identical to SEQ ID NO: 97890

SEQ ID NO: 104312 - DNA, 1578 bp, Enterobacter aerogenes
atgaatgaagcggataagggtaaaatttgcctgggggcattgctttttaccccccttgttacgtggtttatcgcggcgaaaaccttgtatggttttacgccaaaagatgcgcgtgaacgtctggttttacttattcagcagacttttgatttatggcctttatggggtgctttattagtcggtgaaattattgccatcataggcttaatcatatttttcaaatttaatcaccagatatttaaaggtgcaccatttaagaaaatatatcgtggtacgcggcttgtttctcagcgggctttggcttccctaactaaagaaagagagccgcaaataacaatcgctgatattccaatccctacaaaagcggaaggtacacatatttcaatagccggggcgaccggtgttggtaaatcaacaatctttgctgaaatgatgaaaggttgcttgatgcgaggcaagatgcagcgggttgcgtccaaaaaagaccgcatgataatcctcgatccagatggcgattttctttctcgtttttataaaaaaggcgataagattctaaatccatatgatgccagaacagaagggtgggtatttttcaacgaaataaaaagtgattttgactttgagcgattcggggtttctatcgtacctacagcgaaggattcgcaaacagaagaatggaatggatacggtcgccttttatttaccgaggtatcccgtaaagtatttaacaccagtcgaaatccaacgatggaagaagtcttttactggacaaatgaagtgccactggaagaacttgaagaatatgtcagaggtactaaagcacaggctttatttgctggtagcggtcgggccgttggtagtgctcgttttgtgcttagtaataaacttgccgcccacctgaaaatgccagcaggaaacttctctattcgtgaatggctggaagatccaaaaggcgggaatttatatatcacctggacggatgaaatgcgtgaagcactgaaatcgcttatttcatgctggacagatagcatattttctattgtgttaggtatgagcaagagcaatacccgtaaaatctggacgtatatagatgaactggaatcccttgattatctgccatcattacgtgatgcgttaacaaaaggccgtaaaaaaggattacgggttgtcaccggttatcagtcgtattcacaggtcattagcatctatggcagcgatgtagctgaaacccttctatctaaccatcgtacatcggttgttatggccgccggtcgcctgggtgaaagaaccctcgaatttgtctctaaatcgttgggggagattgagggcgaaagagagaaaacggggattagccgccgctttggtcaaatgggaaccaaaaatatcaatgatgatcacaagcgcgagcgggctgtaacgccaaccgaaatcgccacgctggatgatctgaccggctacatcgcgtttcccggaaatctgccagtggctaaatttgagactcatcacgttaactacactcgttcgaaccctgtaccgggcgtggtcttacgtgaaagcaccgcatttgcaggaatgtaa

SEQ ID NO: 104313 - DNA, 2910 bp, Enterobacter aerogenes
atgctgaacattacgacgattacccgtcagcgtgtcgataaggttgtcgattactatgctgatggcgcagacgattactatgcgaaagacggtaacgcgatgcagtggcaaggcgctggcgcggaagaactgggcttaaccggcgaggtagaacaaaaacggtttgcgaaattgcttgatggcaaagtaacggatgatatttccgtgatgcgtaaaacggccaacagcgaaagcaaagaacgattgggatacgatcttacgttttccgcgccgaaaggcgttacgcttcaggcactggtcaacggtgataaacgtatcattgaagcgcacgatcgggcggtcactaaagccatcgaggaagcggaacggctggcactaggccgctttaccgtcaataaaaaaacgcacgttgaaaacacgaataagctgattgtcggcaaatttcgacatgaaacgtcacgcgagctagacccggatttgcacacccatgcctttgtaatgaacctcaccaaaaccagcgatggtaaatggcgttcgctcacgaatgacggcattgtgaactcgcttacgttattgggtaacgtttacaaatccgagctggcaagagagctggagctggccggttacaacctgcgttatgatcggaatggtacgtttgatttggcgcatttcagccaggagcagatagcccaattcagccagcgcagccagcagattgaggccgagttagcaaagaatggtttgagccgtgaaacggccagccatgagcaaaaaaatgcggccgcgctgaaaactcgtaaaagcaaaggcgaagtagatcgcgatgtactctatgagggctggaaaaaccgcgccaaagagcttcagattgattttgatagccgggagtggaaaggtgcggccaacgacgatatagcgcggaatacgcagccagcggcgctggaaaagcctatcgagtaccaggctgacaaggtaatgacctttgccattcgttcacttaccgaacgtcaatcggtgattaccgagcgggagctgatggacgtggcgatgaagcatggctatggccgcttaaccctcgatgatattcgggctgcgagagaacgggccataacctccggcaacctcatcaaagaagaagcaacatacgcagcggccacgaccaataaaaaacagcagaacgtagcaatgacccgcgaacaatgggtaacggaactggtgaaagctggccgcaataaagatgaggcccgtaaactcgtagataagggcatcacaaacgggcggctggtacagcaaaagccgcgttttaccacacagttagctcaacaacgcgaacgcaacatactgaagatggagcgggaagggcgcggaaagatccagaccccatacactcgcgagtttagcgagggctggttagccagcagaacgttaaaacccgaacagttaaaagcggttatgggaattattcatacccccaaccagtttatttctgtacatgggtttgccggtactggcaaaagttatatgaccaaatcggctgcggattttctaaaagagcagggcgtacacgtcaccagtcttgccccctacggtagccaggttaaagcgcttcaggctgaagggctggaatctcgtacactccagtctttcctccgggcctcagataaaaaaattggccccggctcagtagtttttattgacgaagcaggggtaatcccggcccgccagatggaggaaaccatgcgtgtgatccgcgatgcgggcgcacgagcggtattcctgggcgataccaaacagactaaagccgtcgaagcgggtaaacctttcgagcagcttattaaagccggtatggaaacggcctatatgaaagatattcagcgccagaaagacccggaattgcttaaagccgcgctaaatgcagcagaagggaaaataaaggcgtcgttgacccacgtaaccagcatcgtagaggaaaaaaatcatgatcagcgctaccgccgcattgtcggggattacgtggcaatgccgccgacagaccgggctaacgccctgatcatcaccggcacgaacgacagccggaaaaaaattaatgcgtacattcaggccgagctggggctaaaaggccagggtatcaattatccgcttctgaaccgtcttgataccactcaggcccagcggcagcacagcaaatattacgaaaaaggagccgtgattatcccggaacgggattacagcaacgggctgaaacgcggagccgtttataccgttctcgataccggccccggcaataaacttacggtaagcgacggcagcggcgacacaatcgcattttcaccggcgcgattttccaaattatccgtgtactcagttgaaaaaacggagctggccgtaggcgaccaggtaaggatcacccgtaacgatgcgcatctggatttagcgaacggcgaccgttttaaggtaaaaggcgtccagagtggtgaggtactgctggagaacgagaaagggcgactggtaaaaattgatgccaataaacctatgtatttagggctggcttacgcttcgaccgttcatagcgctcaggggctaacctgcgacaaggtttttatcaatatggatacccgatcactcacaacggccaaagatgtttattacgtggctgtcacccgcgctaaacacgaagccgtcatttacacagacgatgagaagaagctggataaagcggccagccgtgaagggttcaaaaccgccgcgcttgagctggaacaactcaaacgctatgccaaagagcagcagcatgatgcccgcgaaaaaggccgagacaaaaccgagccgacgcaggaaaaagacaatgccaagcgtaaaggcaaaggccatgacaaaaataacgacgagagagcatttacctcgctctaa

SEQ ID NO: 104314 - DNA, 195 bp, Enterobacter aerogenes; identical to SEQ ID NO: 97893

SEQ ID NO: 104315 - DNA, 483 bp, Enterobacter aerogenes
atgcttgatatgcgattaggaaccagcggcgatattcctttcatcatgaacctggtgcgcgacgggataacatctggcgcatttttctatgccgagggcaacggtcttgaaacagtgagatctgagctacaaagtgtcactcaactatacagagataatatccccgtaggggattatctctttgtctttgccgagaagttaacgcggcagccggtgggattttcgctgttaaccggccgcaatgattttgcgggtcgggcatctcatcttgagatccgtatgttcgctgttgcggctgatgagcagggtaaaggcattggcaagagtatgcttgcctcaatcatcgaagccacgcccggacaccggctggaagcctcctgcctccccccggctacaaaaatgatgagactgctggccggaagcgggtttaagctgattcatgaaacgcagggcggtaagaaaacgtaccgctttacagactaa

SEQ ID NO: 104316 - DNA, 555 bp, Enterobacter aerogenes
atgatccagcgtttaaaaaagcgcaactttctctttaaagcggcactggttgccgccgtactttacggggcttcggccccgtctctttttgctgcatcggcgcaagtaggtttctcgccggaaggaaccgcgcagcagctcgttatcaacgtaatcggctcggcaaaagataacatcagaatgatggcctacagctttaccgcccccgatattatgaaagcgctgattgcggccaaacgccgcggtgtagacgtgaaaattgtcgttgatgagaatggcaatacgggccgcgcaagtcgtgcggcaatgaatcttgttacgaacgcgggtattccgcttcgggttaacagtaactacaaaatccagcatgacaaggtgatcatcgttgatggccgtcatgtggaaactggcagttttaactacacggccagtgccgagaaatataactctgaaaacgcgattgtgatgtgggatgcgccagaactggccgggcagtacctgaagcactggcaatcacgctggaatcagggccgggattttaccccgtcttattga

SEQ ID NO: 104317 - DNA, 1032 bp, Enterobacter aerogenes
atgactgagttaaccagtaatattcaagatattcgccagcgcccccgccgtgagcagggggtatggctgacgctcgaaccacttcagcgctacctgagtgatcccgatgtgtgggagctgagaattaacaagtatcagcaggttgtctgtgaaacgtcgaaaggtcgtattttccacgacgatgagaaaattacggctgaatatatatcacgcttaaccgacacgctttgtggttataacggactaccgaaagagtccgttaataacgtgcttctgccggacggctcaaggggaattatttgcttaccccctgccgtactggagggaacagtagccatcgcgtttcgtaagcatctgcccgttgataagtctcttgaacaactccgcgatgagggccgtttcactggctggaaacgaaaggttcagggtgaagtagcccttcagccattcgagcaagaattgctggagttgctcgataaagacgacctcgtttcgttttttaaaattgcggtacgcaacaagctgaacatcgttgtatcagggtctaccggttcgggtaaatcaacgtttacccgctccctgcttcgggaagtgccttataccgagcgcattgtagtttccgaggacgttcacgaaattgggtctgatctgcatcacgaaatggtttatatgctgtacggcgatcaggatggccgtctggccccggcggtcagcctgaaagcgtgtatgcgtctttctcccgaccgtatcatgatgacagagcttagggatgatgcagcatgggattacataaactcgctgaataccgggcatccgggcgggatcacatccacccacgccgacgatgcaaaatccactttcagccgtattgcgctgcttatcaagcaaaccggcgtcggccagacgctggattatgacgtgattatgaaaacgctgtacaccacgatagatgtcgtggtgtacatggaacaccgccagattgttgaggttctttatgatccagcgtttaaaaaagcgcaactttctctttaa

SEQ ID NO: 104318 - DNA, 1155 bp, Enterobacter aerogenes
atgagaaaagacagagaggaaaacttagattatctcgatgaagaagataccggcatcgaggatgagcgtcagggcttcagcggttcccccaaaaaacgtattgccggtgcgcgggcctttgtcgggctgatggtgttgataggttcggcaatggtgggatggttcatctataaccagatgcacgttaagaagctggccgacgatcccaaaaaggataaagagcaggttatgaccagctctttaccgcgccagtcttttgatgatgtgcccccgactatcgacaacacgccaaaaaatagcgtcgttcctccgttgcagacgacgcaggagtcgcagcagcaggttgcgcgtcaaacattgaataaccagaaaaaggaattatcaccggaagaaaaaattatgcgcgcccggttaggggtgtccttcaacggtgtcgatcctgagaaacaggctacgactgcgaaagaacaggagcgccggtcaggtcaggacaatacagaaaccagctcaaacagccaggcactggcgagccgaatgaaaccggcgcgtatggctgtcgcccaggcatctgtaatgccgcatccaaatctgaccattgcgcagggaacaatgattccttgcggtacaaatacggaactggataccaccgttccgggccaggtgaaatgtactgtaagccgtgatgtgtactctgctgacggtactgtaaaactgattgataaaggggctgtggtcactggcgagcagaatagcggtatccagaacggccagaatcgtgtgttcgttctctggtcacgcttgcgtaacccggatcagaccattgttaacctcgacagcagcggcactaacgctttaggtagtgcgggcgtacctggtcaggtcaactctcacttttgggaacgaatgggcgatgccattttcttctctgtgctgactgatggcatgaaagccggtatcgcgtcgattaacaacaacaactccgatgtgacgtttaacacaacggaaaacagtaccgaccagcttgctactgaagcattacgggcgaagattaatatcccgccaacgctctacgctgcgcagggcgatgccgtatccatctacgtagcccgcgatctggatttcagcactgtatatgggttagaaatgaatgactga

SEQ ID NO: 104319 - DNA, 888 bp, Enterobacter aerogenes
atgaaaaaacaattaatcgccggtttaattctggtcagcctcggcctctctggtcaggcgctggcgctggaagtgggaaaaggtagcccatacgactaccgtattaaatccgtggtgtataacccggttgacgtggtgcgtattgattccgttgccggtgttgccactcatattgtggtcgcgcctgatgaaagctatgtgacacacgcttttggtgacagcaatagttatgcgtttacccatgttgaaaacaacatgtttatcaagccgaaaggggaagttcccagcgatactaaccttgttctggtcacaaacaaacgcacttataacattgtgctgcactatgtaggtgactacaccacgaaagacgcccagggtaacgttaaagccaactttatcaagacgccgtggagtatgaaaaatgccacgctccagcttacttacctctatccatttgaggatatgaaaaaggctaataaaacgctggaaagtaaccgcgtgaaaaaggcgttgaaagaccttcagaacgggccttacaacctgctttataaaatgtcagatgaagatgaatatcggacagtggccccggtgaacgtttgggataatttccgcttcacatacttcaaattccctgcgaatgctgatttacccgttgtgttctatatcggtgacgatggtaaagaacacaccgttaaccagcatccagccggggaatataacaacattgttgtggctgaaacggtagcaaaagaatggcgtattcgttacggaaataaagtcgtgggtgttctgaatatgaattacaacccaaatctaggggcgatcagtaccggcactacgtcaccagatgttaagcgcgtgaaaaagggtgagggggataaatcatga

SEQ ID NO: 104320 - DNA, 717 bp, Enterobacter aerogenes
atgctgaagaaaaacaaacatcaagcgatatcgcgggaagatctgaataagtaccatgaggaaactcaagggcttgagcgcgatatggttaatgagatccttaattcccgctctcgcgcctggaaaattgccacggcctttttcgtctttgccgttgtgagcatgattactgcggtcggcgtcattatccgttttgcgcagccgttaccggcatacctcaccacgattaacaaagatacaggcgaagtatcgcaggtgaaaattacccgcgatgaagcgacttatggcgacgtgatagaccagtattggatttcacaatttgttattcaccgtgagtcctacgactacaacagtattcaggttgattatgacgccatgagcctgatggcttccggcgatgtagccgatgaatatctctccatgttcaaaggcccgaaccgcattgataagcggttgggtgactctgaaagaacgaccgttcatatcaactcggtgatcaccgaccgcgaacacggtgttgccaccgttcgctttaccacgcagcagcgcattcgccagcgtccgaaccctgagccgccgcgctactggattgccacgattgcgtatgagtacaaagcgttaccaatgaccgcgcagcagcgctatatcaacccgcttggcttccgtgtaacgagttaccgtaagaacgctgagaacgttggcgcagtgggaggctga

SEQ ID NO: 104321 - DNA, 171 bp, Enterobacter aerogenes; identical to SEQ ID NO: 97900

SEQ ID NO: 104322 - DNA, 1044 bp, Enterobacter aerogenes
atggccttttcatttacaacggatattttcaattacatggatacggtcacaaaggaatttgtggcctctaatcttggaattgttatatccaccatttcaccggtaattgggttagcgttgatttgcaaactcaccctggacgggctgtttacattagcccgtccacacggtgagccgctctcatcgttgataaaaaaattcattgtgtggtcgatgataatcagctttgccagcgcgggcgggctgtatcaaacccaactggctgatgcggccatgaagatcccggatgagttttcctcggtactggttattaacggttcgtccggtggcactgaagatgcaatgggtaacaacatcgacaaggccatccatgacgggatgcaggttgcgcgtactgcgtttgataacgccgatatttatagcggttccgggctggcgtcattattcctggcttgcgcggtcattatttccacggtgttgatctgtggtatcggggccgggctggtactgatggcgaaattactgctggcaatcactgtgtgctttgggcctatctttatcttctgcctgttgttcaagccgctgtatggcatgttcaataaatggcttggctcgatggttaactatgggctggtaacagttctgctgtcgatgctgtttggcctgatgattaagttctatcaaaaagcgctcgatgccgtcaccgcttccggggctgacagtagcctgttagggcctgtgttcgcgtgtctgctgataatgattgtctcttacctgatcctgatgcgcgtaccagaaattgcctctcgttggggagatggtatttctgcgggcattcaggagttaatccctagtcctggtggtggtggcagccggggcggccagaacgctgtcaataatcagggcggtggtgctaaaggcggagctggtacagggaatggtgctaaaaccgctgctgcgacggctgccggtggccccggcgcgggagcggccaccgctgcgggttcccaaatgcagggtttcgcaaagggttcacggcgctaa

SEQ ID NO: 104323 - DNA, 237 bp, Enterobacter aerogenes; identical to SEQ ID NO: 97902

SEQ ID NO: 104324 - DNA, 708 bp, Enterobacter aerogenes
atgaaaaagacacttgcaagccttgttttagctctggctatttcgccggttgcagttaatgcgcaactggtagttaacgatcctgcaaatctggcccaggcgcttgagcaggtcacattaatgacgcagcaaattgaacagctcaaatctcaattgctgaagcaggagcaaacgctggcttccttaaccggcagctctggtatcggtaatttgctgaatggcgatattagtacgctgaaaggcaatttaccgtctgactggacgcaggtatacagcgacgccatgaacagcagttcaggtatcacttcatctgctcaatccatgctgaaggaatttcagtcgcagattgacggtatgaaccgttccgaagcgatgagtttcattaagcagaagttggcggagaaaggggcgtatgaccgtgtgatggcgcagaacgcttacaacaatgaaatggcggagctgaataacattcaggagctgaccaatcagattgactcaaccacggacatgaaacaaatcgctgaccttcaggcgcgtatccagaccgcgcaaggtgctattcagggggagcaaacgaagctgcaactgatggcgatgctgcaaacctcgcaagacaagattttgcaggaacaaaaacaatacgcccagaagcgctttgtcctcggcgctgacggtgaagatctttccatgcctaacgtaacggaataa

SEQ ID NO: 104325 - DNA, 2631 bp, Enterobacter aerogenes
atggccgtagcggaaatgaaaaaaaggggggtgaaagatttcaaaaaagaaccttcctctttgaaatatattccttactcctaccatgtgacgccccatgttatcagtacggtaaatggggagtacctttctatatttaaaatccgtgggcgaacccatgactgtgcctctgatgccgagctgattaagtggcacgctgatttgaatcagcttttaaaagggattggtagtgagcatgtaaagttatggactcacttacatcaccgcgaaattaataattatcctgacacgcattacaatatgacgttcccgcgtatggtgaatgaatattatcgtgatcagtttgatgatacccccatgatggtaaatgacctgtacctgacggttgtttataaccctgtgggggatgccgctcaaaagatgctggcaaagtttgataagccatcggccagcgagctgcgcgaaatgcaggctgatgctattagtgcgctggaagatatttgtgagcaggtcatgaactccctgcgtccttatggcattgaccgcttaggctactacttccgtgacaaacgggggaacgtcattcctgaacagaaaaaagatgatgcagaagatgatgaggacattatcgatctgcgtgaagatttgctggccgatgtggaatatcaggacgttcaggaagataaagaagtctttagtggtactcaacacacctattctaaagcgctggagtggctctattacctcgttaatggtgagtgggcaccagtgccggtttgtcgtggccgaatccgtgaatatttggctactacccgcccaatatcttcattttggggggatggtatcgagattcgcggtactgacgaacgccgctatacgtctgccgttgaaatccgggattacgattccgatactgagcctggtcagatcaatatcctgatggaagcaccgtttgagtttgtgttaacgcaaacgtattgctgtatgtcccagcaagcggcaagaacttacctcactaaccaacaaaaagcactactggaaacaggcgatccatcctttacgcagataaaccagatgaatgacgccgttgatggcgttgtttcacgtacctttatcatgggctggcatcacctgacggtacacacctttggcaagacgcttaaagaggcccgttcaaacgccggtgttgccagaaatatgctgaacaactgcgggctgattgccagccaggtagggttagcttcagaagcggcatattatgcaaaacttccggctaatcaacacctgtcgccacgaccttgcccgctgaatagctggaattttctttgcttctcccccttccataattttatgtccgggaaagcaaataataacccgtgggggccagcgctgacgctgttcaaaacggtggcaaatacgccgctgtatatgaacttgcatgtaacgccagaagatgaaatgtctttcggtaagcgaccgctggcgcatacgttaatgcttgggcgttcgggggcaggtaaaactacgctgcttaacttcctgctgacgcaagcgatgaagtataacccgcgcatttttgcctttgaccgcgatcagggcatgatgccgatgattaaagcgttacacggtcactacacggttctgaaagagggcgttgcttccgggtgggcacctctacagatgcctggcaccaaagttaacattgcattttgtaagcgcctgatgcgcctgtgcgctgaaattaccaaaggcagcgtactcgatgctgatcaggttaatgaccttaaccgcgccgtcgatgctttgatggatgagaactccctcattccgacagatttacgcaccgtggatatgttaattcagcagatgccgaatccatatcaaacagcgggcagtaaacaaacactggcgtcattgcttgttccgtggactcgcggccatgaaaacggttggttgttcgataacgactcggattcactgaatctcggtgaatacgatatctacggctttgacctgacagatttcattgttgcagataatgagatccctcctgcaacacgtactccgctcctgatgtatctcaatttccgtgtgcgtcagtctattgatggccgtcgccgggtgattcaggtattcgatgagtttcaccagtaccttgacgatccaattatgagtgtggaagtcaaacgtggccttaaaacagaccgtaagaaagatgcggtttacgtattctccacgcaagaaccgaacgatgcgctggatagctccatcggtaaaaccatcatgcagcagtgcgtaacgaaaattcttctggaaaacccggatgcggattatgaggactacgttactcgcctcaaattgacaccggcagagtttgacgcgctgctgtctattcctgagaactcccgccagttcctggtgaaacaaggcagccaaagcgcgatggcgcaattcaacctggccccgcgcgttaagacgccggagaacttcaggaagctggataagatccttagcatcctgtcaggggaaacccaaaacgccgaaacactggcgaaaattattgagcaaattggggatgataaccctgataaatggctcgaaccctactggaaatctgtactcgcagcgtga

SEQ ID NO: 104326 - DNA, 315 bp, Enterobacter aerogenes; identical to SEQ ID NO: 97905

SEQ ID NO: 104327 - DNA, 291 bp, Enterobacter aerogenes
atgaatacagcgattaaacgttttttcccggtggcaatgttcatgatggtcgccctttgcgttcctgagctggcgctggccgccggtgcagataccggtgaatcatccatgagttccattaactcatggttaatgacgtggattccgattgcggccaccgttcttatcatcgtgagttctatcgcatggatcgctcatatgctcccggcgagctgggcggttcgtattgttatcggtctgattgttgtcggttccgcatcttaccttgttggccttttcgggctgagttaa

SEQ ID NO: 104328 - DNA, 318 bp, Enterobacter aerogenes
atgcgcgtttatctcatcttgttgaagcagttagaagaagtattcaatcaaaacaaagttgtgcggattgctattcaacggatggataaaaagaaatggataccgctttttgatgtgaaaaatagtgaagggggcgtaatcacttgctccctgcgagttcagtctggagagggggttagaacgtgggccgatctgcggatactggccgacatgctgagagacgattttaatgcaagagaagtggggcttttcctggatgagcctgattttatttttcctgatgatggagtgttagacaaagatgaatacagcgattaa

SEQ ID NO: 104329 - DNA, 741 bp, Enterobacter aerogenes
atgaagcaggttgttgcccttttcccactgttgattgctggccttttggatgccacacccgcaaatgcggaactgtcagcgccggttatggcactggcaaaacgttgtgcgccagaagtgcatcctttaactattgggtacttggttagccatgaatcgcgcaacaacccatacgcgataaatgtcaacgttcctaaaggaacaaaatcaccgttagccagacagccgcgctccctggatgaagctgttaaaacgacaaaatggctaacggctcatggttataactttgacgtaggtttagggcaaatcaactctgcgaatttcccaaaattgaacgtttctgccgcagatttgtttaacggttgtaaaaatctcgaagctgctcaatacgttcttaattactgctaccagctcgcaacaaaagagtatgcgccggggcagtcagctttgagacacgctttatcttgttataatacggggtcactaaccgccggatttacaaacggttatgtatcaaaggtggttgctcaaattgggcaatcaaaacccgtaatccctgctctgaaagccgatgatggctccactgatgtggaaagtgttgatacagctatagatgctgtgccggtagatgctgctgatggtgaagaacaaccaaaagacgccggtatgactgatgcctttggtggctcggataaagacgcttttggtgcatctgatggtgacgctttccggcagaagtag

SEQ ID NO: 104330 - DNA, 438 bp, Enterobacter aerogenes
atgagtaaaattattgattttcctaccggaaaaaagagggagaaaagggccaaagcgatccgagcgcgtcgcaataaagaagcgcagcagcggagcgaaataaccccctccaaattttggtgggttaagaaaataaagttactcaccgtgattaaacaatcggcgcgttttctcttattacatttagggttattagttgccgacatccttatctgtctccttcttattctaggaaaactcctaaaaatatttacgatgattggtatcatcgcggcacttctgtttctggtcgtggaatataggaatgattggcattatacgcaatctgcactccatgccgcagcaatatttgttagcctgattgccctgcgcatcgggcatgacaaactactgaatggcctaataaggcttaaatcccatctatccagaaaagggtga

SEQ ID NO: 104331 - DNA, 315 bp, Enterobacter aerogenes
atgaaaactaaaagcatcatcttcaccgcagctctcttactgaccggttgcgccagtcagtcacaagttgaccagttaaccaagcaggtgaatacgcttaaaacagatttgtataacctacagattcaacagcgcaatgatacacaggcacttcagcgcgaagtacagaaatcgcgccccatcggggtttgctatcttgacggccaaccctactcacaaggagcggtcattgctggccgcatttgtgccagtaatggcgttatcgtcaatggcaaacctacagaagtttcatggcaggtttatcaccgccgctaa

SEQ ID NO: 104332 - DNA, 654 bp, Enterobacter aerogenes
atggatatactttcccttttcccctctaacgtaatcgcattgtgggccgtgtcttttggttttctggccgtcctgtattggtggaagatcaccgccagaaaacgcagacacaaacgtaagcaacaacaagcccggcgtgtactcgcaaaaattcagaccctaccggcgttcggctacaagatcgcgtatctcaggaagatagaccctttcacctttgaggaactgttactggagggatttgagtcgcatggcttcagcattatcagaaacaaacgctataccggtgatggaggcattgacggccaggtaataatcggaaaacatcgctatctcatccaggccaaacgctatcgcggccatattgctttacaacacgttcaggagttcgatacgttgcttaaacgacataactgtcgcggtttgttttgccataccggaaaaactggcgcagcttcaaaagctgttagcttcgccagtgatcggatggagattatcagcggccagcgcctgattgatttgctcacgcccggcagctccttcaccatcgcagccgcaccgcagacaatgatgaggcgtaccgcagcaacgcgaggaacgaacatcattgtcgaggaagcggataaaaatacaaccgatagcatgagagttaattaa

SEQ ID NO: 104333 - DNA, 402 bp, Enterobacter aerogenes
atgaagtcagtaactatagaagcaaaaacttttgctgaaatgttaggaataacagaaggtgagttaatcttcgccattaagacaactggcacatttaaaaacaaaactattccacagcctcatgagccacataaatcaaataacagatttttatattctgacgtaatgaaatttatcgaatcaataaaagataaagaaaacctacaaaaaaaatatctgatgcgtttccgtcgatgcagctcgttggacactcttgaaaaagtatttgatagcttacgcgataagctatcaggtaaagaactggatgcaatgatgagtgcctcagaccatcgaagagccgaaatcactcataatactttatgggataaagtcccggcctccgcatggagaaatgtaaaataa

SEQ ID NO: 104334 - DNA, 315 bp, Enterobacter aerogenes; identical to SEQ ID NO: 104300

SEQ ID NO: 104335 - DNA, 258 bp, Enterobacter aerogenes
atgctgaaatttttgaaaaaagtttatagctatctagagtttttaggtgctcttatttgggttggtgttgggttgtattccatctggttagggtttagtaaattatttaaagataactcattttctattggtggtgctgaggttgtatctctgcttgacacaactccggttgcaataatgttcattttttgcggggtgattatcattgcatttatatgggttgggtatatcagcaagagactaaaaaatgaagcgtga

SEQ ID NO: 104336 - DNA, 543 bp, Enterobacter aerogenes
atgaaaaaagaggatagatcctttattagatgggtcagccttagctgtaagatttttactgctgccttagctatcggggtggtgtgctacgctgcaatgggagtgttaggcttagttaataatccagttccatattatttttctgaatggattaactggatgcaacctaagttaaaactaccagttacttatcatgattcgagcttataccttgataacggaacttacagtataggtgattatattctctcggttggttatcttttcgttattatcatggctcaatcgtatgtggctgcatattttcttgggagacttaatcataccttaatcagcaaggtgataatgtataaggcaactaaagaatttcaccaaaaatattcaggtataaaagcggctcatttcgaaaggttattgagtgaaaatcttacagaaacaggtctagaagatgtaagccgcaagcattgggagaagtggcgggaacattacaaaagtaatatgagttacgatgagtggaagcagaaattcaaaaaggttctttag

SEQ ID NO: 104337 - DNA, 246 bp, Enterobacter aerogenes
atgactcaagtaataattaaaaaatggggtaatagtccgtctgttcgccttccttctgcgattgtgaaagccgcttcgttaaacgttgatgatgtagtggagctgtcagtagaggacggcgcaattactatcgtgcccgttaaaacaaaggagtattcactggatgctctgatggccggtgttactaacgaaaatattcatgaggaaatttctttcggcgctcctgttgggaaggagttgttgtaa

SEQ ID NO: 104338 - DNA, 195 bp, Enterobacter aerogenes
atgtttcacatcatgtttgggattgttttcatagtgatgagtgtggcttctttggttgggcttgttttacacggccatgaatacacgccgggacactttgggaatatgaccgcattatgtatcgcatcgactctggcgtgggtttgggcgctttcagcagcgaaagaagcctggtacatcctgaagagtcgctaa

SEQ ID NO: 104339 - DNA, 585 bp, Enterobacter aerogenes
atgaagataggctacgccagaaagtcaactaaagagcaagacacatcgcttgagtaccagattgaggctttacaaaaagccgggtgcgaaaagtggtatgcggagcaggtatcgagaagcggtagtaaacggctcaaagcaggtgcaccagagttagaaaattgcatcaaagcgcttcgccctggtgacacgctggttgtgtgggcgctagatcggttgggcgggactctattacagcttttgcagcttatgaatgagctacgcagcaaagacattcattttgaaagtcttaaagaacatatcgacacacaaagtccaatgggtgaaatgtactattcactcatagctattttttccaatttcgagatagccagaaaccacgaaaggacaatggccgggcttgcggctgcaaagaagaaagggcgctttggtggcagaaaacctaaactatcgccacaagatataaaagaaattaacgcgcttgttaaatcgccagaagttacggtaaaagagatcgcggctcgttttaacgtgtcacgaccaacgatttacagacatattacccctgatagtaatactgattaa

SEQ ID NO: 104340 - DNA, 885 bp, Enterobacter aerogenes
gtgacagataaatcagtaccggcgaagcaaataaaaacggtaaacaccggagtctcgattaaagagaatccccctaaaggggatgaaatggcattcgcccattcaatattgtgtcaagttggcctcccccgctctaaagtggatggacgggagttcatgagaaaatcaggcgatgcctggcttatcgtccaggctggctggcttgatgaaggaagcggcccggtcgaacaaccgatcccctatggctctatgccgcgtttagcgctcgcctgggtatcctcttatgcactccgcaaagagacccgcgaaataccgatcggtaagagcgctagtgagttcctgcatttaatgggcttaacaagcggcggcagacaacacaaaacactacgcgaacaaatgcacgcgctggccgcttgccggttgcagttaggttttaaaggtcgttctttcaacggccagcctgttgagcaattcgatgcctggcagaaagacgacgaaagtaaccagctaagtttatggccgggcgtaatgactctttcagaagcgtactttaatgggctgattgatagcgccgttcccctcgataaccgcgctctatacgcgctaaaaggttcggcattgtcgttagatgtttatacgtggcttgcacatcgtctacaccgcatcgagggccgcccgattaaactgcactggatgaatttacgggaccagtttgctcaagagtatatgggtaaagacgctgacaaagattttaagaagaaatttcttccagctctgcgcgacgtgctgacagtctacccacaggcgaaggtggataaagtcaccggagggatattactgtatccgtcacccccacctatcccgttcaaggaaggaaaaaaatag

SEQ ID NO: 104341 - DNA, 201 bp, Enterobacter aerogenes
atgtacgcgctagggggtcggatgtactcggatcaggggggtcggatgtacgtggataacttattgtttcaacaggttttttacaggcttgttcacattaccccgatctggtcagaaaatcgcagtggaattgctgtgaataaaaaaaaggcccgtatgggcctatttttttccttccttgaacgggataggtgggggtga

SEQ ID NO: 104342 - DNA, 243 bp, Enterobacter aerogenes
atgtccgtacgattccttggtcatgcggtagaaaacttttttatccagaacctccttgattatggcattgtaggcactattctatttgttattttcttatggtttctactcaaacctattatcaaaaacgcaaaaacaaaaaatggaatttcagttgcaattttattagtttttacaggattcttcttaagttggtggagccaaatttgtcgaaaacggaacgctaccgttgacaatatttaa

SEQ ID NO: 104343 - DNA, 264 bp, Enterobacter aerogenes; identical to SEQ ID NO: 88502

SEQ ID NO: 104344 - DNA, 639 bp, Enterobacter aerogenes
gtgttcgctgagtttggtgttttgaattatctgacctacctggtcggggctatttttatcattctcgtaccaggtcccaatactttttttgtactgaaaaccggtatcgcgcacggcgttaaaaaaggataccttgccgccgctggcgtgtttatcggcgatgcggttctgatgttcctggcttttgctggcgttgcgacgcttatcaaaacgaccccggtgctgtttaatattgtgcgctatcttggcgcgatttatctgctttggctgggcgccaaaatgctctactcggtatttaaacagcgcgaggggcaagatgccgccgatgctgagccggggagcgctatcctcaaacgctcgttaaccctgagcctgactaacccgaaagcgattcttttctatgtctcttttttcgtccagttcattgacgttaatgcgacatcgccgggcatcgcgttctttatcctggcgctgacgctggaggtcattagctttgtctatatgagcttccttatcctttctggctcgtttgtgacgcgctatgtgaaaaccaaaaagaaactggcgaaattgggcaacagccttatcggtctggtctttgtgggttttgccgcccgcctggcgacgctgcagtcctga

SEQ ID NO: 104345 - DNA, 588 bp, Enterobacter aerogenes
ttggccttttttatttccccggcgcctgcgcatcgttttgatatgagccagctgcgatataatggcggccatttttacaaactgacaggaccttatggaacgctttctggaaaacgctatttatgcttcgcgctggctgctggcgccggtttatttcggcctctcgctgggccttatcgcgctatcgataaaatttttcaggagatattccacatcctgccgcatatcttcagcgtcagcgagtcggatctgattctgacgctgctttcgctggtcgatatgacgctggtgggcgggctgctggtgatggtgatgttttcaggttatgaaaacttcgtttcgacgctggatattaacgaaggcaaagagaagctcaactggcttggcaaaatggatgcgacatcgctgaaaaacaaggtggcggcgtcgattgtggctatctcttccattcacctgctgcgggtgtttatggatgcgaagaacgtgccggataataagctgatgtggtacgtcattatccatctcacctttgtgctttcagcctttgtgatgggctatctcgatcgcctgaccaaggtaaagcactga

SEQ ID NO: 104346 - DNA, 1176 bp, Enterobacter aerogenes
atgacaattcatgcaacagatatcgccatcgtcggcggcggaatggtcggcggcgcgctggcgctggggctggcgcaacacgggttttcggtgacggtgatagaaaaacacgcgcctccggcctttgatgccgctgcggcgccggatgtgcgtatttcggcgatcagcgcgtcgtcggtcggcttgctcaaaagcctcggcgtttgggaagcggtgcgcggtatgcgcgcgcatgcttatcgtcgtcttgaaacctgggagtgggaaagcgcgcacgttgactttaatgccgccgagctgaagctgcctgagcttggctatatggtggaaaatagcgtgctacagctggcgctgtggcaggcgcttgaagcccatccgcaggtgagcttgcgggttggcgtgacgttaagcgagcttcatcgtgagccgcagggcgtttcgctgcgcctgagcgatgagagcgtttgcacggcgcaactggcgatcggcgcagacggcgcgaattctcaggtgcgcgaactggccggcatcggcgtacaggcgtggcaatatcagcaatcctgtatgctaattagcgtgcagtgcgccgacgatcccggtgatagcacctggcaacagttcacccccagcgggccgcgcgccttcctgccgctattcgataactgggcgtcgctggtgtggtacgacaccccggcgcgcatccgccagctgcaggcgatgtcgatgacccaactgcagcaggaaatcaccgcgcatttcccgaaacgtctgggcagcgtgacgccaatgagcgccggcgccttcccgttaacccgccgacatgcgctgcagtacgtgcaaccggggctggcgctggtaggggatgcggcgcataccattcatccgctggcggggcagggggttaaccttggctatcgcgacgttgacgcgctgctggatattttggcggaagcccgcgggcgcggggaagcctggtccagcttgccggtgctgaagcgctatcaggcgcggcgccgggcggataactttattatgcaatccggcatggatctgttctatgccggcttcagcaacgatttagcgccggtgcgcgtgttgcgtaatattggcctgatggctgccgaacgtgccggtgtattaaagcgccaggcattgaaatatgcattagggttgtaa

SEQ ID NO: 104347 - DNA, 1425 bp, Enterobacter aerogenes
atgacaaaaaaactccatattaaaacctggggctgtcagatgaacgaatacgattcatccaagatggccgatctgctggatgccacccatgggtatcaactcacagaagtggccgaagaagcggacgtgctgctgctcaacacctgctcaattcgcgagaaggcgcaggaaaaagtgttccatcagcttggccgctggaaactactgaaagagaaaaaacccggcgtgattatcggcgtcggcggctgtgtcgcctcccaggaaggcaaactgattcgccagcgcgcccattacgttgacattatttttggcccgcagacgctgcatcgcctgccggagatgatcgacgcggtgcgcaataaccataaaccggttatcgatgtgagcttcccggaaatcgaaaaattcgatcgcctgccggaaccgcgcgccgaggggccgaccgccttcgtttccattatggaaggctgcaacaaatactgcacttactgcgtggtgccctatacccgcggtgaagaagtgagccgtccgtgcgacgatattctgtttgaaatcgctcaactggcggcgcaaggggtgcgtgaagtcaacctgctcgggcagaacgttaacgcctggcgcggcgaaaactacgatggcacgaccggcaactttgccgatctgctgcgtctggtcgccgccatcgacggcatcgaccgtattcgcttcaccaccagccacccgattgagtttactgacgatatcatcgaggtctatcgcgatacccctgagctggtgagcttcctgcatttaccggtgcaggctggttccgatcgcgtactgaacctgatgggccgtacccacaccgtgctggaatataaagcgattatccgcaagctgcgcgaagcgcgcccggatattcagattagctccgactttatcgtcggtttccctggcgaaacgacggaagacttcgaaaaaaccatgaagctgattgccgaggttaactttgatgtcagctacagctttatcttctctgcccgcccgggcaccccggcggcggatatggtcgacgatgttcctgaagccgataaaaaacagcgcctgtatattctgcaggagcgtattaatcagcaggcgatggcatggagccgccgcatgctcggcaccacccagcgtattctggtagaaggcacgtcgcgtaagagcctgatggagctctccgggcgcaccgagaacaaccgcgtggtgaacttcgaaggcacgccggatatggtcggtaaattcgtcgacgtagaaatcgtcgatgtctacactaactcattacgcggcaaaattgtccgcacagaagatgagatgggactgcgcgtcgtggaatcgccggaatcggtcattgcgcgtacgcgaaaagaaaacgatctgggcgtcggcatctaccagccgtaa

SEQ ID NO: 104348 - DNA, 1047 bp, Enterobacter aerogenes
ttgaacatagaaacccgtgaaattaccctggagccagcggacaatgcccgcctgttagcactgtgcggcccgtttgacgacaacatcaaacagctggagcgtcggttgggtattgagatcaaccgccgcgacaatcactttaaactgaccggccgcgccatctgcgtgcacgccgcggccgatattctgacaagcctgtatgtcgataccgcgccaatgcgcggccagattcaggatattgaaccggaacaaatccacctggctattaaagaagcccgggtcctcgagcagagcgccgagagcgtgccggaatacggcaaggccatcaatatcaaaaccaaacgcggggtgatcaaaccgcgtacgccaaaccaggcgcaatacatcgccaatatcctcgaccacgacattacctttggcgtcggcccggcgggtactggtaaaacctatcttgcggtcgccgcggcggtcgatgccctggagcgtcaggaaattcgccgcattctgctgactcgtcctgcggtcgaagcaggcgagaagctcggcttcctgccaggcgacttaagccagaaggttgacccgtatttgcgcccgctgtacgacgcgctgttcgagatgctcggctttgagaaagtcgagaaactgattgagcgtaacgtcattgaagtcgcgccgctggcctacatgcgcgggcgtacgctgaatgacgcctttatcattctcgacgaaagccagaacaccaccatcgagcagatgaagatgttcctgacccgtatcggctttaactcgaaagcggttatcaccggcgacgttacccagattgacctaccgcgcaataccaaatcaggtctgcgccacgccgtcgaagtgctggcggaagtcgatgaaatcagcttcaacttcttccacagcgaagacgtggtgcgccatccggtggtcgcccgcatcgtcaatgcctatgaggcatgggaagaagccgaacaaaaacgtaaagcagaactggccgccgagcgcaaacgcgaagcccaggaacaggagcaaaaatga

SEQ ID NO: 104349 - DNA, 474 bp, Enterobacter aerogenes
atgagtcaggtgattctcgatttacagctggcctgcgaagacaccagcggtctaccggacgaagccctctttcaacgctgggtggatgccgtcatcccgcagttccaggaagagtcagagttaacgattcgcctggttgatgtcgccgaaagccacgagctgaacctgacctatcgcggcaaggataagccgactaacgtcctctccttccccttcgaagccccgccgggcattgagatgccgctgctcggcgatctgattatctgccgccaggtggttgaacaggaagccaaagagcaggaaaaaccgctggaggcacactgggcgcacatggtcgtgcacggtagcctgcacctgctgggctacgatcatatcgaagatgaagaagcggaagaaatggaaggcctcgaaacagagataatgcttgctctgggctatgaggatccgtacattgccgagaagattgctgaatag

SEQ ID NO: 104350 - DNA, 948 bp, Enterobacter aerogenes
atgccgtacgacgctgagtttacgcgcgacgagcgacaattaaatcaacacgagaacccatacgacgccatgagcgacgacaattcacacagtagtgacacagtaaacagcaaaaagggatttttctccctcttactcagccaacttttccacggtgaacccaaaaaccgtgatgaattattggcgctgatccgtgactccgggcagaacgagcttatcgatgaagatacgcgcgacatgctcgaaggggtaatggatatcgccgaccagcgcgtccgcgatattatgatcccgcgttcgcaaatgattaccctgaaacgcaaccagacgctggacgagtgcctcgatgtgatcatcgaatccgcccactcgcgtttcccggtcattagcgaagataaagatcacattgaagggattctgatggctaaggatctgctgccgtttatgcgcagcgacgccgaagctttcagcatggaaaaagtgttacgtccggcggttgtcgtgcctgaaagcaagcgggttgaccgcatgctgaaagagttccgctcgcaacgttatcatatggcgatcgtcatcgacgagttcggcggcgtctctggtctggtgactatcgaagatattctcgaacttatcgtcggcgaaatcgaagacgaatacgatgaagaggaagatatcgatttccgtcagctaagccgtcatacctggacggtacgcgcgctggcatcgattgaagatttcaataaagcctacggcacccacttcagcgatgaagaggtcgataccatcggcggactggtgatgcaggcctttggtcatctcccggcccgcggcgagtcgattgacattgatggttaccaattcaaggtcgcaatggctgacagcagacgtattattcaggtccatgtaaagcttcctgatgatgcgccgcagccgaagctggaagactaa

SEQ ID NO: 104351 - DNA, 1539 bp, Enterobacter aerogenes
atggtatttgcctctttacttgaacgccagcgcgtacgtctgctgctggcgctgttattcggagccagcggaacgctggctttttcaccttacgacttctggccagcggcgattgtctcgctgtttggtctgcaggcgctcactctcaaccgtcgcccgctacagagcgcctggattggctacttctgggggcttgggctattcggcaccggtattaactgggtttacgttagcatcgcgcagttcggcggcatgccgggcccggttaacgttttcctcgttgctttgctggcggcctatttatcgctgtacaccggtctgttcgccgggatcctcgcgagactgtggccgaaaaccaactggatccgtctggccattgccgcgcctgtcatctggcaaattaccgaatttctccgcggctgggtgctgaccggtttcccgtggctgcagttcggctatagccagattgacggtccgctaaagggcctggcgccggtgatgggcgttgaggcgataaactttctgttgatggtggtcagcggcctgctggcgctggctatcgcgcagcgtcactggaaaccgctgctggtggcgatagtgctatttgctctgcccttcccgctgcgttatatccagtggtatcaactgctgcctgagcgggcgacggaagtctctttggtgcagggcgatatcccgcaggcgatgaaatgggatgaaaaccagctggtaaacaccctgaaaacctatctcgatctcacccagccgcatatgggtaaatcgcagctgattatctggccggagtcggcgattccggatctggaaatcaatcagcagcatttcctcagtatggttgatgacctgatgcgggcaaaaaatagctcgttgattaccggtattgtcgatgcgcgcctcaataaacaaaaccgctacgatacctacaacaccatcatcacgctgggtaaagataacccgtacagctacgactcgaccaatcgctataacaaaaaccatctggtgccgttcggcgaattcgtaccgctggagtcgattttacgacctctggcgccgttcttcgatttgccgatgtcctcgttcagccgcggcccttacgtgcagccgcagctggtagcgcataacctgaagcttacggcggcaatttgctacgaaatcattctcggcgagcaggtccgcgataatttccgcccggataccgattatctgctgactatctccaacgatgcgtggtttggtaagtcaattggcccatggcagcacttccagatggcgcggatgcgcgcgctggaactggcgcgcccgctgctacgcagcaccaacaacggtatcaccgccgttattggcccgcgtggtgaaattcaggacatgatcccacagtttacccgcgcggtgttgaccactaaggtcacgccaaccaccggcctgacgccgtatgctcgtaccggcaattggccgctgtgggcgttaaccgccctctttggctttgccgcgctggtgatgagcctgcgccagcgtcgacgctaa

SEQ ID NO: 104352 - DNA, 912 bp, Enterobacter aerogenes
atgcaattacgtaaactggccgccgcaatgctggtcatgggagtgaccgctggtctggcgcacgctgaagatgccgccccggccgcaggtcagagcacgctggataaaatcgccaaaaacggggtgatcgtcgtcggccaccgcgagtcgtcagtaccattctcctattacgataaccaacaaaaagtggtgggttactctcaggattactccaacgctatcgttgaagccataaagaaaaagctgaataaacccgatctgcaggtgaaactgattccggtcacctcgcagaaccgcatcccgttactgcagaacggcacttatgatttcgagtgcggttccaccaccaacaaccttgagcgtcagaagcaggccgccttctccgataccattttcgtcgtcggcactcgtctgctggtgaaaaaaggtgggccgattaaagacttcccggatctgaaagacaaagcggtagtcgtcacttccggtactacctcggaagtgctgctgcataagctgaacgacgagaagaaaatgaacatgcgcatcatcagcgcgaaagatcacggcgactctttccgtacgctggaaagtggccgcgcggtggcctttatgatggatgatgccctgctggccggcgagcgcgcaaaagcgaagaaaccggataactgggaaatcgtcggtacgccgcagtcgaaagaggcctatggctgcatgctgcgtaaagacgacgcatcgttcaaaacactggtagatgacaccgttgcccaggcgcagacctctggcgaagcggcgaaatggttcgatacctggtttaagaacccgattccgccgaaaaatctgaacctgaacttcgaactgtccgacgacatgaaggcgctgttcaaatcacccaatgacaaggctcttaactaa

SEQ ID NO: 104353 - DNA, 741 bp, Enterobacter aerogenes
atgtcaatagactggaactggggaatattcctgcaacccgccccgttcggcaacaccacttatctaggctggttatggagcggctttcaggttaccgtcgcgctgtcgattagcgcctggattatcgctttcctcatcggctcgctgttcggtattctgcgtaccgtccctaaccgctggttagccgggatcggcacctgctacgtcgaactgtttcgtaacgttccactgattgtccagttctttacctggtaccttgttattccggagtttctgccggaaaacatcggcatgtggtttaagtcggaactggatccaaatattcagttctttgtctcctcaatgctgtgccttgggctgtttaccgctgcccgcgtctgcgagcaggtccgcgccgcgatacagtcccttcctcgcgggcagaaaaatgccggcctggcgatggggctgaccctgccgcaaacctatcgctacgtgctgctgccgaacgcttatcgcgttatcgtgccgccgatgacctcggaaatgatgaacctggtaaaaaactcggctatcgcttccactatcggtctggcggatatggcggcgcaggcgggcaagctgctggattactcagcccacgcctgggaatcgtttaccgcgatcaccctcgcctatgtattcatcaacgccgtaatcatgctggtgatgtatgtggttgaacgtaaagttcgcctgccgggcaatatgggaggcaaataa

SEQ ID NO: 104354 - DNA, 675 bp, Enterobacter aerogenes
atgtacgattttgactggagttcaattgttccttccatgccctacctgctggcagggttggtcattacgctgaaaatcaccgtcacggcaattattatcggtatcgtctggggcaccattctggcggtgatgcgcctgtcaagcttcctgccgttggcgtggtttgccaaaacctacgttaacgttttccgctcgattccgctggtgatggtgctgctgtggttctatctgatcgttcccggattcctgcaaaacgtgctggggctgtcgccgaaaaccgatattcgcctgatttcggcgatggtggcattttcgatgtttgaagcggcctactattcggaaattattcgcgccgggatccagagtatttcccgtggtcagtcgagcgccgcgctggcgctggggatgacccactggcaatcgatgaagttggtgattctgccgcaggccttccgcgcgatggtcccgctgctgttaacccagggtatcgtcctgttccaggatacctcgctggtgtacgtcctgagcctggccgatttcttccgtaccgcctccaccattggcgaacgtgacggaacccaggtggaaatgatcctgttcgcaggcgccgtttattttgtatttagtctcagcgcatcgctgttggtcagctggttgaagaaaaggactgtgtaa

SEQ ID NO: 104355 - DNA, 726 bp, Enterobacter aerogenes
atgattaccctgaaaaatatttcaaaatggtatggtcactttcaggtgctgaccgattgctccaccgaagtgaaaaaaggcgaggttgtggtggtttgcgggccgtcaggctccggtaaatcgacgctgattaaaaccgttaatggccttgagccggtgcagcaaggcgaaattatcgttgatggcactcaggttaacgataagaaaaccaatcttgctaaactgcgttcccgcgtcggtatggtattccagcactttgaactgttcccgcacctgtcgatcatcgacaacctgacgctggcgcaaattaaggttctcaatcgcgataaagaatcttcgcgtaaaaaggggcttaagctgctggagcgcgtgggtctggcggcgcatgcggaaaaatatccggcgcagctctccggcggccagcagcagcgtgtcgcgatcgcgcgcgcgctgtgcatggatccgatcgcgatgctgttcgatgagccaacttcagcgctagacccggagatgatcaacgaagtactggacgtgatggtcgagctggctaacgaaggtatgaccatgatggtggtgacgcacgaaatgggctttgcccgtaaagtggctaaccgggttatctttatggatgaaggtaaaattgtcgaagatgtcgataaagaagccttcttcgccaacccgcaatcagaacgcgcgaaagatttccttgccaaaatcctgcactaa

SEQ ID NO: 104356 - DNA, 1674 bp, Enterobacter aerogenes
atgtttaataaaaaaaatctgattcacaccctgctgattgtgtttttgtgtcagcagcaggttttcgccagtacgatagtctccaccacgactaaccaaaacgagcaggataaagcccgtcaggcggcgctgacaccacagcagcaggccgcccaggcttcactaattaataccgaccgacaaacgctcacgtttccaaaggaagaaaactgcaggttcatcaataatattcatatcgattctgccgagccgaagctcacgcatcagcttcttgacaaccttacagctcaggctctgcatcgttgtctggggattaacggtattcagcacctcaccatggcattacaaaatgagttaatcgcccgtggttacatcacttcattactgaccatcccggaacagtcattgacggagggcacattaaggctcgaactcgcttatggcaaaatcggtgatattttctggtcaacgacaagcgagcaaaccaccagcatctggaacaatatccccaccggcaagggagatatcctgcggctctccgacctcgaacagggaatggaaaacctgcgccgcctgccaggaagttcggcgaatatgcaaatattaccgggacaacgggaggcagaaagcaatctgcagctaacgcgtcggctggataaaaaatggcaggtggcagcctggatggatgacgctggcagccgcgccagcggtcgctatcaggccggaggtgcgctctatctttatgatatcaccacactcaacgacattttctatgtctcaggaggaggagatatcgagtttaatcaacataatgatggtaaccagaatggcagtctgtattactcgattcccttcggttactgggcgttaggtctttacggttcacagagccaatatcgccagttgttcaggggcaactggtcgcaaacggattataaaagtaaaaatcgctactatagcgcgacgctgtcacgactgctgtctcacacccgtcagcaaaaaacgtcgctggatttccgtatctcaaaaagtacatcacactactattttggcggtgaagaacttagggtgatgcgcaaacagaacccgacatgggagctgacgctacgacagcaacgctatttcgataaaaaagtcgtcgccgccagcctggggttacagcgccgcctcccatggctaaactccgtcgccacaccggaagaaaaagcaggccagttcagtaagcgctcacgcgtagtacatgccgatttgcaggccttaatgaaattcgatttaaccggagatagatttagctatgcaccgcattttaatgcgcaatatagcccggacattctctcttcggataaccaatttaatattggcaaccgctggacggttcgcggatttgatggcgaatatactctctctggcaatcagggatggtactggagcaatgatttcatctgggatattgccggcccggaacagcaattctatttaggattagatattggtcgtattatcggcagtgaacaatatcggcaaggaaaagttatttcaggtgccgttagcggattgcgcggtgatatattctcaacacaatatgattttttcatcggcacaccgctaagtaaaccagataactttagtagtgactcattcaatatgggtttctcattgaagtggaagtattaa

SEQ ID NO: 104357 - DNA, 1794 bp, Enterobacter aerogenes
atgtttaagtttaaattaacctatgttgctttagcagcagcgttaagctcgacggtggtgtacgccgatccgtcgacttacacccatctatcaggcgcaacggtggttgatattgaagcgccgaatgctgcaggcgtttcgcacaacctgtatcgtgaatttaacgttggcagcaacggtttaatactcaataacagcgacagcgatattaatcatgcgacttttggcaatattgccaaaaacaacaacctgaccaatggcggcgcatcggtgatcctgaatgaagtcacctccaataaagccagttcattaaatggcttcattgaagtcgccgggctgaaagccgacgtggtaatcgctaaccctaacggtattacctgctccggctgtagtttcgttaataccaacaaggcaatattaacgacaggtcaggtgaatttgaccgatgaaggcgctatcggcagctataccatcaccaatggcaaaatcaccatcggtgaaaatggcatgaacgctgctaacagctatgctgctctactcgccgacgcgattaaaattaatggtaaagtgcaggccaagaacgcccttgttagtgcaggtaatttcaccatggataacagttctggcgcggtgacctcagcgggtaaaaaagcgaccctgatcgaaatgacgattaacccgcaatacagcatcgacgtcagtagtcttggcggcattactgccaacagcattagcatgattggcaataacattggttttggcgtacgtaataatggctctattatctcaaacagctcactgcaactcaccagctacggaaacctgataaataaagggacgataaaaggaaacggtctgctaagccaggtttctacggtcacaggtatcaccaatgaaggcagtatcggcggagccaattatttaatgctctccagtggggattatatcgttaacgtcggttctatcactggcggtcagctaattgccaccgctaacggcaacatcactaacggcgactctggaacgatgaccggaaccagtgggttaagcctggccagcggtggaaaaatccgtaatgaggctaaggcctccctgctgtcgaataaccagatttccgccacggcaataggcgattttctgaatgaagggaaaatcagtgctaaaaacaccacccttacttttgttggcgagagttttaaaaataccgggaacattaattcaaccggcaacaccaccattcagtctcttaagcaggatggcaccgtaaatgtcggggaaatctacaatctgggtaatatcactggcgaaaacatcaatctacaaaccaacggcacactggcgcaaagcaccagtggcaaaatgaccgcaactaacgcgattaccgcgcacagctattggttgaataataatggctcgatgcaagcgcaaagtattaccagcgatcatggcccggtcaataataccggcagcatctccgcacataatatttctatcaccacttatgcggatattgttaatgaaggaaccatttacagtagcggggatttagttctggatacgcaaaaaagaggcaatatctataactacagtctgatcgatgcggatggcaccctgacgatgacggcgaaaaaggtagtcaacagcggtcgtggttgcggttggtttaaatttaatacctgtgatgtcggcaccatcagcgccaataagatggtcctcaactcctcgcataaatacgccagtgagatgggtggttatcaatacttcaaggttgcagaaattaataccgtactgtaa

SEQ ID NO: 104358 - DNA, 486 bp, Enterobacter aerogenes; identical to SEQ ID NO: 86909

SEQ ID NO: 104359 - DNA, 2583 bp, Enterobacter aerogenes
atgcaagagcaataccgcccggaagagatagaatcgaaagtccagcttcactgggacgaaaatcgtacatttgaagtaactgaagacgagagcaaagagaagtattactgcctgtcgatgcttccttatccttctggtcgactacacatgggtcacgtgcgtaactacaccatcggcgacgtcatcgcgcgctatcagcgcatgctgggcaaaaacgtcctgcagccgatcggttgggatgcgtttggtctgcctgcggaaggcgcggcggtgaaaaacaataccgccccggccccgtggacctatgacaacatcgcatacatgaaaaaccagctgaaaaagctgggcttcggctatgactggagccgtgaaattgcgacctgcaccccggaatactaccgctgggagcaaaaattcttcaccgagctgtataaaaaaggcctggtgtacaaaaaaacctcagcggtgaactggtgtccgaacgatcagaccgtgctggctaacgaacaggttatcgacggctgctgctggcgctgcgacaccaaagttgagcgcaaagagatcccgcagtggtttattaaaatcaccgcctacgctgacgaactgctcaacgatctggacaacctggatcactggcctgacaccgttaagaccatgcagcgcaactggatcggccgctctgaaggggtagaaatctcctttgacgtcaacgactacgccgataagctgaccgtctacaccacccgcccggataccttcatgggctgcacctaccttgccgtcgcagcgggtcacccgctggcgcaacaggctgcggctaacaatccggcgctggccgcctttatcgacgaatgccgtaataccaaagttgccgaagccgatatggcgacgatggagaaaaaaggcgtcgacaccggctttaaagctattcacccgctgaccggcgaagccatcccggtatgggcggctaacttcgtactgatggagtacggcaccggcgcggtgatggccgttccgggtcacgaccagcgcgactacgagtttgccagcaaatacggcctgaacatcaagccagttattctcgccgctgacggttccgagccggatctctccgagcaggccctgaccgagaaaggcgtgctgttcaactccggcgaatttagcggcctggattacgaagcaggcttcaacgccattgccgataaactggccgcgatgggcgttggcgagcgcaaagttaactaccgcctgcgcgattggggggtttcccgccagcgttactggggcgcgccaattccgatggtgaccctggaagacggtaccgtgatgccgacgccggaagaccaactgccggttatcctgccggaagacgtcgtcatggacggcatcaccagcccgatcaaagccgatcctgagtgggcgaaaaccaccgttaacggcatgccggcgctgcgtgaaaccgacacattcgacacctttatggagtcctcctggtactacgcgcgctacacctgcccgcagtacgataaaggtatgctggacccgaatgccgcgaactactggctgccggtggatatctacatcggcggcatcgaacacgccatcatgcacctgctctatttccgcttcttccacaagctgatgcgcgatgccggtatggtgaactccgatgagccagctaaacagctgttgtgccagggtatggtactggccgatgcgttctactacgtcggcgaaaacggcgagcgtaactgggtatcaccgattgacgccaccgttgagcgtgatgaaaaaggccgtatcgttaaagccttcgacccacagggccgcgagctggtgtataccggcatgagcaaaatgtccaagtcgaagaacaacggtatcgacccgcaggttatggttgagcgctacggcgcggataccgtacgtctgttcatgatgttcgcctccccagcagaaatgacccttgagtggcaggaatctggcgtagaaggggcaaaccgcttcctgaaacgcgtctggaaactggtttacgagcatacctctcagggcccggctgtcgccctggatgtggcaagcctcagcgaagatcagcaagcgctgcgtcgcgacgtgcataaaacgattgccaaagtgaccgatgatatcggccgtcgtcagaccttcaataccgccattgccgcggtaatggagctgatgaacaaactggcgaaagcgccgcaggaaagcgaacaagatcgcgcgctgatgcgtgaagcgctgctggccgtggtgcgtatgctcaacccgttcaccccgcatgcctgcttcaccctgtggcaagaactgggcggcgaaggcgatatcgacaacgcgccgtggccggtagcagacgaaagtgcaatggttgaaaacacgactctggtcgtcgtccaggtaaacggtaaagttcgtggtaaaattaccgttgcggtagacgcaaccgaagagcaggttcgtgaacgtgcaggccaggaacatctggtcgcaaaataccttgaaggcgtgaccgtacgtaaagtgatttacgttccgggcaaactgctcaatctggtcgttggctaa

SEQ ID NO: 104360 - DNA, 591 bp, Enterobacter aerogenes
gtgcgatatctggcaacaatgctgttatctctggcggtgttaatcaccgccggttgcggctggcatctacgtagtaatacgcaggttccaaccacaatgaaaactatgattttccagtcaggcgatccgaatggtccattaagccgtgcggtacgtaaccagctacgtctgaatggcgtagagctgatcgaagccgatacgctgcgtaaggatattccgtccctgcgtctgggtaactcatccattcagaaagatacggcatccattttccaggatggtcgtactgctgaataccaaatggtgctgaccgttaacgccaccgtattgattccgggccatgacatttacccaatcaataccaaggtttatcgctcgttcttcgataacccgcaggcggcgctggcgaaagatgccgagcaggacatgattgttcgtgaaatgtacgataaggctgcggaacagttgatccgtaaattgccgagcgtgcatgtcgcggatgtcgaagccactaaagaggctgagcagccggtgtctggtaccccggccacctcaacctctggcaaccgcgtctccactacgctgggtaactga

SEQ ID NO: 104361 - DNA, 1032 bp, Enterobacter aerogenes
atgattcggttgtacccggaacaactccgcgcgcagctcactgaagggctgcgcgcggcgtatttattgcttggtagcgacccattgctgttacaggaaagccaggatgcgatccgcgaagccgcggccgcccagggctttaccgaacatcacaccgcgaccatcgatgccagcaccgactggcccgcccttttttccttaagtcaggcgctgagcctcttttccagccgccagacgcttctgcttatcctgccggaaaacggcccgaatgcggcgatcaacgaacagctgtccacgctggtcggtatgctgcatgaagatctgctgctgattgtccgcggcaacaagcttaccaaggcgcaggaaaacgcggcgtggataacagcgcttgccagccgcgccgtgcaggtgagctgccagacgccggaatacgcgcagttgcctcgctggctggccgcccgcgctaaacagaatcagttgcagttagatgaggccgccagccaactgctgtgctactgctatgaaggcaacctgctggcgctggcgcaggcgctggagcgcctctctttgctgtggcctgacggtaaactgacgctgccgcgcgttgaacaggcagtgaatgacgccgcccactttacgccgtatcactgggtcgatgccctgctggccggcaaaagcaaacgcgtactgcacgtcctgcaacaactgcgccttgaaggttgcgaacccgctattttgctgcgcacgttgcagcgcgaactgctgctgctggtcactctgaagcgccagtcggcacatacgccgctgcgcacgctgtttgataaacaccgggtctggcagaatcgacgtcagctggtcggcgacgcgctcacgcgcctcagcgccgaacagttacgccaggccgttacgttattaacccgcgccgagctcaccttcaaacaggactacggccagtcaatatggcccgagctggaaagcctttcgttactgctctgccataaagcgctggcggacgtttttattgatggttga

SEQ ID NO: 104362 - DNA, 651 bp, Enterobacter aerogenes
atggttgatatgactcagttgcaggcaatgtacggcggcaccttcgatccggtgcattatggtcaccttaagccggtagagattctggcaaaccaaattggtcttagccgggtcattatcgtgcccaataacgtgccgccgcatcgcccgcagccggaagccaccagcgcccagcgggtgcatatgctggagctggcaattgccgataaacccctattcgttctcgacgaacgcgagctacagcgcgatacgccgtcctggactgcgcaaacgctacaggagtggcggcaagaacaaggcccggaacagcccctggcatttatcatcggccaggactcgctgctgaccttccccacctggcataactacgccacgatcctcgataacgcgcatctgatcgtctgtcgccgtccgggatatccgctggcgatgaagcgcgaagaagatcagcaatggctcgataaacatctcacccacgatgtcgagcagttacataaccgccccgccggagctatctatctggcggaaaccccatggttcgatatttccgctacgctgattcgccagcgtctgcagcagggcgtctcctgcgccgatatgctgccggccgccgtactggactatattcaccagcagaagctctattgctga

SEQ ID NO: 104363 - DNA, 609 bp, Enterobacter aerogenes
atgaaattatggctggttcgccacggcgaaacgcaggctaacgtcgacggactgtatagcggacatgctcccaccccccttaccgaacgcggtatccagcaggcacgctcgctgggtgactatctgcaagcggcgcctttcgaccgggtattgtgcagcgagctggcgagaacccagcacaccgccgacctgttgctcgctggccggcctgtcccccggcaaattattccttcattgaatgagatgttctttggcgattgggaaatgcgtcaccatcgcgatctgcaaaaagaagacccgcggaactacgctgcctggtgcaaagactggcaacacgccacgccgaccaatggcgaaagcttccaggcctttgcccagcgtatcgcggactttgccgccagcctcgggcaatatcaacagcgggctaacctgctgatcgtcggccatcagggcgctttaagcctgttaatcgcactcttattgcagatgccggcagcagcaatgtggcattttcccctcgcccacggtagctggagccttatcgaacgacgcgacgatttcacaaccttgcgcgtattaaatagccaggcgcagtggcgcgcggaataa

SEQ ID NO: 104364 - DNA, 318 bp, Enterobacter aerogenes
ttgcagggtaaagcactccaggattttgttatcgacaaaattgatgacctgaaaggtcaggacatcgtcgccattgatgtacatggcaaatccagcatcaccgattgcatgattatttgcaccggcacctccacgcgccacgtaatgtccatcgccgaccatgtggtgcaggaatcccgcgccgccggtatgctgccgctgggcgttgaaggtgaagccgccgccgactggatcgtagtcgatctgggcgacgtgatggttcacgtcatgcaggaagagagccgtcgtctgtacgagctggaaaaactctggagttaa

SEQ ID NO: 104365 - DNA, 468 bp, Enterobacter aerogenes
gtgaagctgcaattggtggccgttggcaccaaaatgccggactgggttcagaccggctttagcgaatatctgcgccgttttccaaaagatatgccgttcgaactggtagagatccctgccggtaagcgcggaaagaatgccgatatcaaacgtatcctcgaaaaagagggcgaaatgatgctggcagcggcaggcaagaaccgtatcgtgaccctggacatccccggcaaaccctgggatacgccacagctggcgcgagaactggaacgctggaagcaggatggccgggacgtcagtttactcattggcggcccggaaggtctctctccggcctgcaaagcggcagcggaacagagttggtcgctttccacgctcacgttgccccatccgctggtacgcgtgctggtggctgagagcctgtatcgtgcgtggagcataacgactaaccacccttaccaccgtgagtaa

SEQ ID NO: 104366 - DNA, 1902 bp, Enterobacter aerogenes
atgaaattacagaattctttccgcgactatacggctgaatcctcgctgtttgtacgccgcgcgctggtcgcttttacgggcattttgttgcttaccggcgtgctgattgccaacctctacaacgtacagattgtccgtttcaacgactaccaaacgcgttccaacgaaaaccgcattaagctggtccctattccgcccagccgcggcattatttacgatcgtaacggcacgccgctggcgctgaaccgcaccatctatcagttggagatgatgccggaaaaagtcgataacgtgcagcagacgctggatgcgctgcgcgacgtcgtcgacctgaccgacgacgacatcgccggctttaaaaaagagcgcgcgcgctctcaccgtttcacctcgattccggtgaaggtcaatcttaatgaagtccaggtggcgcgtttcgccgtaaaccagtaccgctttcccggcgttgaagtcaaaggctacaagcgccgctactatccgtataactccgccctgacccacgttatcggctacgtctctaaaattaacgataaagacgtcgatcgcctggataaagagggcaaactggctaactacgcgtcgacccacgacatcggtaagctgggaatcgagcgctattatgaagacgtgctacacggacaaaccggctacgaagaggttgaagtcaacaaccgcggccgcgttattcgtcagctaaaagaagtgccgccgcaggccgggcgcgatatctacctaacccttgatttgaagctgcagcagtatatcgaaacgctgctggcgggcagccgcgcggcggtggtggtcaccgacccgcgcagcggcgcgattctggcgctggtttcaaccccgagctacgatcccaacctgtttgtcgatggtatctccagtaaagattattccggactactcaacgatccaaataccccgctggtcaaccgcgcgacgcagggggtctatccacccgcctcgacggtaaaaccctacgtcgcggtctcagccttgagcgccggcgtcattacccgcaacaccagtctgttcgaccccggctggtggcagttgcctggctcggaaaaacgctatcgcgactggaaaaagtggggtcatggtcatctgaacgtcaccaaggcgctggaagagtccgcggatacctatttctatcaggttgcctatgatatgggcatcgatcgcctttccgaatggatgagtaagtttggctacggcgattacactggcgttgacctggcggaagaacgctccggcaacatgccaactcgcgaatggaagcttaagcgctttaagaaaccctggtatcagggggataccatcccggtcggtatcggccagggctactggaccgccacgccgattcagatgaacaaagcgctgatgatcctgataaacgacggcgtggttaaagtgcctcaccttctgcaaagcaccctcgaagacgggaaacaggtaccgtgggttcagccgcatgaaccgccggtcggcgatattcattccggctattgggaaatcgctaaagatgggatgtatggcgttgccaaccgcggcaatggtaccgcgcacaaatactttgccagcgcgccgtataagattgcggcgaagtccggtaccgcgcaggtattcggcctgaaagccaacgaaacctataacgcgcaccgaatttccgaacgtctgcgtgaccacaaacttatgacggcgtttgcgccttacaacaacccccaggtcgcggtggcgatgatcctggagaatggcggcgccggcccggcggtcggtaccattatgcgccagatcctcgatcacatcatgctgggtgataacaacaccaatctgccgagtgaaagcccggcggtgacggcgggggaggatcaataa

SEQ ID NO: 104367 - DNA, 1113 bp, Enterobacter aerogenes
atgaccgataatccgaacaaaaaatcactatgggataaaatccatctggaccccacgatgctgctcatcctgctggcgctgctcacctacagcgcgctggttatctggagcgccagtggccaggacgtgggcatgatggagcgtaaaatcggccaaatcgccatgggcgtggtgataatgatcgtgatggcgcagatcccgccgcgggtatatgagggctgggcgccctacctctatattttctgtattattttgctggttgccgtagacgccttcggcgcaatatccaaaggcgcacagcgctggttggatctcggtattgtacgctttcagccctcggagattgccaaaatagcggtaccgctgatggtggcgcggtttattaaccgcgatgtctgtccgccgtcattgaagaataccgccatcgcactggtcctgatcttcctgccgaccctgctggttgcggcgcagccagacctcggcacctcgattttgatcgccctctccggcctgtttgtcctgttcctctccggcctcagttggcgtttaatcggtatcgcggtagtgctggtcgccgcctttattccgattttatggttcttcctgatgcacgattaccagcgtcaacgcgtcatgatgctcctcgatccagagaccgatccgctgggcgcgggctatcatattattcagtcgaaaatcgctattggttccggcggcttacgcggtaaaggctggttgcatggtactcagtcgcagctcgaattcctgcctgagcgccatactgactttatcttcgccgtgctggcggaagagctgggtcttatcggggtgttgatcctgctggcattgtacattttgcttatcatgcgcggactgtggatcgccgcccaggcgcaaaccacctttggccgcgtcatggcaggcggtttaatgttgattttattcgtttatgtcttcgtaaatattggtatggtaagtggtattttgccggtggtgggggtacctttgccgctggtcagctacgggggctcagccctaatcgtattgatggccgggtttggtatcgtaatgtcgatccatacccacagaaaaatgttgtcgaaaagcgtttaa

SEQ ID NO: 104368 - DNA, 1137 bp, Enterobacter aerogenes
atgcgtaagcaatggctggggatctgcatagcagcggggctgctggcggcatgttcgggtgaagatgttcagcagaagacggttagcgtcccgcagccggctgtctgtaatggtccgacggtagaaattagcggcgccgacccgcgtttcgaaacgctgaacgccacggccaatcaggattatgaacgcgatggcaaaagctacaaaatcgtccaggatccggccaacttcacccagaccggtctggcggcaatttatgacgccgagccaaacagcaacctgaccgcctctggcgaagcgttcgatccaacacagcttaccgccgcgcatccgaccttgcccatcccaagctatgcgcgtatcacgaacctggctaatggccgaatgatcgtggtgcgcattaacgatcgcggcccgtacggcaatgaccgggtcatttccctgtcccgcgcctccgccgaccgcctgaatacctcgaacaatactaaagttcgtatcgatcctatcatcgtctctcaggacggcgccttgtccggcccaggtatggcatgcaccaccgtcgccaaacagacctatgccctgccttcacgtcccaaccttgatggcgatggttctgccgccatcgccccggccgatcagtcaaacgttcacgccatcagcaactcaacgcttaagcctgaagataatgtgggcgcgccggttaacggcagtggattccttggcgcaccgacaccgctgaataatggcgtgctggaaagcagcgaacctgctgctgcgcctgccgccgtcgccgcgacgccggcaacacccagcgctccggtcaccgcgccgggctcgattcagggaagcgttgcgcctgccgcgaccgcagcagcagccgcgactgttgccgcaccagccgccagcaccagtggcgagttcgtcgtgcaggtgggcgccgttagcgaccaggctcgcgcccagcaatatcagcagcgcctgagccagcagttcgccgttcccggacgtgtgatgcaaaacggcgccgtatggcggatccaactggggccatttgccagtaagtcgcaagcgtcgacggtacaacagcgcctgcaaaacgaagcgcagctgcaatcatttattactcgcgccaactaa

SEQ ID NO: 104369 - DNA, 1200 bp, Enterobacter aerogenes
atgaagacctctttcaccgctcgtttactcgttacggccctctccgttgcggcactgtctaccgctgcccgcgccgatgacctgaatatgaaaaccatgatcccaggcgctccgcagatcgatgccgaatcctgggttcttatcgattacaactcaggtaaagtactggcggaaaacaacgccgacgcccgtcgcgatccggcgagcctgaccaaaatgatgaccagctacgtcattggccaggccatgaaggcggggaaattcaaagaatccgatctggtcaccgtgggtaacgacgcgtgggcaaccggtaatccggtgtttaaaggttcttccctgatgttcctgaaaccgggcatgcaggtgccggtttctcagctgatccgcggcatcaacctgcaatccggtaacgatgcctgcgtggcgatggccgactacgtcgccggcagccaggacgcatttgtcagcctgatgaacaattacgttaacgcgttgggcctgaaaaacacccatttccagaccgttcacggcctggatgccgacggtcagtacagctccgcgcgtgacatggctctgatcggccaggcgctgatccgcgacgtaccgaatgagtactccatctaccgtgagaaagagttcacctttaacggtattcgccagctgaaccgtaacggcctgctgtgggataacagcctcaacgtcgacggtattaaaaccggccataccgataaagcaggttacaacctggtcgcttctgctaccgaaggccagatgcgcctgatctccgcggttatgggtggacgtacctataagggtcgtgaatccgagagcaagaaactgctgacctggggcttccgcttcttcgaaaccgtaaaccccattaaagcaggtaaagagttcgcctctgaaccggcctggttcggcgatagcgatcgcgcctctctgggcgtagataaggatgtctatctgactatcccacgcgggcgcatgaaagatctgaaagccagctatgtgttgaataacaccgagctgcacgcgccgctgcagaaaaaccaggtagtcggtaccatcaacttccagttagatggcaaaactatcgatcagcgtccgttagtggtgctgcaggaaattccggaaggtaatttcttcggcaaaatcattgattacattaagttaatgttccatcactggtttggttaa

SEQ ID NO: 104370 - DNA, 264 bp, Enterobacter aerogenes; identical to SEQ ID NO: 86921

SEQ ID NO: 104371 - DNA, 642 bp, Enterobacter aerogenes
ttgcagcacaataccattcttattcgacaactcggcctgcaaccttacgaacccatctcgcaggcaatgcatgaatttaccgacagtcgtgacgacacgacgctggatgaaatctggctggtagaacatcacccggtctttactcagggtcaggccggtaaagccgaacacgtgctggtgccaggcgatatcccggttattcagagcgatcgcggcggtcaggtgacctatcacgggccaggccaacaggtgatgtatgtattgctgaatcttaaacggcgtaaactcggcgtacgtgaattagtgacgctactggagcagaccgtggtcaatactctcgcagagtatcagattgaatcccacccacgcgccgatgcgccgggggtttacgttggtgaacagaaaatctgttcactggggctgcgtattcgcaagggctgctcgttccacggactggcgctgaatgtggcaatggatttgacgccattcctgcgtattaatccgtgcggctatgccggcatggagatgacgcaaatgcgccactggcagccgcaggccactacggaaaacgtcgcgccgcggctggtcgccaacctgctggcgctgctgaataacccgccgcatgaatatgtcgccgcttga

SEQ ID NO: 104372 - DNA, 951 bp, Enterobacter aerogenes
gtggccgacaatcatcctccattggaaagcaacgaacagccagaagatcggcagatctttcgtattctgcgtaatatcgatcttaacctgttaactatcttcgaagccgtgtacgtgcacaaaggcatcgtcaacgcggcgaaggtattaaatatcacaccttcggcgattagccagtccatcaataaactacgggctctattccccgacccgctctttattcgtaaaggtcagggagtcacgcccacggcttatgcgacccacctgcatcaatatatcagccaggggatggaagcctttctcaatgcgctggatttgggcagcggctcacatcagcagcgtgtgctcactattgccaccgcgccgaccgtcggcgctctggtgataccgaaaatcgccaatgcgttgaaatcgcgctttcctcaggtattactgcacaatatggcgattaccgatgccgccagccagcttaatcagcggcaggttgacttactgatcgacagctatccccatagcgggctggctattgcacaccaggtgctgttctccgaaccggttgtcatcttttgccgcgaaaatcaccccattttgcaccttcccctgacgaaggaaaatctgcagcagtatgagttcgcgctattgctaccggaagggcagcgctaccctaccctgcatcgccagctagaagagtacgtcggcgaacgccgctgcggctttagcagctataacctgttgacccaggcggcaatgatgaataatagcgatttgctggggctgacgccggagagtatgttcgcgctggtggcgaaaatctggcctttacaagcgatttcttttccacctctgcaggaccagcgtattgatatttcgctccattacaaccggcaaagcgcacaggagccgttactgaaagcgattatcgacaccattgtgcaaacttatgcctgctaa

SEQ ID NO: 104373 - DNA, 966 bp, Enterobacter aerogenes
atgagtaaacccattgtgatggaacgcggtgttaagtaccgcgacgccgataaaatggcccttatcccggtgaaaaacgtggcaactgagcgtgaagctctgctcagaaaaccggaatggatgaaaatcaaacttccggctgactcgtcccgtattcaggggatcaaggcagcgatgcgtaagaatggcctgcactccgtgtgcgaagaagcctcttgcccgaaccttgccgagtgcttcaaccacggtaccgcgacctttatgatcctcggcgctatctgtactcgccgttgtccgttctgcgacgttgcccacggtcgtccggtgacgcctgatgccaatgagccgcaaaaactggcgcaaaccatcgccgatatgggtctgcgctacgtggtggtgacttccgttgaccgcgacgatcttcgtgatggcggcgcgcaacacttcgctgactgtatcagcgctatccgcgagaagagcccaaatatcaagattgaaacgctggtgccggatttccgtggccgtatggatcgcgcgctggatatcctgaaagtgacgccgccggatgtgtttaaccacaacctggaaaacgtaccgcgtctgtatcgccaggtgcgtccgggcgcagattacaactggtcgctgaagctgctggagcgctttaaagaagcgcatccggaaatcccgaccaaatcgggtctgatggtcggtcttggcgaaaccaatgaagagatcatcgaagtgatgcgcgatctgcgccgtcatggcgtcaccatgctgacgctgggtcaatatctgcagccaagccgtcaccaccttccggtacagcgttatgttagcccggaagagtttgaagagatgaaagctgaagccatggcgatgggctttacccatgctgcctgcggcccgttcgtccgctcttcctatcatgccgatctgcaggcaaaaggtatggaagtaaaataa

SEQ ID NO: 104374 - DNA, 207 bp, Enterobacter aerogenes; identical to SEQ ID NO: 86925

SEQ ID NO: 104375 - DNA, 789 bp, Enterobacter aerogenes
atgcgggtagcagcagggcaatttgccgtcacggcgcagtggcaaactaatgcgcagatctgcgttgaactgatgcgtcaggcggcagaatgcggggtatcgttactggtcttacccgaggcgttgctggcgcgggccgataacgatcctgatatgtcggtaaaatcagcgcaggcgctggacggcggcttcatgcagcaactgctggccgaaagccggagtaatgacttaaccacaatattaacgctgcacgtgccctctggcgaagggcgcgcgagcaataccctggtcgcaatacgacaggggatgattagcgcacaataccagaaactccatttgtacgatgcgtttaatatgcaggagtcgcggctggtggatgccggcgaacaaattccgccgttaattgatgtaaatgggatgcgaatcggcttaatgacctgctacgatttacgctttcccgaattagcgctatcgttagcgttaaagggggccgatgtgttggtgcttcctaccgcgtgggttcgcgggccattgaaagaacatcactgggcaacgctgctggcggcaagagcgctggataccacctgctacattattgcggcaggcgaatgtggaacgcgtaatatcggtcagagccggattatcgatccgctcggtaccaccattgctggcgctgctgcccagccgcagctgatttttgctgagatatccgcagattatattcgtcaggtgcgtgagagtttgccggtgctgcgtaatcgcagatttgcgccaccgcaattattgtga

SEQ ID NO: 104376 - DNA, 384 bp, Enterobacter aerogenes
gtgttacaactccttttagccgtttttgttggcggcggaaccggcagcgtgttgcgctggtggctgggcatgaaatttaaccccatgcatcatgcgattcccattggcacgctaatcgctaacctgctgggcgcatttattatcggcgccgggctggcgtggttcaatcgtctaacgcatgtcgatccgatgtggaaactgcttatcactaccggtttctgcggcggcctgacgactttctccaccttttcagcagaagtggtcttcctgctccagcaggggcgtttcagttgggcattgttaaacgtgctggtcaatctactgggttctttcgccatgaccgcgacggcattctggctgttctcacagtcagccgcccgctaa

SEQ ID NO: 104377 - DNA, 210 bp, Enterobacter aerogenes; identical to SEQ ID NO: 86928

SEQ ID NO: 104378 - DNA, 675 bp, Enterobacter aerogenes
atggcgcaattcaggattttgccttattccgttaacagtctattaagattacatttgttactttacttcgtttttaaaattgcaatcggtaatagagaagtgtttaaactacgtcaatttacattatttatgcttgcgctgtccggcctgctgctgtcgcccggctatgctaacgcctcgttctcgtcaacgctccgcgatggctacaatacgctgacggacaatgtcgcgcaaacctggaacgagcctgagcactacgatctctacatcccggcgatcacctggcacgcgcgctttgcctatgacaaagagaaaaccgataagtataacgaacgcccatggggcgcgggatttggcatgtcacgttgggacgagaaaggtaactggcacggcctttatctgatggcgtttaaagattcctttaataagtgggagccgattggcggctatggctgggaaaaaacctggcgcccgctggccgacgacaacttccatcttggccttggttacacccttggcgtaacggcgcgcgacaactggaactatatcccgatcccggtggtgctgccgctggcatcgattggctacggcccggcgacgttccagatgacctacatccccggcacttataacaacggcaacgtttattttgcctgggcacgcattcagttttaa

SEQ ID NO: 104379 - DNA, 1374 bp, Enterobacter aerogenes
atgcttacgcttgttgagatccttatcggggtcgtggttattgtgggcgtcgcccgctacattataaaaggttattccgcgacaggggtgctgtttgtcggcggtttaatcttgcttatcgccagcgccattatgggacataaagttctcccggccagcgccgccactacgggttacaccgcaaccgacatctttgaatatattaaaatactgctcatgagccgcggcggcgacctcggcatgatgattatgatgctctgcggtttcgccacctatatgacccatatcggcgccaacgatatggtggttaaactggcctctaagccgctgcaatatattaactcgccttatctgttgatgattgccgcctacttcctcgcctgcctgatgtcgctggcggtctcctcggcaactggccttggggtgctgctgatggcgacgctgtttccggtaatggtcaatgtcggcatcagccgcggcgccgcggcggcgatttgcgcctcccctgccgcgttgatcctgtcaccaacctccggtgacgtagtgctggcggccaaagctgccgaaatgccgctgattgatttcgctttcaaaaccactttacctatctcgattgccgctatcgtctgtatggccatcgctcacttcttctggcagcgctacctcgataaaaaagagaacgcctcgcacgagatgctcgacgtcaatgagataaccaccaccgccccggcgctgtacgccattctgcctttcacaccgattatcggcgtgctgatttttgacggcaaatgggggccggagttacacatcatcacgattctggtgatctgtatggtgctggcttcagtactggaattcctgcgcagttttgacactaaaaaggtcttcaccgggctggaagccgcctatcgcggcatggcggacgccttcgccagcgtcgtcatgctgttggtcgcggcgggcgtatttgcccagggtctgagcactatcggttttatcgacggtcttatctctattgcgacctcgttcggatccgccagcatcatcctgatgttggtattagtcgtcctgaccatgctggcggcgatgaccaccggttccggcaacgcgccgttttacgccttcgttgagatgatcccgaagcttgcccactcttccggcatcaacccggcctatctgtcgatccctatgttgcaggcatcgaatctgggacgcaccatttcaccggtttccggcgtggtggtggcggtggcgggaatggcgaagatttctccgttcgaagttgttaaacgcacctcggttcccgttatcgtcggcctgttagtggtgatcatcgccaccgagattctggtccccggcgccgcgattcaataa

SEQ ID NO: 104380 - DNA, 798 bp, Enterobacter aerogenes
atgttcaggaaggatgtcgtcgccattgcccttttactcggcgcaacacaggttggcgcagaaccgcttaccgcgacgaaatacggtgatttcgatcgttacgtgctggcattgtcctggcaaaccggtttttgtcagagcatgctggatagaaatcgtaatgaaccagaggagtgccggctacagcaggaagaacgcaacaaagccgattttctgacggtacacggcctgtggccgggcctgccgaagtcgatcgcctcgcgcggcgtcgatgagcgccgctggatgcgctacggctgcgcgacgcgccctatccccaatatgccggaagtcagagccgggcgtaaatgccaggccgcggaaaccgggctatcgctggaaatggccaataagctgaatagcgtgatgccgggttccggcggtaactcctgcctggaacgctatgagtatgccaaacatggcgtctgtttcggcttcgatccggatagctacttcggcacgatggtgcgcctgaatggcgaagtgaagcaaagcgcaatcggcgattttctggcgaaacattacggacaaaccgttagccgtagcgattttgatgccgccgtcgccaaagcctatggcgcgcaaaacgtgaaagcctttaaattaacctgtgatggcaatcccgcttatttaacggaaatgcaaatctccatcaaagctagcgcgatcaatgctccgctgggcgcagattcgttcctgccgcagccgcatccgggcaactgcgctaagcagtttgtgctggacaaagtcggttcttga

SEQ ID NO: 104381 - DNA, 411 bp, Enterobacter aerogenes
atgaccagacccgcaatcattattaatgaattcgatgctgaacgtatcgacagactgcttgaacagccggcgtatgctaattcaccggtagccgatgccctgaacgacgaactggaccgcgcgcaaatgctggcgccggaagcaatgccgcacgacgtcgtcagcatgaacagcaaagtccgcttccgcgacttaaccagcggtgaagaacgggtgcggaccctggttttcccggcgcaggcgaccgatagcgccactcagctttcggttctggcgccggttggcgcggcgctgctcgggctgaaagtcgggacctccattcattgggagttacccggcggcgcatcggcgcatctggaagtgctggaattgctgtaccagccggaagccgcaggtgaattccaccgctaa

SEQ ID NO: 104382 - DNA, 429 bp, Enterobacter aerogenes
atgtataaaactatcattatgccggttgatgtctttgaaatggagctgagcgacaaggctgtccgccatgcagagtttctcgcccaacaggacggtattattcatttacttcacgtcttacccggttcatccagcttcaccatgagccgttttaccgccgatctgcgccgctttgaagagcatttacagcatgaagcggaaactcgcttacagaccatggtcggccactttagcattgacccttcacgtattaagagccatgtgcgtttcggcaacgtccgcgatatggttaatgagctggccaatgaaatcaaagctgacgtggtagtcatcggttcacgtaatccgtcgatcagcacccatttactgggttcaaacgcctcaagcgtgattcgtcatgcccatattccggtaatggtcgtgagataa

SEQ ID NO: 104383 - DNA, 1566 bp, Enterobacter aerogenes
atgctcgacaccaacatgaaaacccagctcaaggcctatcttgagaagctgaccaaacctgttgagctgattgccacgctggatgacagcgctaaatcggcagagatcaaggaactgttggctgaaatcgctgaactgtcagacaaagttacctttaaagaagacaacacgctggcggtacgtaagccatcgttcctgattactaacccaggttccaaccaggggccgcgttttgctggttctcccctgggacatgagttcacctcattagtgctggcgctactgtggaccggcggtcatccgtcgaaagaagcgcagtcgctgctggagcagatccgcaaccttgacggtgattttgaattcgagacttactactcgctctcttgccacaactgcccggacgtggtgcaggcgctgaacctgatggcggtgctgaatccgcgcatcaaacacacggcgattgatggtggaaccttccagaatgaaatcaccgatcgcaacgtgatgggcgtaccggcggtgtttgtgaatggtcaggagtttggtcaaggtcgtatgacgctgactgaaatcgtcgccaaagtggataccggcgcggaaaaacgcgcggcggaagagctgaacaaacgcgatgcttatgatgttctaatcgtcggttccggcccgtctggcgcagcggcggcggtatactccgcgcgtaaaggcattcgtaccggcctgatgggcgaacgtttcggcggccaggtgctggatactgtagatatcgaaaactatatttccgtaccgaaaaccgaaggccaaaaactggccggcgccctgaaagcgcacgtcagtgaatatgatgttgatgtgattgattcacaaagcgcggcaaaactgatcccggcagccgtcgaaggtggcctgcatcagatcgaaaccgcctccggcgcggtgctgaaagcgcgcagcgttatcatcgcaaccggcgccaaatggcgtaacatgaacgtgcctggtgaagaccaataccgcactaagggcgtaacctactgcccgcactgcgacggcccgttgtttaaagggaaacgtgtggcggtgattggcggcggtaactctggcgttgaagcggcaattgatttggcgggcgtcgttgaacacgtgacgttgctggagttcgcgccagaaatgaaagccgaccaggtgctgcaggataaagtacgcagcctgaaaaatgtcgatattattctcaacgcccagaccaccgaagtggttggcgacggtagtaaggtgacggggctgcagtaccgcgaccgcgtcagcggcgatgagcatcatgtcgcgttagccggtatttttgtccagatcggcctgttgccgaataccaactggctggaaggtacggttgagcgtaaccgcatgggtgaaatcatcattgatgccaaatgtgaaaccaacgtgaagggcgtatttgccgccggcgactgcactaccgtgccgtacaaacaaattattatcgccactggcgaaggtgcgaaggcttctctgagctcattcgattatctgattcgtaccaaaagcgcataa

SEQ ID NO: 104384 - DNA, 564 bp, Enterobacter aerogenes
atgtctttaattaataccaaaatcaaacctttcaaaaaccaggcattcaaaaacggtgaattcatcgaagttaccgaaaaagacactgaaggccgctggagcgtcttcttcttctacccggccgacttcactttcgtttgcccgaccgaactgggtgacgtggctgaccattacgaagagctgcagaaactgggcgtagacgtttactctgtttctaccgacacccactttacccacaaagcgtggcacagcagctctgacaccatcgctaaaatcaaatacgcgatgatcggcgacccgactggcgccctgacccgtaacttcgacaatatgcgtgaagatgaaggtctggctgaccgcgcgaccttcgtcgttgacccgcagggtatcatccaggcaatcgaagttaccgctgaaggtatcggccgtgatgcgtctgacctgctgcgtaaaatcaaagccgctcagtacgttgcttcccacccaggcgaagtgtgcccggctaagtggaaagaaggcgaagcgacactggctccttctttagatctggttggtaagatctaa

SEQ ID NO: 104385 - DNA, 753 bp, Enterobacter aerogenes
atgttaaaacgactgctttttctgagcctgctgccgttgtgtagctatgccgaagacctccccgcccccgtaaaagcaatagaaaaacagggtattactatcattaagccctttgaagcccccggcggcgtcaaaggctggctcggaaagtatcaggatatgggcgttgctatttatctcacccccgacggtaagcacgccatttccggctacatgtacgacgaaaaaggcaacaatctgagcgaacagcttttccagaaagaactctataccccggccggacaggcgatgtggaaaaaactcgagtccgctgactggctacgggaaggtaaaaaagaggcgcccatcgtcctttatgtgtttgccgaccctttctgcccctactgtaaacagttctggcaacaggcgaggccgtgggttgaatccggtaaagtgcaactgcgcacactattggtcggcgtgattaaaccagaaagtccggccaccgcagcggccatactggcaagcaaagacccggcgcaaacctggcatgattacgaacagtccaacggcaaactgaagctgaacgtaccgacagatatccctgcggccttgatgaggaccctgaatatcaaccagcagctgatggatgaccttggcgccaacgccacgccggctatttactatatgaataaagataacgtgctgcagcaggtagtgggactacccgataaagagaaactgcaggtgatgatgggtgaaaagcagcagtaa

SEQ ID NO: 104386 - DNA, 903 bp, Enterobacter aerogenes
atggccaacctttatgatttaaaaaaattcgatctaaacctgttggttatcttcgagtgcatttatcaacatcttagtatcagtaaagcggcggaaacgctgtttattactccttccgcggtaagccagtcactgcagcggttacgtaatcaattaaacgatccgctatttgtgcgttccggtaaaggaattaccccgacgatcgtgggcatgaacttacatcatcacctggaaaaaaacctcaaccaattagaaaaaacaattaatatcgccaatcattctgaattaagtaaacgatttgtaatttacagcccgcaacttcttatatcaccagcaaccatggatttaattaataaattgcacatggacccgaatctacaaatcgatcatcgcgatctgctgctatccccagaaagcgttgaagacctgatggcttaccgtaaagccgacctgatttatagtattacgcctctttctaatcacagtactatttgccagccttttcaggaattagaaattgcactggtttgtcgcgaaggccaccctcgtgcagatcatctgaattcatttgaagaggtgtctcgggaaggatttacgctttacacctcatctgacccgaatgtaaaggcctttcaacagcacgggagcgatctcatgcctgaaagaagaattgcgtttcgcagcaactcgctaatagctattttaacgatgatcaatcagagcgatcttattggttttgtcccgaagcacgcattaagttattttagcgcttcatttaaattccgcgaaatcattttgcctgacccgatccctccggtaatggcctatatgatttataatcgttcatcattaaacaaccccaaattttccgaatttattacgcaaaataccgcagtcaactaa

SEQ ID NO: 104387 - DNA, 1224 bp, Enterobacter aerogenes
atgtctttggtaaaaattccattacccgagtccgttcttcaggctagccagcagcggatacagtgggtattagaaaatttttcacgcatctgcatctctttctccggcggaaaagactccaccaccatgctgcacctggcggcgctttgcgcccggcaaatgggaaaaaaattcaacgtgttgtttattgattgggaggcgcaattttcctgcaccattcagcattgcgaaaatatccgtaccgaataccaggatgttattgagaaattttattgggtcgccctaccgctcaccacgcaaaattcactgactcagttttcgccggagtggcaatgctgggagccgggcgtcaactgggtacgccagccgcccgctgacgccattaccgatcccggctatttcccgttttatagcagcggaatgagcttcgaagagttcgtccgtgatttcgccgactggttttcacaaaaccgtccggcggcgatgatggtgggtatccgggcagatgaatcgcttaatcggtttatgaccatctcctcgcagcgcaaactgcgctttgccgatgataagccatggacgacatcggcaccgggcggccatacctggtacatctacccgatttatgactggaaaaccgccgatatctggacgtggtttagcaaaagcggtcatacctataaccccctttacgatctgatgtatcaggccggggtgccgctgcgctatatgcgcatctgcgaaccctttggcccggagcagcgccagggtctctggctgtatcacgtgctggagccagaacgttgggcagccatttgccagcgcgtaaacggcgtgcacagcggtggtatttacgcagggtacgacaacaaattttatggccaccgcaaactcgataaacccgggcaccacagctggaagagttacgccctgttcctgctggatagcatgccgcggccaaccgccgagcattatcgtaataaaatcgcggtctatctgcattggtatcaaaaacagggaatggaggatatccccgatagccaggagagcgacatcggcacccgggatatcccttcatggcggcgcgtctgcaaagtgttattaaacaatgattactggtgtcgccagctctcatttagcccaactaaagccacccgctataaaagctactgcaagcgcataagtaaaaaacgccaacaatggggactgctatgcaacaacgactaa

SEQ ID NO: 104388 - DNA, 627 bp, Enterobacter aerogenes
atgcaacaacgactaattacccaaatagaagagtatctggcagcgctgccggaagaggaaaaaatcgacgcgctgaatcactttcgccaggctctgcaccgccatagcccctttcacaaccagccggttgactgcgtgctatgggttaaagaggaagaggtggttcccaacgattacaaccctaataaccttgcgccgccggaaaagcggctgttattaacttcgctggaggccaatggtttcacgcaaccgatcgtggtgcagaatcaacagtcaaaacgctataccatcgttgacggttttcaccgccacgaactggcgggcagcaagctgtcgctgaaaaaacagctcaagggatatttgccggtaacctgtctgtcggcgaacagccccccgcgcgatgccctgatagccgcgactatccgccacaaccgggcgcgcgggcgccatcagatccacgcgatgtcggaaattgtccgcgagctggccaatctcggctggagcaatagcaaaatcagcaaagagctggggatggatgccgatgaagtgctgcgcctgaagcaaattaacggtctggccgagatgttcgccgaccgtcaattttctcaggcatggacggtgaaatag

SEQ ID NO: 104389 - DNA, 1161 bp, Enterobacter aerogenes
atgagctataagccactgattcctgagagtaaactccctgcattaggcaccaccatatttacccagatgagcgcgctggcgctgcagcatcaggccatcaatctatcacaaggttttccggattttgatggcccgcgttacctacaggaacggttggcctggcacgtcgcccagggggctaaccagtacgctccgatgaccggcgtaccggcgctgcgcgaagccattgccgataaaaccgctgagctgtatggctatcgcccggatgcgaatagcgatgttaccgtcaccgcgggggcgaccgaagcgctgtatgcggcgatcaccgcgctggtcagagccggcgatgaggtgatctgctttgacccgagctatgacagctacgcgccggcggtagaactttccggcggggtgctgaaacgtattgctctgcagccgccgcatttccgcgttgactggcagcagtttgccgccacgttaagcgaccgcacccgtttggtgattcttaatacgccgcataatccatcagccaccgtctggcagcgggaagattttgccgcgttgtggcaggcgatcgctgaacgggaaatctacgttatcagcgacgaagtgtatgaacatatctgttttgcagagcaggggcatgccagcgtgctggcccatccgcagctgcgcgagcgggcggtcgcggtctcttctttcggtaaaacttttcacatgaccggctggaaagtgggttactgcgtggcgcctgccgccatcagcgccgaactgcgtaaggtgcaccagtatttgacgtttgccgtcaatacgcccgctcagttggcgctggcggatatgctgcgtgcgcagccggagcactaccgcgagctgtctgcgttttatcggcagcgtcgggatctgtttatcgatgcgctacgcgatagccggctggagattttgccttgtgaagggacctacttcttgctggccgactatagcgcgatctctgaccttgatgacgtcagcttttgtcgctggctgaccactgaagtcggcgtggcggcgatcccgctgtcggtattctgtgccgatccgttcccgcataagctgattcgcctgtgcttcgccaagcagccggagaccctgctggcggcagcagagcggctgcgtcgcctgtag

SEQ ID NO: 104390 - DNA, 690 bp, Enterobacter aerogenes
atgatccgcgctatcgtgaccgatattgaaggcaccaccagcgacattcgctttgtccataacatcttattcccctacgcccgcgagcggctggccgcttttgtcagcgcgcagcagtatgtcgagccggtcagtaccattctcgacaatctgcgtacagaaatcgccgctcccgaagccagcgccgcagcgcttatcgacacgctattccgcttcatggacgaagatcgtaaatccacggcgctgaaagcgctgcagggcattatctggcgcgagggctatctgaacggcgactttaccggccatctttatcccgatgtactcccggcgctggagaagtggaaggcgatgggcattgatttatatgtatattcctcaggctcggtcgccgcgcagaaattgttatttggctacagcgacgaaggtgatattactcatctcttcagcggctatttcgataccctggtcggcgccaaacgcgaagttcaatcctatcgcactatcgccgaacaactggggcatagcccggcgagcattctgttcctctctgatatccatcaggaactggacgccgccgaagcggcaggtttacgcaccctgcagctggtacgcggcgaccgcgacccggccagccatcatccacaggttcagcgttttgacgacatcgacccggagcaacttcccgcatga

SEQ ID NO: 104391 - DNA, 543 bp, Enterobacter aerogenes
atgagcgaattaactattttttccgttaacgacgccagccatccacgctggcacagcagcaacgccgatgagatccagcagcaattgcgcgcaaaaggggtgcgtttcgagcgctggcaggccgaccgctacctgggcccggcgccaaccgctgaaaccgttattgcggcctatcagcacgcgattgataaactggtggctgaaaagggctaccagagctgggatgtcattagcctgcgggcggataatccgcagaaagaggcgctgcgggctaaattcctcaatgagcatacccatggcgaagatgaagtgcgcttctttgtcgaaggcgccgggctgttttgcctgcatatcggcgatgaagtctttcaggtgctgtgcgaaaagaacgatctgatctccgtcccggcgcatacgccgcactggttcgatatgggttcggagccgaatttcaccgccattcgtatttttgacaatccggaaggctggatagcgcagttcaccggcgatgctatcgccgatgcctatccgcgcttaccctaa

SEQ ID NO: 104392 - DNA, 606 bp, Enterobacter aerogenes
atgtggcaagagcgactcgcacaactggtgaccacctgtcactggattggcgcaaaagggtgggcgccggcaaccggcggcaatatgtcagtacgcgaggatgcgcgctggtgttggttgagcgaatcggggcgcgataagggcagcctgaccagcgacgattttttacaggtagacatcgccagcaatcgcgcgccgtcgggccgtaaaccgtcggcggagaccggcttgcatacgctggtttatcgcctgtttcctgaagcgaacgtcgtgctgcacgtgcataccgtgcacgctacggtgctctcacgtcttgaaaccagcgataccctgcagctgcagggctatgaaatgcaaaaaacgctgagcgggcagcatagccatctcgatagcgtaccggtggcgatttttgataacgatcaggatattgaggcgctggcggcgcgggttgaagcgtatgcccgtagccatcctttgcgttatggatttttgatccgcggccacggcttaacctgctggggcagggatgttagcgaggcgcggcgtcagctggaagggctcgaatttctcttcgaatgcgagctgctgcgccgccgctatgcataa

SEQ ID NO: 104393 - DNA, 1026 bp, Enterobacter aerogenes
atgcagacactacagaccaccagcctgcgggtaagcgaaaatcagctttttattctcgatcaacaggcattgccgcaggaaaaacgctggctggcggcggataacgttgcgctgctggtggaccatattcatgctttgcgggtgcgcggcgcgccgttgattggtctctccgccagtctgctgctggcgctgttggcgcagcgcggcttatcccgcgacgagctcactcaggcgctggaaaccctgcgcgcggcgcggccgacggcggtcaatttaatgaataatctcgatcgtatgaagcaggcgctggcgcaggaagactatccgcaggcgctggagagcgaagcgctgcgcctgattgcggaagataaacagctgtgcgccagcattgccgaagctggcaatgcgctggtaacgccgggtagccgtttgttgacccactgtaataccggtggcctggcgacggcgggggtcggcaccgcgctgggggttatcgctttggcctatgaacagggcaaggtggctaacgtctgggtcgatgagacgcggccgctgctgcagggcgggcgcctgaccgcctgggaattgggggagctgggcgtgccgtatcagcttattaccgactcaatggccgccagcctaatggcgcaggggcaggttgatgcggtatgggtcggcgcggatcgtatcgccgccaacggcgacgtggcgaataaaattgggacctattcgctggcggtgctggctcactatcatcgtattcctttctacgtggcggcgccgcaaaccactctcgatcgctactgcccgaacggcgcggcgatcccgattgaacagcgtgcggcgcaagaggtgaccggcgtaaaaggcagctttggtgccgtgcagtgggcgccagaaaacgcgccggtttataacccggcctttgacgtgacgccagctgcgttaatcagcggttgggtgctggatagcggcgtggtcacgccacagcaggtggcggacggtatttttgcgccgctggcgtaa

SEQ ID NO: 104394 - DNA, 1200 bp, Enterobacter aerogenes
atgtcgcaataccataccttcacggccagcgatgcggtggcttacgcacaacaatttggcgggctcgacgatccgtctgagctggtgtcggcgcaggaggtaggcgacggcaatctcaatctggtgttcaaaattttcgatgctcagggcgtgagccggattattgttaagcaggcgctgccctacgtgcgctgcgtcggcgaatcctggccgctgaccctcgaccgcgcgcgcctcgaagcacagaccctggtcgcccactatcagcacagcccgcagcatacggtacacattattcatttcgatcccgctctggcggtgatggtgatggaggacctttccgatcaccgtatctggcgcggcgagcttatcggcaacgtctactatccgcaggcagcaggccagttgggcgaatatctggcgcagacgctgttccacaccagcgatttctatctccatccgcatgagaaaaaagcgcaggtggcgcaatttatcaatccggaaatgtgcgagatcaccgaggatctgttttttaacgatccgtatcagatccacgagcgcaataactacccggcggagctggaagaagaggttgccgccctgcgtgaggacgctcagcttaaactggcggtcgcggcgctgaagcaccgctttttctcacaggccgaagccctgctgcacggcgatattcatagcggctccatcttcgtcgctgaaaatagccttaaagccatcgatgccgaatttggctatttcggccctatcggttttgacgtcggcaccgccattggcaatttgttgcttaactattgcggtctacctggccatctcggcattcgcgatgccgcagccgcgcgcgagcagcggctcaacgatatacagaccttgtggcacaccttcagcgagcgtttccaggcgttagcggcggagaaaacccgcgatgcggcgctggcctgccccggttacgcctcagtattcctcaaaaaagtatggcgcgatgccattggattctgcggaactgaactgatacgccgcagcgtcgggctttcacacgtcgccgatatcgatgcgattcaggacacggccatgcgccacgaatgcctgcgccatgcaattacgctcggcaaagcgctgatcgtcatcgccgagcgtatcgatagcgtggacgaacttatcgcccgcgtacgtcagtacagctaa

SEQ ID NO: 104395 - DNA, 1065 bp, Enterobacter aerogenes
atgaaaaagatagcactttctcttatggcgctgggcctgctgcagtcgatggcagcgctggcgcagaccccaacgccggttccggcggcgatagctgagcataacggcccgatccgcatcgcggtgattcgcaatctcggttctgacgataacactacccagtttgtcgccggggcgattcaggaaggtaaaaagctcggttttaaagtcagcgctttcctgagcaacggtgatgacgcgaagttccaggatttcgtcaatcaggccattagccagaaatacgacggtattattctttcccaggggcgcgatccctactcgaccgcgctggtgaaaaaagcggtcgatgccgggatcaaagtggcggtgttcgataccgcggtgcagggagccgtccccggcgtgacggttagccagcaggatgacgcctcgttgaccgagctctcttttggccaactggtaaaagacttcaacggcaaggccaatattatcaagctatgggtggcaggcttcccgccaatggagcgccgccaggcagcctaccagacgctgcttaaacaaaatccggggattaaagagctggagtctatcggcgccgtttcatccgacgtgcagggtgacaccgctaacaaggtcggcgcaattttggctaagtatcctaaaggtaaaattgacgccatctgggggacgtgggatgcctttagccagggagcctataaggcgctgaaagaaaacgggcgcagcgaaatcaaactctacagcatcgatatttccaatcaggatttacagctgatgcgggaggccggtagcccgtggaaggttagcgtggcggtcgatccgaaactcattggcgccaccaacgtacgcttgattgccaataagattgccggggaaagcaccccggctacctacgatttcaaagcggcggcgattccgcaggcgctgctggcggcacagccgggggcggtcaacgtggcgtcgctggggaaaatcatccctggctgggggcagaccgaagactttattgccccgtggtttgccaccctggaagcccaacataaataa

SEQ ID NO: 104396 - DNA, 999 bp, Enterobacter aerogenes
gtgagcaaggccctggcagtcaacgcgacggtatcgggccgtcagcggtttttcgattttctctataaatggggtatgttgctgaccgtggtgctgctggttggcgtctttggtttagcctcagataactttcttgatccctttaacatcatcaacattctgcgctccatcgctatcgtgacggtgattgccatcggggtgtcgatttcgctcaccatcggcggctttgatctgtcggtggggtcgacggcgtcgctggcgaatgcgttagtgatttcgttgtttgtctggcacggcctgaacaccactgaagccattctgattaccctcgcgctctgtacgctggtggggttattcaacgcgtttctgatcgtggtgctgcgcattcctgacatgctcgccacgcttgccagcctgtttgtgattcagggcgtggcgatgacctacagctacggcggttcgatcaccgaaaatatggtgttgccgagcggcgatatggctgaaggcacgattccggcggcgtttggcgcgctggggcaggtgccgaccatcgtcattatcatgctggtggtaacgctgatcgcacagctggcgctgtcgttcaccacccacgggcggcggatgtacgccatcggcggtaatccggaggcggcgcggctctccggcctgcggatcacgcgctataaagtggcggcctacgtgattgcctcgctgctggccgggctgggcggcattctgctggcatcaaggattggttcttcccaggtgaacgccggcggcggttacctgatggacgcggtcgcggcggcgtggatcggcttttcgctggcgggctccggcaagccgaatgcgctggggacgctggtgggagcggtgatcctcggcgtgctttccaatggcctggtgatgctgtcagtgccctattacgcgatggacattattaaaggactggtgctggctggcgcgctggcactgacctattttcagcgccgtacctaa

SEQ ID NO: 104397 - DNA, 1503 bp, Enterobacter aerogenes
atgagcgtgaatcgccttgagatgcataacattagcctggccttttccggctttcaggcgctgagcaaggtggcgtttacccttaagggcggaacggtgcatgcgctgaccggcgccaacggcgcaggcaaatcgacgctgatggcggtgttgtgcgggacgcatgccgattacgaaggtgaagtggtgatcaataaccagccggttagcattcgttcgccgcgcgatgcaaagcaactggggattcatctggtacagcaggaggtggatgttgcgctggttccggggctgagcattgcggaaaacatcatgctggacaggctggctgaaccgggtgcggtttttcgctggtcgcgggtgcgccagcaggcgcgcgaagcgctggcgcagcttgatattgcgctggacgttcgacgttcaatcgatagctgtacccttgctgaaaagcagcaaattctgctggctcgcgcgctgtcgcaccactgccgttttttgattcttgatgaacccaccgcgccgttggatcagcacgaaagcgaacgcttatttgcggtggttcgtcgtctgcagcagcaggggatcggcgtggtctttatttcgcatcgtatccatgagctgaaagcgatttgcgacaccctgacggtgctgcgcgatggccgtttaatcgaaagcgggccgatggccgagctcagcggcgagcagatcgtcgaaaaaatgcttggccacgagttgagcgatattttcccgcctgcgcgtccgccgcatggcgaagaggtgctgttgcaggttgagggtttgcatgatgaagcgctgttgcaggatatctcgctacgcctgcataagggggaaattctcggtatcgccggcttggcgggcgcggggaaaactgaactctgcaaagccttattcggcgccagcaaaagccgactgcgctacggcgaacttaacggccagccgtggcggccgcgcgatccggccgattccgtcctccaggggctggcgctggtgccggaagagcggcgcaaagaggggatattcattgatgaggcgatcgccatgaatctggcggtcagcgccgataacagcttttcgcgctggagcctgttcggccatcggcaggcgtggcggtgggcgcaggaggtaattgcccgtatcggcgtgcgtgccaccggaccggggcagtcactgcgccgtctctccggcggtaatcagcaaaaagtggccatcggcaaatggctgcgcggcagcgcaaacgtgctgattttcgacgagccgacgaaaggggtggacgtgaaagcgaaaaccgatctgtttcagttgattgatggcctggcgcgggagggccggggcgtgatttacgcctccggcgaattttccgagctggtgggcctgtgcgatcgcatctgcgtgttgtgggatgggcgcattgtggcggaaatacccggcgccgaggcgcgggaagagacgattctttattactccaccggaggagcggcagcgtga

SEQ ID NO: 104398 - DNA, 744 bp, Enterobacter aerogenes
atgcagatcgatttaacaggtaagaaggcgctggttaccggcgccagccgtgggttgggtcgcgctattgcgctgtcgctggcgcgcgccggcgccgatgtggttattacgtatgaaaaatcggccgataaagcccaggcagtcgccgatgaaattaaggcgctgggtcggtacagcgaagcggtgcaggcagacagcgccagcgcgcaggccattcaggatgccgtaacccatgcagcccgggccctcggcgggctggacattctggtcaacaacgctggcatcgcccgcggcggtccactggaatccatgacgctggcggacattgacgaccttatcaacgtcaatattcgtggggtggtcatcgctatccaggaagcgctggtgcatatgtccgatggcggacggatcatcaacatcggcagctgtctggccaaccgcgtagccatgccgggcatcgcggtttacgccatgaccaagtccgccctcaactccctgacccgtggcctggcgcgtgatttaggacctcgcgggatcaccgttaaccttgtccatccagggccgaccaacagcgatatgaacccggaggatggggaacaggcggaagcccagcgccagatgattgcggtcggtcactacggccagccgcaagacatcgccgcggcggtcaccttcctggccagcccggccgccgggcagatctccggtacggggctcgacgtggatggcggcctgaacgcctga

SEQ ID NO: 104399 - DNA, 303 bp, Enterobacter aerogenes; identical to SEQ ID NO: 86950

SEQ ID NO: 104400 - DNA, 405 bp, Enterobacter aerogenes
atgactattcagtacatcaaggatgaagaaggaaaagaccagtatgtcgtcattccttacagtgattactttcgtatgcgcctggctctgctggagtacgacgacgaggatgaaaacaattgggaagatatttcttatgaatcagatatctatgataacgtaatgctgccaggggatgtctgcgacgtgatgcatagagaaaacgtcagcctgcaggccgcgtggcgtatcctgcgcggactctcacagcgggaggtcgcggctaaactcggcatcagccagtccgcggtgtcacagctggaagcgctggactcccgtccgcagaagcggacccgcgaaaaactggcggcgatttacggctgtacccaggagcaaatcagcctctacttaccgaaagaaggctag

SEQ ID NO: 104401 - DNA, 198 bp, Enterobacter aerogenes; identical to SEQ ID NO: 86952

SEQ ID NO: 104402 - DNA, 2106 bp, Enterobacter aerogenes
atgaataattcagggaaataccttatctggacactgctctccgtgatcggagcctttgccctcggctatatcgccttaaaccggggtgagcagataaatgcgctgtggattgtcgtcgcggcggtctgcgtttatctgatcgcgtatcgtttctacggcctgtatatcgccaaaaccgtcctcggcgttgacccaacgcggatgacgccggcggtacgacataacgacggcctcgattatgttccgactgacaaaaaagtgctgttcggtcaccattttgcggcgattgccggcgcagggccgctggttggcccggtgcttgccgcgcagatgggctacctgccggggatgatctggatcctcgccggcgtggtgctggccggcgccgtgcaggactttatggtgctgtttgtttcgacccgtcgcgatggccgttcgcttggcgaactggttaaagaggagatggggccaaccgctggcgtactggcgctggtggcctgttttatgatcatggtgatcatcctcgcggtactggcgatgatcgtggtgaaagcattgacccacagtccgtgggggacatacaccgtcgcctttaccatcccgctggcgatctttatgggcatctatattcgctatctgcgcccggggcgcatcggtgaggtgtcggtgataggcctggtgatgctggtgttcgcgatcatttccggcggctgggtggcggaaagcccgacctgggcgccgtggtttgattacaccggcgtacagctgacctggattctggtgggttacggctttgtggctgcggtactgccagtctggctgctgctggcgccgcgcgactatctctccacgttcctgaaaatcggcaccatcgttggtctggcgattggcatcctgattatgcgcccgacgctgaccatgccggcgctgacgaagtttgttgacggcaccggcccggtatggaccggcaacctgttcccgttcctgtttatcaccatcgcctgcggcgcggtttccggcttccatgcgctgatctcctccggcaccacgccgaaaatgttggccaacgaagggcaggcctgctttatcggctacggcggcatgttgatggaatccttcgtcgccattatggcgctggtggcggcttgtattatcgatccgggcgtctacttcgcgatgaacagcccgatggcggtgctggcgccggcgggaaccaccgatgttgtggcctcggcggcgcaggtggtgagcggctggggctttagcataaccccggatacgctgcgccagattgccagcgaggtcggcgagcagtcgattatttcacgcgccggcggcgcgccgacgctggcggtggggatggcttacattctgcacggctcgctgggcgggctgatggatgtctctttctggtaccacttcgccattctgtttgaggcgctgtttatcctgacggcggttgatgccggcacccgcgcggcgcgattcatgctgcaggatctgctgggcgtggtgagtccggggttgaaaaaaaccagctcgctgccggctaacctgctggcgaccgcgctgtgcgtcctggcgtggggctacttcctgcatcagggggtggtcgatccgttgggcggcatcaataccctgtggccgctgttcggtatcgccaaccagatgctggcggggatggcgctgatgctgtgcgcggtggtactgttcaagatgaaacgccagcgctatgcgtgggtggcgctgctgccgacaagctggctgctgatttgtacgttgaccgccggctggcagaagtcgtttagcccggataccaaagtcggcttcctggccatcgccaataaattccaggcgatgatcgacagcggcgccattccgccgcagtatacggaatcgcagttggcgcaactggtgtttaataaccgtctcgatgccgggctgactatcttctttatgattgtggtggtggttctggcgctgttctcgattaaaaccgcgctggcggcgctgaaagaggataaaccgacggcgaaagagacgccgtatgaagcgatgcccgcggatgcgcagggcttaacggcgcaggcaaaacgcgcgcattaa

SEQ ID NO: 104403 - DNA, 414 bp, Enterobacter aerogenes
atggcctggaaacgagagctcacgcttgcggcgctgaacgccagtagcgaaaacaccatggtggcgcatctggatattgtctacacccggctggaggaggcgctgctggaggcggagatgccggtggatgcgcgcacgcatcagccgtttggtctgctgcacggcggcgcttccgcggcgctggcggagacgctgggctcgatggccggttggctgatgaccgaagaagggcaatgtgtggtgggcaccgagcttaacgctacccaccatcgtccggtctccagcggtaaagtgcgcggcgaatgccgaccgctgcatcttggccgccagagtcagagctgggaaattgtggtgtatgacgaaaaagggcggcgctgctgcacctgtcgtctgggaaccgcggtgcttggctaa

SEQ ID NO: 104404 - DNA, 756 bp, Enterobacter aerogenes
atggcggcgctggattttcacggccagaccgtgtgggtgactggcgcaggtaaaggcattggctatgccaccgcgttggctttcgtcgaggccggggccaacgtcaccggtttcgaccttgcctttgacggcgaaggttatccgtttgccaccgaaatgctcgacgtcgccgatgccgaccaggtacgcgacgtttgcgcgcgtctgctcaacgatatcgaacgactggacgtgctggtgaatgccgccgggatcctgcgcatgggggcgaccgatcaattgagcgcggaggactggcagcagacattcgcggtgaacgtcggcggcgcgtttaatctgtttcagcagacgatggcgcagttccgccgtcagcggggcggggcgatcgtcaccgtcgcctccgatgccgcgcatacgccgcgtatcggcatgagcgcctatggcgcctcgaaagcggcgctgaaaagcctggcgttgaccgtcgggcttgagctggcaggcagcggcgtgcgctgcaacctggtatcgccgggctccaccgacaccgatatgcaacgtaccctgtgggttaatgaagatgctgaacagcagcggatccgcggatttggcgagcagtttaagcttggcatcccgctgggcaaaatcgcccgaccgcaggagatcgccaataccattttgttcctcgcctcttctcacgccagccatattacgctgcaggatattgtggtcgatggcggctcgacgctgggggcgtag

SEQ ID NO: 104405 - DNA, 852 bp, Enterobacter aerogenes
atggcaatccccaaattacaggcttacgcgctgccggaagccagcgatattccggccaacaaagttaactgggcctttgagccgtcgcgcgccgcgctgctgatccacgatatgcaggagtatttcctcaacttctggggcgaaaacagcgcgatgatggaaaaagtggtggccaatatcgccgccctgcgcgacttctgcaaacaaaacggcattccggtgtactacaccgcccagccgaaagagcagagcgatgaagaccgcgccctgctgaatgatatgtgggggccggggttgactcgctcgccggaacagcaacaggtaattgccgcgctggcgccggatgaacaggatacggtgctggtgaaatggcgctacagcgcgtttcatcgctcaccgcttgaagagatgctgaaagagaccggccgcgaccagctgatcatcaccggcgtttacgcccatatcggctgcatgaccaccgccaccgacgcttttatgcgcgatatcaaaccgttctttgtcgccgacgcgctggcagatttcagccgcgaagagcatttgatggcgctgaaatacgtcgccggccgttctggacgcgtggtgatgaccgaagaattgttgccgctgccggcctccaaagcggcgctgcgcgcactaattctgccgctgctcgacgaatccgacgaaccgctggatgatgaaaacctgatcgactacggtctggattcggtgcgtatgatggcgctggccgcccgctggcgcaaagtacacggcgatatcgacttcgtgatgctggcgaaaaacccgaccatcgacgcctggtgggcgctgctctcccgcgaggtgaaataa

SEQ ID NO: 104406 - DNA, 1608 bp, Enterobacter aerogenes
atgattgcatttacccgttggccggaagagtttgcggcccgctatcgtcaaaaaggctactggcaggatctgccgttaaccaatctgattactcgtcatgcggacaatgacgccgtggcgattatcgacggcgagcggcagattagctaccgccagtttaaccaactggtggataacctcgcgtcctccctgcagcatcagggactcaagcgcggagaaaccgcgctggtgcagcttggcaacgtcgccgagttctacattaccttctttgcgctgctgcgcatcggcgtcgcaccggttaacgctttgtttagccatcagcgcagcgaactcaacgcctatgccgcgcagattaaaccggtgctgctgattgccgatcgcgagcacgcgctgtttgctgacgatagtttccttaatggttttatcgctgagcatccttcgctgcgcgtcgcgctgctgcgtaacgatggcggcgagcgcgacctggcaacggaaattaaccgcacggcggataactttgtcgccaatccgacgccggctgacgaagtggcttttttccagctctccggcggcagcaccgggacgccgaagcttattccgcgaacccataacgattacgactacagtatccgccgcagcaacgagatctgcgggattaacgccgacacgcgctatctcaacgcgctgccggcggcgcacaactatgcgatgagctcgccgggatcgctgggcgtctttctcgccggcggccgggtgatcctcgccgctgacccgagcgccacgttgtgtttcccgctgatcgaaaaacatcagattaacgtcgcgtcgctggtgccgccggcggtcagcctgtggctgcaggctattcatgaatggggcagcaacgcgcaactgcaatcgctgaagctgctgcaggttggcggagcgcgcctgtccgcgacgctcgccgcgcgtatcccggcggaaatcggctgccagctgcagcaggtgttcggcatggcggaagggctggttaactacacccgcctcaacgatagcccgcagcggattatcaacacccagggttgcccgatgtgtcctgacgacgaagtgtgggtggcggatgccgacggtaacccgctgccgcgcggcgaagtgggccgtctgatgacccgcggcccttataccttccgcggctattacaacagcccgcaacataacgctgaagcctttgatgccgatggattttactgctccggcgatctgatttcgatcgatgaagatggctatatcaccgtccagggccgggaaaaagatcagatcaaccgcggtggcgagaagatcgccgctgaagaaatagaaaacctgctgctgcgccatgaggcggtgatccacgccgcgctggttagcattgaagacaatctgctgggcgagaagagctgcgcttatctggtggtgacatcgccgctgcgcgccgtcgcggtgcgccgcttcctgcgcgagcagggcgtggcggaatttaaattgccggatcgcgtggagtgcgttgccgcgctgccgctgacgccggtgggcaaagtcgataaaaaacaattacgtcagtggctggccgaaggcaagctgggctga

SEQ ID NO: 104407 - DNA, 1176 bp, Enterobacter aerogenes
atggaaacgtcactggctgaggatgtacaggaaaaaacgcagaccctgtcgccgcaaagcttcttctttatgtcgccgtaccgcagcttcagcaccaccggctgttttagccgtttttcccaacctgccgtcggcggtgattcactgaacggcgagttccagcagaaaatggcggccgcatttgccgaggcccgcgcggcggggatccgcaagccggtcatggtcggggcgatcccgttcgacaccaatcagccttccgagctctatattcccgaacgctgggaaaccttctcccgtaccgacaaacagcagtccgcgcgttatgcggcgccgctcaaggcgatggatgttgtcgatcgtcaggagatcccggaacaggacgagtttttggcgatggtggaacgcgccgccgcgctaacggcgactccggaagtcgacaaagtggtgctatcaaggctgattgatattacgacccgcgaccgggttgatagcggcgcgctgctggaacggctgatcgcccagaacccggcgagctttaatttccatgtcccgctatctgatggcggggtattgttgggcgccagcccggaactgctactgcgtaaagaaggactgcacttcagttcgctgccgctggccggctccgcccgccgccagcctgacgatgtgctggaccgggaagcgggtaacaagctactggcgtcaggcaaagatcgccatgagcacgagttggtgacgcaggcgatgaagagcgtgctgggcccgcgcagtagccaattgtcgctaccggaatcgccgcagctgattaccaccccgacgctctggcatctggcgacgcctatcgaaggtacggcgctggcggaagaaaacgccatgtcgctggcctgcctgctgcacccgacaccggcgctgagcggcttcccgcaccaggtggcgaagcggctgattgccgagctcgaaccgttcgatcgccaactgtttggcggcattgtcggctggtgcgatgacgaaggcaacggcgaatgggtggtgaccatccgctgcgcgcgcttaaatcaacgctcgctgcgcctgtttgccggcgcgggtatcgtcccggcctcttcgccgctgggcgaatggcgtgaaaccggcgttaaactcaccaccatgctcaacgtatttggcttgaattaa

SEQ ID NO: 104408 - DNA, 960 bp, Enterobacter aerogenes
gtgaattttgccactttttgtcgtcgtactttactcgccagcgggctgtgccttttaggaattacctcagcgctggcggcagactggccgcgtcagatcgtcgatagccgcggcactcatacgctggaaagccaaccgcagcgcatcgtctcgaccagcgtcaccctcaccggctcgctgctggctattgatgcgccggtggtcgccagcggcgcgaccacgccgaataaccgcgtggcagatgcgcagggctttctgcgccagtggggcgatgtcgctaaaaagcgcaacctggcgcgactctatattggcgaacccagcgccgaagcggtggcggcgcagatgccggatctgattctgataagcgccaccgggggagattccgcgctggccctgtacgaccagctgtcgactatcgcgccgacgcttatcatcaactacgacgataaaagctggcagacgcttcttacccaattagggcatattaccggtcacgaaaagcaggcggacgcgcgcattgccgaattcaataaacagctcgtttcgttaaaagagaaactaaagttgccgccgcagccggtcaccgcgctggtttataccgccgcggcgcacagcgccaatatctggacgccggaatcagcgcagggtcagatgctggaacagttaggctttaagctggcgacgctgccgggtaacctgcacgccagccagagccagggtaagcgtcacgacatcgtacagttaggcggcgagaatctggcggccggaattaacggcgaaagcctgttcctgttcgccggcgatgagaaagacgccgaggccatttacgccaacccgctactggcgcacctaccgtcggttgccgctaaacgcgtttatccactggggaccgaaaccttccgtctggactactacagcgccatgctggtactgcagcgtttatcggcgctctttgcctga

SEQ ID NO: 104409 - DNA, 2130 bp, Enterobacter aerogenes
gtgaccactagcaaattgatcaagggcgataccctgaccgaaaccagcaacgccgcagatggttttaacccggcaactgaagtcagcaactacagctatacgtcagaccgcgtcgctaaaccggtctataacaaatacaaaagtgcgaccaccaaaccaaaggtctttggttactacaccgactggtctcagtacgatggccgtctgcagggcagcgatgcgaaagataaccgcggacgcggctacgacctgaccaacgtctcccctaccgcttacgataaaattatcttcggtttcgtcggcgtgaccggcttccataaagtggatggcctgtggcgtgatgtggtggccgaaggggctgagcagtgcggcaaagtcaaatatgaaccgactttcctcgacccgtggggcgacttccagtcttacgttaacgttggccacagcgtcagcggctgggatgtcgatccgaaaaccgtaacccagacaaacaccaaaggcctgctcggcggtctgcgcgacctgcaagcgaaagccaaacaacagggccacaacctggtgctgtccatgagcatcggcggctggagcatgagcaacggttttcatgaaaccgcggcatctgattcctcgcgtaaaatcttcgctaaaggcgtggtgaagctgttcaaacagttcccgatgttcagcgaagtggatatcgactgggaatacccgaatgccgaaggcgccggcaacccctacggcccggaagatggtgaaaactatgcgttacttattgccgaactgcgtaagcagctggattctgccggcctgagcgatgtcaaaatctctatcgccagctccgccgtggtgaagacctttgattattccaacgtcaaagcgctgatgaatgccggtctgtacggcatcaacgtcatgacctatgacttcttcggcaccccgtgggcggaaagcatcacccaccacaccaacctgaaagccattgagcaaggcggctgggcgattaacaccatcgttgaacatctgctggcggaaggtttcccggctgagcgcatcaacatcggttacgccggttatacccgtaacggccgcaacgccgagctggaatccctgtctccactcaaaggcacctataacccgggtaacggcaccaccgtcggttcctttgaatccggtaccaacgaatggtatgacgtcatttataactacctggatctggaaaaccagaaagggcgtaacggctttaacgtctataccgatcaggttgctgacgctgatttcctctacaacccggaatccaaactgtttatgtcgctggataccccgcgcaccgtcaaagccaaaggggaatacgctgccagtctgggcttaggcggcctgttcacctggactatcgaccatgataacggcgtgctggttaacgccgcccgtgaaggtctgggctacgaaatcgcctctgaagttatcgatatggagccgttctatttcgaaggcattaacgttgtgccagctgatgaacaagaagacgataagtcagaagatgagccaactgaaccgacggtaaaccatgcgccggaagcggcaattgaaatgatggtcgtaggcggctcccgcgtacgcctgtccggggaaaaatcgtctgatgaagacagcgacgagttgagctacagctggggcgtgccggcagcgattgatgttgcggataaaaccgccgcggttattgagttcgatgttccggaagtcaccgcggataccgagttcactttcactctgttcgttcgcgatagctggggcgaaccgtcaacccagcagcgctttattctgtcggtggtcgtcgcctcccagggtgaaccaagcgctgacgagccagccgatgagccggcagatgaagcggctgacgatgaaaaagacgccgatgacgtgccggcacaggaagacgatgttgtaccatctgacgaaaccacgccttacccgctgtgggatgccaaaaccgtttatggcggcaactggggtacctttgaaaccgtgagctggaaaggtcacaactatcaggtgaaatggtggtctcagggcaaccagccagacctgaactgcggccagttcgacgtctggaaagacctcggcgcatactaa

SEQ ID NO: 104410 - DNA, 1242 bp, Enterobacter aerogenes
atgaaccgaccttcccggctgcttgatgtcagcctcctgcgcacccatccggcgttccgcgccgtctttatcgctcgctttatctctatcctgtcgcttggcctgctaggcgtggcgatcccggtacaaatccagatgatgacccattcgacctggcaggtggggctctcggtgatgctgaccggctgttcgatgttcattgggctgatggtcggcggcgtgctggccgaccgttatgaacgcaaacgcctgatcctgctggcgcgtggcacctgcggcgtgggcttcgtcggcctgtgcctgaacgctatgctaccggaaccctcgctggcggcaatttacctgctggggatctgggatggcttcttcgcctctttgggcgtgaccgcgcttctggcggcaacgccggctttagtcggccgcgaaaacctgatgcaggccggagcgatcaccatgctgaccgtgcgtctcggttcggtgatatcgccgatgatcggcgggctattgctggcgaccggcggcgtggcctggaactatggcctggcggcggcggggacgttcattaccaccctgacgctgctacgcctgccgctgctgccgccaccgccgcagccgcgcgagcatccgctgaaatcattgctggcggggctgaaatttctctttaatagcccgcttattggcggcattgcgctgctcggcggcctgttgacgatggccagcgcggtgcgggtgctttatccggcgctggcggaaggctggcagatgtcaaattcgcagattggcctgttgtatgccgccattccgcttggcgcggcgctgggggcgttaaccagcggacaactggcgcataccgcgaagccgggggcgttgatgctgataacgacggtagggtcgtttgtggcgattgcgctgttcagcgtgatgccgttctgggcgctgggcgcgctctgtctggcgctgtttggttggctgagcgcgataagctcgctgctacaatacacgctgatccagacccaaacgccggaaaatatgctggggcgcattaatggcctgtggaccgcgcagaacgtgaccggcgatgctattggcgcggcgctgctggggggattaggggcggttatgaccccggtggcttcagccagcgccagcggctgggcgctggtgattgttggcgtattactgattggcttattgcgcgagctacgtcgttttcagcgtccggagcaggcctgcgaaagttaa

SEQ ID NO: 104411 - DNA, 1008 bp, Enterobacter aerogenes
atgtcgttttctacgaccacggtgcgcgccgtcgccgtgcctggtctcttgttacttttagctctcgcgattgcgctcagcctgcttatcggcgccaaacctctgccgccttcggtgattgtcgatgccttctccggcagctgtcagagcgccgactgcactatcgtactggatgcccgcctgccgcgtacgctggccggattgctggccggctgcgcgcttggcctcgccggcgcgctaatgcaaaccctcacccgtaacccgttggccgacccgggcctgctcggcgtcaactccggcgccagcttcgccatcgtgctcggtgcggcgctgttgggcatcacttcgccgcaggagcagttgctgatggccttctgcggcgccttcgtcgcgtcgctactggtcgcgtttaccggcagccagggcggcggccagcttagcccggtgcgcctgaccctcgcgggcgtggcgctggcggcggtcctggaaggcttatctaacggcatcgccctgctcaacccggacgtgtatgaccagctacgcttctggcaggccggctcgctggatattcgcaccctgcaaacgctgaaaatcgtcctgctgccggtgctgattgccgccgtggtaactctgtttcttagccgggcgctgaacagcctgagcctcggcgccgacaccgccaccgcgctcggcagccgggtcgcgcgcacccagcttatcggcctgctggcaattaccgtcctgtgcggcagcgcgacggcgctggtcggccctatcgcctttatcggcctgatgatgccgcatatggcccgctggctggtgggggcggatcaccgctggtcattgccggttacgctgctcgccacccccgccctgttgctgtttgccgacgtgcttggccgcctgttggtgcctggtgaactgcgcgtttcggtggtcagcgcctttatcggcgcgccagtgttgatctggctggttcgccgtcagccgcgaggaggtgcgctgtga

SEQ ID NO: 104412 - DNA, 990 bp, Enterobacter aerogenes
atggctccctcccgccgcctgatgttctgctgcctgctgctgatcgccgccagtctgctggtgtccctgctcggtctgggtaatggcctggtgccgctcagcattgaacaggtggtttccgcgctgctcggcgacgcgccgcgcaacgtcagcatggtggtcaccgaatggcgcttgccgcgcgtgctgatggcgctgctgatcggcgccgggcttggcgtcagcggcgccatttttcagtcattaatgcgtaacccgctgggtagcccggacgtgatgggcttcaacaccggcgcctggagcggcgtgctggtggcgatggtgatgttcggccagaacctgaccgccatcgcgctggcggcaatgcttggcggcgtgctgacctcgctggtggtgtggctgctggcgtggcgcaacggcattgaaaccttccgcctgatcattatcggcatcggcgtgcgcgccatgctggtggcattcaatacctggctgctgctgcgcgcgtcgcttgagaccgccctttccgccgggttgtggaatgccggttcgctcaacggcctgacgtggggcaaaacctggccatcggcgccgctgatcctgctgatgttagcgtgcggcgcgctgctggcgcggcggatgcgactgctggagatgggcgacgataccgcctgcgcgctgggggttcaagtcgaacgttcacgcctgctgctgatgctggtggcggtgctgctgaccgcttccgccaccgcgctggccgggcctatttctttcgtcgcgctggtcgccccacatatcgcccggcggataagcggcaccgcacgctgggggttaacccagtcggcgctgtgcggcgcgctgctgctggcgctggccgattactgcgcccagcgcctgttcatgccttatcagttaccggtaggggtggtcaccgtcagtcttggcggtatctacctcatcgcgttattaattcaggagtcccgcaaaaaatga

SEQ ID NO: 104413 - DNA, 795 bp, Enterobacter aerogenes
atgaccgctgtaacttcccgtttgcgcggcgaccagttgaccctggcctacggcaaaaagaccatcgccgaatcgctgaacgtcacgattcctgacggccatttcacggcgattatcggccccaacggctgtggtaaatcaaccctgcttcgcaccctcagccgcctgatgaccccgtccagcggacacgtttatctcgatggcgagcagatccagcactacgccagcaaagaggtggcaaagcggattggcctgctggcgcagaatgccaccacgcccggcgatatcaccgtacaggaactggtggcgcgcgggcgctatccgcaccagccgatgtttacccgttggcgtaaagaagacgaagcagcggtaaataacgcgatgcgggcgacggggattgtcgacctcgcgctgcagagcgtggataccctctccggcggccagcgccagcgggcgtggattgcgatggtactggcgcaggagacggcgattatgctgcttgatgagccgacgacctggctggatatcagccatcagatcgacctgctggaactgttaagcgagctgaatcgcgagaagggatatacgctggcggcggtactgcacgatctcaatcaggcctgtcgttacgccacccatctgatcgccctgcgcgacggtaagatcgttgccgaaggcgcgccgaaagagatcgtcacggcggatctaattgagcgtatctacggtctgcgctgcacgatcatcgacgatccggtggcgcatacgccgctggtagtgccgctgggtcgccgataa

SEQ ID NO: 104414 - DNA, 3882 bp, Enterobacter aerogenes
atgagtacacgtttaccgctggttgcggcgcagccgggaatttggatggctgaacgcctctccacgctacccggcgcctggagcgttgcccactatgttgaactgcgcggcaatcttgatccggcgctgctgagtaaggcgatcgtcgccgggcttaagcaggccgataccctgagcatgcgcttttgcgaagataatggcgaagcgtggcagtgggttgatgacgcgcgcgagtttgccgagccgcaaagcgttgacctgcgccagcaggccgatccgcatatgtccgcgctgacgctgatgcaaagcgatctcgggcagaatctgcgcgtcgacagcggtaatccgctggtctgccatcagctcatgcgcgttggcgacgactgctggtactggtatcagcgctatcaccatttactggtcgatggttttagtttcccggccattacccgccagatcgccgctatttatcgcgcctggcaacgcggcgaagagacgccggattcaccgtttacgccgttcgccgaagtggtggaagagtatcagcgctactacggcagcgaggcgtggcagcgcgataaagccttctggcaggcgcagcgtcaggcgttgccgtctccggcctcgctatcagacgcgccgctggccgggcgggcgaccagcagcgatatctggcgcctgaaactggaggccgatccggctgtcttcagccaactcgcggccagcgcgccgcagtgccagcgcgccgatctggcgttggcgctgacgacgttgtggctggggcggctgtgcggccgaatggattacgcggctggctttatctttatgcgccgcatgggatcggcggcgctgaccgccaccggcccggtactcaacgtactgccgctggcggtgaatatcgacgcgcaggagacgctggcgcaactggcgacgcgtctctccggacaactgaaaaaaatgcgccgccatcagcgctacgatgccgagcaaattgtccgcgatagcggtaaagcggcgggcgacgaaccgctgtttggcccggtgctgaacatcaaagtctttgattaccagttggatatcgacgacgtgcaggcgcagacgcataccctcgccaccggcccggtgaatgacctcgagctggcattattcccggacgaacgcggcggtctgtcgctggagatcctcgccaataaagcgcgttatgatgaggcgacgctgaaccgccacgtgtcgcgtctgactgcgctgctggcgcagttcgccgccaatccggcgctacgctgcggcgaggcggagatgctgtcggcggaagaaggcgcgcagctggcattgatcaacaataccgcgatgccactgccgaccactaccctcagctcgctggtggctgaacaggcgcggaaaacgccggatgctccggcgctggcggatgccaactggcgctttagttaccgcgaaatgcgccaacaggtggtggcgctggccaacctgctgcggcaacgcggcgtgaagccgggggatagcgtggcggttgccttaccgcgttcggtgttcctgacgctggcgctgcacggcattgtcgaagccggcgccgcctggctgccgctggacaccggctacccggatgaccgtttgcggatgatgctggaagatgcgcggccttcgctgctgattacctctgacgatcaactggcccgttttagcgatattccgggactgaccagcttgtgttatgagcagccgctggctgctgaagatgatacgccgctggcgctgtcaaaaccggaacataccgcgtatatcatcttcacctccggttccaccggacggccgaaaggggtgatggtcgggcagaccgccatcgtgaaccgcctgctgtggatgcaaaatcactatccgttaaccgccgccgatgtggtggcgcagaagacgccgtgcagctttgatgtctcggtatgggaattctggtggccatttatgaccggcgcccagctggtgatggcggcgccggaggcgcatcgcgatccacaggcgatgcagcggttcttcgcgcagtacggcgtgaccaccacccactttgttccgtcgatgctggcggcgtttgtcgcctcgttggatagcgataatgtgtcttcctgccggacgctaaaacgcgttttctgtagcggcgaagcgctgccgacggaactgtgtcgcgaatgggaacgcttaaccggcgcgccgctgcataacctgtacgggccaacggaagcggcggtggatgtcagttggtatcccgcctgcgggccagagctggcggcggtaaccggcaacagcgtgcctatcggctggccggtatggaacaccggattacgtattcttgatgccgccatgcgcctggtgccgccgggcgtggcgggtgatttgtacttaacgggcattcaactggcacagggatatatggggcgatctgatctcaccgccagccgctttattgccgacccgtttgcccccggcgagcgcatgtaccgcaccggcgatgtggcgcgctggctggataacggggcggtagagtatcttggccgcagcgacgatcagttgaaaattcgcggccagcgcattgagcttggcgagatcgaccgggtgatggcggcgttgccggacgtcgcgcaggcggtgtgccacgcctgcgtcttcaatcaggcggcggccaccggcggcgatgcccgccagctcgtcggttatctggtgagcgagtccggccagccgctggacgtggcggcgctgaaagcccgtcttagcgaacagctgccgccgcacatggtgccggtggtgttaatccagctggaatccttcccgctcagcgccaacggtaagctggatcgtaaagcgctaccgctcccctccttaagcagcgagcgcagcggtcgcccgccgcaatcggctaccgaaatggccgttgccgcggcgttcagccagctgctgggctgcgaggtaaatgacatcgacgccgatttcttcgccctcggcggccattcgctgctggcgatgcggctggcggcgcagcttagccgcgagctggcgcggcaggtgacgccggggcaggtgatggtcgcttcgacggtcggcaagctgagcgcgctgctggcttctgacctgagcgacgagcaggcgcagcgcctgggcttcgatgcgctgttgccgctgcgtgagagcgacggtccgacgctgttctgcttccatccggcctccggttttgcctggcagttcagcgtgctggcgcgttatcttaacccgcgctggtcaattaccggtattcagtcgccgcgtccgacggggccgatggcttccgccgccaacctcgacgaagtctgcgagcaccatctgcgcacgcttttagcgcagcagccgcatgggccttactatctgtttggttattcgctcggcggaacgctggcgcaggggattgccgcccgtttacgccagcgcggcgaagaggtggcgttcctcggcctgctggatacctggccgccggagacgcaaaactgggcggagaaagaggcgaacggtctggatcccgaagtgctggcggaaatcgcccgcgagcgcgaagcgtttctcgccgctcagcaggggcaggcttccggcgagctgttcagcgcgatcgaaggtaactacgccgatgcggtgcgcctgttgacgaccgcgcacagcgcgaagtttgacggcaaggcaacgctatttgtggcggagaaaacgcgccagaaagggatggatccgcaggtcgcatgggggccatgggttggcgagctggaggtgttcagccagaactgcgcccacgtcgagattatctcgccgcaggcctttgaagcgataggcccggtagtgcgggagattctggggtaa

SEQ ID NO: 104415 - DNA, 1221 bp, Enterobacter aerogenes
atgcaaataacgggaagtgacgactggtggcgggggatcgccggcccgcagacagaggcgctgggcgacgcatatcgggtgaccttctggtggcgcgatccggcaggcagcgaaaccacgtcgccgattcggcgggtgtggatttacattaccggcgtcaccgatcatcaccacaacgcggcgccgcaaaccctgcagcgcatcccaggtaccgatgcctggtgctggcaaaccacgctccccgccagctggcgcggcagctactgttttattccctccgaacgcgacgacgatttttccccgcagctctttaacggtgaagcgccggaccgcgcgctactgcgcgaaggctggcgcaaactgctgccgcgggcggttgccgatccccgcaatccgcaaagctggaagggggggcgcggccacgcggtctcagcgctggaactgccgcaggcgccggaacagccgggttggcattatcgcgagccggtttcgccagcgccgcgctgtattgaatggcgcagccagcgattaggaaaccagcgacgagtgtggatttacaccaccggcagtggggcggatcgcccgctggcggtcctgcttgacggccagttctgggccgaaagcatgcctgtctttgcgccgctggcggggctgacgcgggaaggccgcctgccgccggcggtctatgtgctgatcgacgttatcgacaatcaacaccgcggcgtggagctgccctgcaatcgtgatttctggctggcggtacaggaagaactgctgccgctggtgcaggccgtggcgccattcagcgatcgcgccgaccggacggtagtagcggggcagagcttcggcggtctggcggcgatgtatgccgcgctccactggccgcagcgttttggctgcgttctgagccagtcggggtcgtactggtggccgcagcgcggcagtagccagccgggagtgatacttgaacaactgcagcgcggcgagcttcgaccgcaggggctgcgtatctggctggaagccggcgtgcgcgagccgattatttttcgcgccaaccaggcgcttttcgcgcaactacggcagagcacgccgtccgttttctggcgccaggttgacggcggtcatgacgcgctatgctggcgcggcgggctgacgtccgggcttatccagctgtggcagcctttgcgccgcgggcaacaacacgcgcttaatgaggagtga

SEQ ID NO: 104416 - DNA, 2229 bp, Enterobacter aerogenes
atgaataacaggattaagtccctggccttaatggtcaatctgggtatctacggggtggcattcccgctgagcgcggcggaagaaaccaccgacagtaaacaagccgccggtgaagaaacgatggtggtcaccgccgaggtgcaaaacctacaggcgccgggcgtttccaccattaccgccgatgaaattcgcaaacgtccgccggcgcgcgacgtctctgaaatcatccgtaccatgccgggcgtcaacctgaccggcaactccaccagcggccagcgcggcaacaatcgccagattgatattcgcggtatgggcccggaaaacactttaatcctgattgacggtaagcccgtgaccagccgtaactctgttcgtctcggctggcgcggcgaacgcgacacccgcggcgataccagctgggtaccgccggaaatgatcgaacgtatagacgttatccgcggcccggcggcggcgcgttacggtaacggcgcggcgggcggcgtggtcaacatcattacgaaaaaattcgacaaccagtggcatggttcgtggaacgcctacatgaacatgccggagcataaagacgaaggcgcgaccaagcgtaccgactttagcctcagcggcccgctgggcggcgatttcagcttccgcatgtacggtaacctcgataaaacccaggctgacgcctgggatatcaaccagggccaccagtctgaacgtaccggcatttacgccgataccctgcccgccgggcgtgaaggggtagaaaacaaaaacatcaacggcgtggtgcgctgggatttcgcgccgatgcagtcgctggagtttgaagctggctatagccgccagggcaacctgtacgccggtgatacgcaaaacaccaacagcaacgatctggtgaaagagaactacggtaaagagaccaaccgtctctatcgcaatacttactccgtgacctggaacggcggctgggataacggcgtgacaaccagcaactgggcgcagtacgaacacacccgcaactcgcgtaaaggcgaaggcctggcgggcggcaccgaggggatcttcagcagcaaccagttctcggatatcgatctctccgacgtgatgctgcacagcgaagtcaatattccgttcgatctgtgggttaaccagaatctgacgctgggtaccgaatggaaccagcagcgcatgaaggacaacgcctctaatacccaggaactctccggcggtgaaatcccgggctacgacagcaccggccgcagcccctattcaaaagcggaaatcttctcgctgttcgccgagaacaacatggaagtgaccgataccaccatgctgacgccggcgctgcgtttcgatcaccacagcatcgttggtaataactggagcccgtcgctgaacctgtcgcagggtctgggcgacgactttaccctgaaaatgggtatcgctcgcgcctataaagcgccgagcctgtatcaaaccaaccccaactatattctctacagtaaaggccagggctgctatgcgagtaaatccggctgctatctgcaagggaatgatgacttaaaagcagagaccagcatcaacaaagagatcggcctggagttcaaacgcgacggctggctggcgggcgtcacctggttccgtaacgattaccgcaacaagattgaagcaggctatgctccggtctataccaacggcaaaggcaccgatctgtacaaatgggaaaacgtgccgaaagcggtagttgaagggctggaaggcacgttgaacgtgccggtcagcgagacggtgaactggaccaacaacatcacctacatgctgcagagtaagaacaaagagaccggcgatcgcctgtcgattattccggaatacacgctgaactcaacgctgagctggcaggtttatcaggacgtttctgtgcaatcgaccttcacctggtacggcaagcaggaaccgaagaagtacaactacaaaggccagccggtcaccggcagcgagaagaacgaggtcagcccgtatagcatcctcggcctgagcgcgacctgggacgtgaccaaaaacgtcagcctgaccggcggcgtggataacgtcttcgacaagcgccactggcgcgcgggtaacgcccaaaccaccggcggcgacaaaggttatatgtacggcgctggcgcggagacctataacgaatccggccgtacctggtatatgagcgtcaacacccacttctga

SEQ ID NO: 104417 - DNA, 942 bp, Enterobacter aerogenes
atgagtaatgcagaacacctggcgaatgtgatggtcgaggcgtttatcgccgcggtggaaaagggcgtcgatctggtgccggtggtcgcggactccacctcaacggccaagatcgctccctttattaagcagttccccggacggctggttaacgtcggtatcgccgagcagagcatggtcggcaccgccgctgggctggcgctcggcggtaaagtggcggtgacctgtaacgccgcgccgttccttgtctcccgcgctaacgagcagattaaagtcgatgtctgctacaacaacaccaacgtcaagctctttggccttaacgccggggccagctatggcccattggccagtacccaccatgctattgacgacctggcggtaatgcgcggtttcggcaatatccagattttcgccccctccacgccgcgcgaatgtcggcagattatcgactacgccctggcgtatcaggggccggtttatatccgccttgacggcaaggcgctgccggagttgcatgacgaagcgtaccgttttgtgcccggcgcggtgctgaccctgcgcgaaggcgcagcggtggcgctggtggcgaccggttcaaccgtgcacgaagtggtggaggcggcgcagcagcttgccgacctcggcattgaggcgaaagtggtcagcgtgccgtcgattcgtccctgcgataccgcggcgctgctggcggcgctgcagtcatgccgttcagttattaccgtcgaagaacataacgtcaatggcgggctggggagcctggtcgccgaagtgctggcggaagcgggtacggggattgccttgcagcgtctggggatcccggatggcgagtatgcagcggccgccgatcgcggatggctgcgtcaacatcacggttttgacgcggcgtcgattgtcgcgcgggtacagaaaatagcgcagtgttga

SEQ ID NO: 104418 - DNA, 831 bp, Enterobacter aerogenes
atgaatccctacagatttgatatccagacgcttgagcgcaaagcgcgcgccgtgcgccgccacattgtccgcttaaacgccaatagtccggctggcggtcacaccggggctgacctgtcgcaggtcgaattgttaaccgcgctctatttccgcgtactcaatgcggcgcccgatcgtcttgacgacccgcagcgcgatatctatatccagtcgaaaggccatgcggtgggctgctactactgcgtactggcggaagccggtttcttcccgatcgattggctggagacctaccagcacgcgaactcgcaccttcccggtcatccggtgcggcagaaaacgccgggcattgagcttaataccggcgcgctgggtcacggtttgcctgttgcggtggggctggcgctggccgcgaagaaaagcaacagcccccgccgcatctttttaatcaccggcgacggcgaactggcggaaggcagtaactgggaggcggcgctggcggcggcccattatggcctcgataacctggtcattattaatgataagaacaatcttcagctggccgggccaacccgtgaaattatgaataccgatccgctggccgataaatggcgcgccttcggcatggaggtcagcgaatgcgacggcaacgatatggcctcggtggtcgcggctatcgaagggctgcagcagaacggtaaacctaacgtcattattgccaacaccacgaagggcgcgggcatctcctttatccaggggcgcccggagtggcaccaccgggtgccgaaaggcgaggaaatcgcactggcgctggaggaactgaaagatgagtaa

SEQ ID NO: 104419 - DNA, 951 bp, Enterobacter aerogenes
atggctaagcaggatgaacaacggctattggtgaagattgccacgctttactatctggaaggacgaaagcagtctgatatcgcccaacttctctctctgtctcagtcatttgtctctcgcgcgattacccgctgccaaaaagagggcgtcgtcaaaatcagcgtcgtgcagccatcgaatatctttctcaatctcgaaaaggggcttgaggatcgctacgggcttaaacaggcggtggtggtcgataccgaagaagaggccagcgaccataccatcaagcgggcgattggctccgccgccgcgcactacctggaaacccgcctacggccaaaagatctgattggcgtctcttcatggagttcgaccatccgcgcgatggttgatgaggtccacgcgcaaaacctgaaggccagcggcgtcatccaactgcttggcggtgtcgggcccaacggcaacgtgcaggcgacgatcctcacccagacgctggcccagcgtcttaactgcgatgcctggctgctgccgtcgcagagcatcgaaggctccatggaagagcgcaatcgcctgctggccagcaaagatgtcgccgacgtggtttcacgctttgacgaggtcgatatcgccattgtcggcattggaattctcgaaccttcccagttgctgaaaacgtcgggtaactattatcacgaagatatgctgcaggtgctggcggcacgcggcgcggttggcgatatctgcctgcactactacgacaaatatggccagccggtgttacgcgaagatgaagatccggtgatcggcatggcgctggagaaagtcaaaaaatgcccgaacgtggtcgcgctggccggcggcaccgacaaagtcgcggcaattaaaggcgcgcttaccggcggctatatcgatgttttaatcaccgattaccctaccgccagactactggttagcgactaa

SEQ ID NO: 104420 - DNA, 1521 bp, Enterobacter aerogenes
atgcaggcgacagccaaagagttcatcattgcgctggatgaaggcaccaccaacgcgaaagccgtggtgctggacagcaaaggcaaggttagcgtcaagttctcgcagccgctggcgatccaaaccccgcgcgaaggttgggtggaacaatccggcgaggcgctgatggcggcctcgctggcggtgatcgccaaagcggtggctcacgtcggcgcggaaaacgttgcggcgctggctatcagcaatcaacgcgaaaccgccatcggctggtatcgcgccagcggcgaacccattaacgccgccatcacctggcagtgcacccgcagcgccgcgttctgcgacacgctgcgtcgcgatcgtcaggagcagcgcattaaacacgccacgggcctgccgattgcgccgctgttttccgcctccaaaatgcgctggctgctggacgccactcccgatggctatcagcttgccgcacgcggcgagatttgcctcggcactatcgacagctggctgctgtggaatttaaccggcggacaatccttcttctgcgattattccaacgccgcccgcacccaattgctgaatctgcaccgcggcgagtgggatgaggagatgctgacgctgtttggtattccgcgcgcggcgctgccggagattaaaccgtcgagcgggctgttcggctacaccaaagggctggcggcgatccccgacggtatcccggtgatggcgatgattggcgactcccacgccgcgctattcggccacgcccttggcgaagctggctgtgtgaaagccacctacggtaccggctcctcggtgatggcgccggtcaaatcggcccagtgcgatattgccgccctggcgaccaccgtcgcctggcacgatggcgaccagttggtgtggggactggaaggcaacatcccccataccggcgatgcggtagcatggatggcggacagcaccgggctgagcgaactctccgcagccgacctggcccacgagctgaataccctgcccgcctccgtcgattcgaccttaggggtctacttcgtgccggcgctgaccgggctcggcgccccctggtgggatgacagcgcccgcggggtgatctgcggcctcagccgcggcgtcaagcgcgcgcacctgatccgcgcggcgctggaatccattacctatcaaatcgccgacgtggtggcggcgatgcgccagcacgctgaattcaccctgacggcgttaatggtcgacggcggcccaaccaacaacgactggctgatgcaataccaagccgacctgctcggctgcccggtgatgcgcagcgatatcccggagctatccgccatcggcgcggcgctactcgcccgcaaagccctcactccgggtgagaccgccgacctgcaagcctttttaaccgaacacagcgcttttcaacccgacatggcccgccaccagcgactacagcagcgctggcgggagtggcgccatgcggtaaacagaacattatggaaaccggattcgccagcctga

SEQ ID NO: 104421 - DNA, 936 bp, Enterobacter aerogenes
atgaaattacgtttaactcttttaaccgctgcgaccctgactgccttttcctttgccgcgcatagcgccgaaaaaggcaccattatgataatggttaactcgctggataacccttattacgcctcggaagccaaaggcgccagcgaaaaagcgcaagccctcggctataaaacgaccgtgctctcgcatggcgaagatgtcaaaaagcaaaatgagctgattgataccgccattggtaaaaaggtgcaggggattattctcgataacgccgactccaccgccagcgtcgccgccattgaaaaagccaaaaaagcgggcattccggtggtattaattaaccgtgaaattccggttgatgatgtcgcgctggaacaaattacccataataacttccaggcaggttcagaagtcgccaacgtatttgttgagaaaatggcggaaaaaggcaaatacgccgaactgacctgcaacctcgccgataataactgcgtcacccgttctaaatccttccaccaggtgattgaccagtacccggatatggtcagcgtggcaaaacaggatgccaaaggcaccctgatcgacggcaaacgcataatggatagcattctccaggctcacccggatgtcaaaggggtgatctgcggtaacggcccggtggcccttggcgccatcgcggcgctaaaagcggccaatcgtaacgatgtgatcgtcgtcggtatcgacggtagcaacgacgaacgcgatgcggtgaaggccggtacgctacaggcgaccgtgatgctccaggcgcaggccatcgccgcccagggcgttaccgatctggataactacctgcaaaaaggcgagaagccggcgaagcagcgcgtgatgttccgcggcattctgattacccaggataacgcagataaagttcaggacttcaacatcaagtcctga

SEQ ID NO: 104422 - DNA, 621 bp, Enterobacter aerogenes
atgtacaagaaaacctgtctcgcgctggccgttctggcgcttggcggctgccgcatcgtctcgcagcaggaactggcagacctgaaatccccgcccaatccgcatatggcgaacatcgataaaacctggcagcagagcatcgtgccgcaggtggtcgccaacgcccgcccggcggcggagttgatgagcgcgctgaaggcgcaaaaagatatcgatagcgcctgcaaagcgctgggctaccgtgcccaggacgaaaacccgtgcatcttttacgttaaggtggcgggtgccgtcagcaagctggatagcgcctcgcgcagcggcaaaatgaccctcgccgatggcagcatcggtaatgtggtggtgcagattggccctaccctgcgcggcaccctgctgcgtgacggttatcgcgacgccagctaccaggactttaacgaccaggtgctgtttggcgaatacagcaaaaatattaatagtcaggcggtcaaaatgattcaggcggccaacctgaaaaccggcgacaacatagaagtgtatggcgtcttctcggcctgggatattccacaaactattccggaaatcaccccggcgaaaatcgttcatccgggaggtcaataa

SEQ ID NO: 104423 - DNA, 1545 bp, Enterobacter aerogenes
atgatgccgcaagatatcgtcgctccccaaccagtcgaatctgaagtgattatcgaaacccgcggcctttcgcgcatttatcccggcgtgaccgcgctggataacgtgaattaccgggtctatcgaaataaggttaacgttctgatcggagaaaatggtgcgggtaaatccaccatgatgaaaatgcttgccggcgttgaaacgccctcctccggtcaaattattctcgatggcgaggcggtgactttaaactctacccatcaggcagagaaactcggcatcagcattattttccaggaactgaatttattccccaatatgaatgtgatggacaacatattcatggctaatgaattctttcagaaaggacgcatcaacgagaaatatcaatatgcgttagctaaatcgctactggagcggctggagctcgacgtcgatccctacacacagctgggcgaactggggattggccatcagcagttggttgaaatcgcccgtgcgctatcaaaagacacccgcgtgctgattatggatgaacccacctcggcgctgagccagtccgaggtcaaagtgctgtttaaggtcatcgagcagcttaagcgccgcggcgtcaccattatctatatttcgcatcgcctcgaagagctgatggagattggcgacaacatcaccattttccgcgacggtcgctttatcagcgagcgcaacgtcagcgacgccagcgttccgtggatcatcgaacagatggtcggcgataagaaaaagcactttgattatcagcccgcgccaaaaggcaacgcggtgcttgacgtcaaggggctgaccgcgttgcatccgagcggcggctacaaactcaatgatgtcacctttaccctcagcaaaggcgaagtgatcggcatttacggcctgctgggcgccgggcgcaccgagctgtttaaagggctggttggcttgatgccctgccagaacggcgaggtacatcttaacggcgaaagcatcggcaaatctcgctttcaacaccgtctaaaaaaggggctggcgctggtgccggaagaccgtcagggcgaaggcgtggtgcagatgatgtcgattcaatccaacatgacgctctctgattttagcctgcagggttttcgccgcgcctggcggtggctgaatccgcagaaagaagagtcctgcgtaaaagagatgattcagcaattggctatcaaggtgagcgacgccaatttgcccatcacctcactgagcggtggcaatcaacaaaaagtggtgctgggtaaggcgctgatgacccagccgcaggtggtcttccttgacgaaccgacgcgcggtatcgacgtcggcgcgaaaaccgacgtctatcacctgatcggcaaaatggcccagcaggggctggcggttatgttctcctcttcggagctggatgaagtgatggcgctggccgaccgcatcctggtgatggccgatggccgcattaccgccgatttaccgcgccatgcggtgacccgcgaaaagttaatcgcggcttcaacacctcaagattaa

SEQ ID NO: 104424 - DNA, 1068 bp, Enterobacter aerogenes
atgaaccagaaatatatgatttatatgtacctgctgaaggccagaaccttcatcgccctgctgctggtgatcgcattcttcagcgtgatggtaccgaacttcctgaccgcctctaacctgctgatcatgacccagcacgtggcgattaccggcctgttggccatcggtatgacgctggtgatcctcaccggcggcattgacctgtccgtcggcgcggtggcgggtatctgcgggatggtcgcgggcgcgctgctgaccaacgggttgccgctatggaacggcgacatcatcttctttaacgtcccggaagtgatcctttgcgtcgcggtcttcggcgtgctggtggggctggttaacggcgcggtgattacccgcttcggcgttgcgccgtttatctgcaccttagggatgatgtacgtcgcccgcggctccgccctgctgtttaacaacggcagcacctacccgaacctcaacggcatggaagcgttgggcaataccggtttcgccacgctgggctccggtaccctgcttggagtttatctgccgatctggttgatgatcggcttcctggtactgggttactggctgaccaccaaaacgccgctcggtcgctacatctacgctatcggcggcaacgaatccgccgctcgcctcgccggcgtaccgatcgtcaaagccaaaattttcgtctacgccttctccggcctgtgcgccgccttcgtcggcttgatcgtcgcctcccagctacaaaccgcgcacccgatgaccggcaatatgtttgagatggacgccatcggcgccaccgtgctcggcggaaccgcgctggcaggaggccgcggccgggtgaccggctctattatcggcgccttcgtgatcgtcttccttgccgacggcatggtgatgatgggcgttagcgacttctggcagatggtcattaagggcctggtgatcgtcaccgccgttgtcgtcgaccagttccagcagaagctgcagaacaaagtcattctgatgcgccgccacgaagagaagctggccgccatcccgccgaacggcgccacctccagctaa

SEQ ID NO: 104425 - DNA, 798 bp, Enterobacter aerogenes
atgcaacgagatttccataataaaacggtggttatcaccggcgcctgccgcggcatcggcgcaggtattgcggagcgctttgcccgcgacggcgctaatctggtgatggtctccaacgccgagcgcgttcacgagaccgccgaaaccctgcgtcagcgctatcaggcggatattttatcgctgcaggtcgatgtgaccgacgaagcccaggtacagtcgctgtatgagcaggccgccgcgcgcttcggcaccattgacgtctccattcagaacgccggggtgatcaccatcgattactacgatcggatgccaaaagccgattttgaaaaagtgctcgcggttaacaccaccggcgtgtggctgtgctgccgcgaggccgctaaatatatggtgaaacagaaccacggcagcctgattaacacctcttccggccaggggcgtcagggctttatctacacgccgcactacgccgccagcaaaatgggcgtgatcggtattacccaaagcctggcccacgaactggcgccgtggaacatcaccgtcaacgccttctgccccggcattattgaaagcgaaatgtggaattacaacgatcgcgtgtggggagaaattctcagcaccgagcaaaagcgttacggcaagggcgaactgatggcggaatgggtcgaagggatcccgatgaagcgcgccggtaagccggaagacgtagccgggctggtggccttcctcgcctccgacgatgcacgttacctcaccgggcagaccatcaatatcgatggcggtttgattatgtcgtaa

SEQ ID NO: 104426 - DNA, 786 bp, Enterobacter aerogenes
atgatcggcaaagactttgcacagcagctgtttaacctgcaggagcgcgtcgctttcgtgaccggcgccggcagcggtatcggccaaaccatcgcctgcgcgctcgccagcgccggcgcgcgggtggtctgttttgatcttcgcgacgacggcgggctggcggaaacggtcagccatgttgaatccatcggcggccaggcctgttcttataccggcgatgtccgccagcttgccgacctgcgcgccgccgttgcgctggccaaaagccgttatggccgcctcgatatcgccgttaacgccgccggtatcgccaacgccaatccggccctggagatggaaagcgagcagtggcagcgggttatcgacatcaacctcaccggcgtatggaactcctgcaaagcagaagcggaattgatgcaggagtccggcggtgggtcgattatcaatatcgcctcgatgtcggggattattgttaaccgtggcctcgatcaggcgcattacaactgttcgaaagccggcgttattcatctgtcgaaaagcctggccatggagtgggttgataaagggatccgcgtcaacgccatcagccccggctataccgccacgccgatgaatacccgcccggagatggtgcatcagacccgcgagtttgaaagccagaccccgatgcagcgcatggcgaaggtagaagagatggccggcccggcgctgttcctcgccagcgacgccgcctcattctgcaccggcgtggatctggtggtcgacggtgggtttgtctgctggtaa

SEQ ID NO: 104427 - DNA, 981 bp, Enterobacter aerogenes
atgacagactttacctttacgattaaacgtagtcgttttgatgaacactataacccggcggaaaatacgcgtattaccaccaattttgccaacctggcgcggggcgaaaaccgtcagcagaatctgcgcaatgcgctggcaatgattgataatcgctttaataacctggtgcagtgggacaacccgaacggcgaccgctactccgtcgagctcgatatcatctcggtcgaaatgaatattagcgataacggccagaatgcggcattcccggtgattgagattctgcaaaccaatattattgataaagccaccaacgcgcgaatcgaaggtattgttgggaataacttctcctcttatgtgcgcgattatgattttagcgtattactgccggaatataataaagataaagcaacattcagcgtgccggaaaattatggcgttctgcatggcaatattttcaaacatttcatacgctctgccgaataccatgaatgttttaaaaagtcgccggtcatctgcctgagcgtatccaataagcatacctaccgccggaccggcaatcagcaccctattctcggcgtcgagtaccagcaggatggcgtggcgctgaccgaggcctatttcaataagatgggcctgcaggtgcgttactttatgccggccaatagcgtagcgccgctggccttcttctgcgcgggcgatctgctcagcgattacagcaaccttgagcttgccagcactattagcacgatggagacgttccagaagatttatcgcccggaaatttataacgctaactccgcggccgggcagtgctatcagccgaacctgaataatcaggatcattcgttgacccggattgtttatgaccgcgaagagcgcagccgcctggcgattgaacagggcaaatttaccgaacaacagtttattaagccgtaccagcatattcttgagcaatggtcagctcattacgctctctaa

SEQ ID NO: 104428 - DNA, 1032 bp, Enterobacter aerogenes
atgaaaacattgctcccgacatccaccgcaggcagtttaccgaaaccgacctggctggcgcagcccgagacgctgtggtcaccgtggaaattacagaatgaagagttagtattgggcaaacgcgatgcgctgcgtttatcgctcgacgatcagctgcgcgcaggcattgatatcgtcagcgatggcgagcagacgcgtcagcactttgtcaccacttttattgaacatctcagcggcgtcgattttgagaaacggcaaacggtgagaattcgcaaccgctatgacgccagcgtgccgaccgttgtcagcgccgtcgagcgccagcagccggtgtttgtggaagatgcgaaatacctgcgtcaactcaccaacaaaccgattaaatgggccctgcctgggccaatgacgatgatcgatacgctgtatgacaatcactataaaagccgtgaaaagctggcgtgggaatttgctaaaattctcaaccaggaagcccgggaattagaagccgccggggtagatattattcagttcgatgaacctgcgtttaacgtcttctttgatgaagtcaatgactgggggatcgccgcgctggaaagagccgttgaagggctgaaatgcgaaaccgccgtgcatatctgctatggctacggtattaaggccaataccgactggaaaaaaacgctcggctccgaatggcgccagtatgaagaggcgttcccgaaactccagacctcctctatcgatattatttcgctggagtgccacaactcgcgcgtaccgatggacctactggagcttatccgcggcaagaaagtgatggtcggagctatcgatgtggcgaccaacgccgttgagacgccagaagaggtggccagcacgctacgcaaagccctgcagttcgtcgacgccgacaagctctatccatcaaccaactgcggcatggcgccgttatcgcgtcaggtcgccagcggtaagctacatgcgctaagcgccggggcggatattattcgccgggagctggcggcgaaatag

SEQ ID NO: 104429 - DNA, 366 bp, Enterobacter aerogenes
atggagaaatattcagggatcatcatttgggggccattctatgcgatgatggccgcggttgtcttctgttttgccaaaggttttttccactactggatgatcaaaagggatcctgtagcgacccgcgccagtatcgtctcttattatcctaaagcaccgaacgatcgtggcgaggtgagtattgtattaacgtatagctttagtgccggaggtaaaatttatagcaaagctaatcagtttatgactattaatactgtggatctcgataaggtttatgtgggaaaagaggtgcccgtgatctactatcgggctaatccgaagttcagtcagttagattattatcatcaggagttaagacagagatga

SEQ ID NO: 104430 - DNA, 1074 bp, Enterobacter aerogenes
atgagtggcggtctttttgttggggttgaaaaatacctgataggaggaattacagacgccacaaagggattgatgatgtcgtactcttctatgatgatggggctggcagcagcgtcagctaccatctacatcatgtggcgtggataccagactttggctggtaagctatctacgcctatggaagacacgatgtgggacatcatgaggatggcgatcatcctgtcctttgtggctaatttaggcggctacctcgatggcgttattgatgccataaacggaataaaggagggtttttctggtagtgataatatatggcagttattagacaccctatggaataaggctaaagtgttagggaaaacgctacatgacatggataattctacatatgtaaaagatgagggaatgactgctcaattttgtgtatggcttggaatattcgcacttatgattctagcgggctttgtttcaatggttgccgaagtaatgattctactattaggaataactgcacctattttcatattctgccttatgtatggtttcctccgccccatgttcaataactggttgcaaaatatatttgcaggaatattaacaattctatttgccgctctctcattgagaattgtagtgaattacttgaatctcgttcttaataaggcgacgaaggtagcagacagttcaacaattgttgaacttggtgctcaagtctgccttgcaggtattttcgctgcaatactggtgtatatttccgctaaggtagccgcagctctggccggggcaagcgctaccgtatccatgcaggggctggccgctgtaggtatcggtgcggctgcttttggtgccgggaagctagccgggggtgcagttaaagaaaccaaacgttccgcccaggacaacattcagggctggaaggatgcgaatgcaggtaagcccggcaagcccggaggtgagttaggctataacgcatctaaagcgcggaagtacgcgattgagcagatgatagcccggaacgaagcgcggaggctggcacagtcgagagaatccgcggttaagaagatcaacagctag

SEQ ID NO: 104431 - DNA, 243 bp, Enterobacter aerogenes; identical to SEQ ID NO: 71832

SEQ ID NO: 104432 - DNA, 708 bp, Enterobacter aerogenes; identical to SEQ ID NO: 27078

SEQ ID NO: 104433 - DNA, 2739 bp, Enterobacter aerogenes
atggcaaagctgctcaaggcaatgaaacgcccggcggcgctgtggggggtgccaatggtgcccctgctggctgtcacgggtgtaaccatcatcgttgctatctggacttccgtcgctctcctgttcttacttcctgtgcaatttctggtgatgaagtcccttaccagaaatgaaccgatgcggttcaatctgattgccgtatggctgagagcgaagggaaagccggtagcaaaccgtttatttggcgcaacaacatttatgcccgttgagcatgatgatgttgatatcaaggagtttctcgacgccatgaaactaaatcagtgtgccaccatcaagaagtacatcccgtactcatcgcacattcatcagcatgtggttcgttcccctaagagcgatctgtactgcacctgggaattgatgggaacgccgttcgactgcgagtctgacgagtcgctccagttcgggacgaaccagttacacgggctaatccgctcattcgaaggtatgccagttactttctatatccataacgaccgcaatacgtttaccgacaatcttcataaagattccggcaacccgtatgccgatgaagttagccgtctttactacgcttctgtcggtctgttccggcgcaaccgcctgttcctgacggtctgctatcgcccgtttgtcagccttgaaaaagcagaacgcaaacggatgaaagacagccagaaactaaaggagctggacggtgctttgctggaaatgctggaaataaaaagcacgctcgataccgcgctgtcgcgctatggtgcgcgacctctcggtacgtttaccgaaggaaacgcggtgttttcgtcgcaactggctttctatgaatatctgctaacgcaccagtggcgaaaagtgcgcgtcacccgtaccccggcctatgacgtgatgggggcggcggcgttgttcttttcggctgaatccgggcagataaaccacgccaacggtacgcaatatttccgggggctggaggttaaagagttctccgaagagaccgccacggggatgatggactcccttctttacgccccctgcgattacgtgatcacgcagtcctatacctgcatgtcacgcgaggaagcgaagaaagccattaagcgtacccgtcgccttttgatgagtgccgacgacgatgctgtttcccagcggctggatctggatgtggcgcttgacctgctgacatcggggaaaatcgcttacggcaagcaccatttttccatcatggtgtattccccgtcgctggaaagcctggttgctgatacgaatgaaatcagtaacgcgctgaacaacatagggataacgcctgttccggcagaaatatcgctttcagcggcgtatatggcgcaactgccaggcaactacaacctgaggccacgtaaaggggagctgagtagccagaactttgtggagctggccgcgctccataatttctatccgggcaagcgcgataaagccccctggggggatgcgatggctttactgcgcaccccgtcaggcgatggctactatatcaacctgcataacacactggcagataaggacgaattcaacgagaagaacccggccagtacctgcatcctcggtacgaacggttcgggtaaaaccatgttgatgacgttctttgagatcatgcagcagaaatacgggcgcgaggatagcttctccccggatgccaaaaccaaacggctgacaaccgtttacctcgataaagaccggggcgcagagatgaacatccgggcgctgggtggccgttactatcgggttatcagtggtgagtctacagggtggaacccgttctcgttgccagcaaccaaacgcaatatcaatttcatcaagcaactgatgaaaatcctttgtacccgtaacggctcgacgatctccccacgcgatgaacgacgtctgagtgatgcggtcaatgctgtgatgaatgacgagccgcaatatcgcgtctacggcattacccgaatgctggaaaatttgcctgagccggctacgaaagaagcccaggaaaacggccttagcattcggttgtcacagtgggcgcagggcggtgagttcggctgggtgtttgataacgagtctgacacgttcgatatcagcaactgcgataacttcggcatcgacggaacggagttcctggacgatgcaagcgtatgtgcgccaatctcgttttatctgctgtaccgcattaccagcctgcttgacgggcgacgcctggtcattttcatggatgaattctggaagtggttacgcgacccggtgtttaaggactttgcttataacaagctgaaaaccatccgtaagctgaacgggatgctggtcgtcggtactcaatccccggcagagatcatcaaagatgatatcgccccggcagtgattgagcagtgcgggacacagattctggcggcgaaccccaacgccgaccgcgcacactatgttgacggtatgaagtttgaaccggaagtgttcgacgtggtgaaagggcttgacccgcaagcccgccagtatgttgtggtgaaaaatcagttcaagcgcggcgataccaaacgttttgccgctcgtgtcacgctcgacctgtcgggtatcggcagatacaccaaagtcatgagcggcgatgcccccaacctcgaaatattcgaatcgatttaccgggaaggaatgcagcctcatgaatggctcgatacctacctggctaaagcgctctga

SEQ ID NO: 104434 - DNA, 294 bp, Enterobacter aerogenes; identical to SEQ ID NO: 15700

SEQ ID NO: 104435 - DNA, 711 bp, Enterobacter aerogenes; identical to SEQ ID NO: 71828

SEQ ID NO: 104436 - DNA, 234 bp, Enterobacter aerogenes
atgagaaagcctgtttattacgcgtatgttgcccaggaaagtcatccggactctcagggtgagaaaaatacctggtggacaaaggtcggagtcgcctttccccaccacggtaaatccggtctgaatattgtcctgacgcccggtattgccgtttccggcaaactggtcctgcttgagccccgggaggaaaaaaatccaccacagaatacgggccccatcgaaaccgtgtcgtaa

SEQ ID NO: 104437 - DNA, 582 bp, Enterobacter aerogenes; identical to SEQ ID NO: 15705

SEQ ID NO: 104438 - DNA, 183 bp, Enterobacter aerogenes; identical to SEQ ID NO: 71824

SEQ ID NO: 104439 - DNA, 186 bp, Enterobacter aerogenes; identical to SEQ ID NO: 15707

SEQ ID NO: 104440 - DNA, 927 bp, Enterobacter aerogenes; identical to SEQ ID NO: 71822

SEQ ID NO: 104441 - DNA, 2022 bp, Enterobacter aerogenes; identical to SEQ ID NO: 91719

SEQ ID NO: 104442 - DNA, 1578 bp, Enterobacter aerogenes; identical to SEQ ID NO: 91720

SEQ ID NO: 104443 - DNA, 804 bp, Enterobacter aerogenes; identical to SEQ ID NO: 91721

SEQ ID NO: 104444 - DNA, 1101 bp, Enterobacter aerogenes; identical to SEQ ID NO: 91722

SEQ ID NO: 104445 - DNA, 9492 bp, Enterobacter aerogenes; identical to SEQ ID NO: 91723

SEQ ID NO: 104446 - DNA, 6108 bp, Enterobacter aerogenes; identical to SEQ ID NO: 91724

SEQ ID NO: 104447 - DNA, 960 bp, Enterobacter aerogenes; identical to SEQ ID NO: 78605

SEQ ID NO: 104448 - DNA, 1713 bp, Enterobacter aerogenes
atggcgctggcggggctggcggcattaaccagcctgggggcgctcctttttctggcgtggagcctgcgtgacattcgcgcgacgcctgacgctattccggcctggccgctgggcggcgtgatcggctgcgtggtcttaacttttgttctgcgcttacaggcgttcaacacctctcattacgcggcttttcatctggagaacattctgcgcagcaggttagcccgtaaagcattgcagcttccgcctggcgtgttacagcaaatgggcagcgggtcagtggcgaaagtgatgctggatgacgtgaagtcgttacatatttttgtggccgacagcacgccgctctatgcccgcgcgatcatcatgccgctggcgacaatcgttatcttgttctggctggactggcggctggcaatcgcgacgctgggggtactggcgtttggatcggttgttctcgtgctcgcccgccagcgttcggaagatatggctcagcgttatcataaggcgcgcgagcaggttagcgcggcggtgattgagttcgtgcaggccatgcccgtggtgagaacgtttgatagcggcagcaccagttttttgcgctatcaacgcgcccttgaagagtgggtcgatgtgctcaaaacctggtatcgcaaagccggtttttcagcgcgtttttccttctcgattctgaatcctctcccgaccctgtttgtcctgatctggtcgggatacggcctgctgcactatggcagtttcgattttatcgcgtgggtggccgttttactgctgggcagcggaatggccgaagccgtaatgccaatgatgatgctcaataacctggtcgcgcaaacgcgtttaagcattcagcgtatttatcaggttctcgcgatgccggagttatcgctgccgcagtctgaccagcagccgcaagaggcgagcattacctttgagcaggtgagctttcattatccgcaagcgcgtactggcgccgcgttgcaggaggtgagctttcatgtgcctgccgggcaaattgtggcgctggtcgggccaagcggcgccggaaaaagcaccgtggcgcgcttgctgctgcgttacgccgacccggacaaaggccatatccgtattggaggcgtggatctgcgtgatatgcagacggacaccctgatgaagcaactctcgtttgtgtttcaggacaacttactttttgccgacacgatagccaataacattcgtctgggcgcgccggatacgccgctggaggcggtaatagcggcggccagagtggcgcaggcccatgattttattagcgctctgccagaaggttacaacacacgagtcggggaacgtggggtatttctctccggcggccagcggcagcgcattactatcgcccgggcgcttttgcaggatcgccccatcctggtgctcgatgaggcgacggcgtttgctgacccggaaaacgaagcggcgcttatcaaggcgctcgcggcggccatgcgtggccggacggtcatcatggtcgcgcatcgtctctcaatggtgactcaggccgatgtgatattgctgttttccgacggacagctcagggaaatggggaaccatacgcaactgttggcgcagggcggcctgtatcaacggctctggcaacactatcagcaggcgcagcattgggtgccgggtggaacacaggaagaggtggtggaaaatgaaagacaataa

SEQ ID NO: 104449 - DNA, 1803 bp, Enterobacter aerogenes
atgaaagacaataatcctgcggataacctggcctggcgcgtcaactggcgccagcttatctccagcgttggcagtcaggccaggatgctgcgacgcagtatgctggcgctgttgctggcggcattcatgcaggggatcgcctttgcctgtctttatccgatcattgatgcgctgttacggggagacgcgccgcaacttcttaactgggctatggccttcagcgtcgccgcaattgtgacgctggtgctacgctggtatggcctgggctttgaataccgtggtcatctggcgcaggccacccatgagttgcgcctgcgacttggcgagcagttacgccgcgtgccgctggagaagctccagcgcggcagggcgggtgaaatgaacgccttgctgctgggcagcgtggatgaaaacctcaattatgttattgcgatagccaatattttgctgctcaccattgtcacgccgctgacggcgtcgctggcgacattgtggatagactggcggctggggctggtgatgttgctgatcttccctctgctggtgccgttttattactggcgccgcccggcgatgcggcgacaaatgcagacgctgggggaagcgcaccagcgtctgagcggcgatatcgttgaatttgctcaggggatgatggtattgcgcacctgcggcagcgatgccgataaaagccgggcgctgctggcgcatttcaatgcgctggaaaacttacagacccgcactcaccgtcagggcgctggcgcgacgatgctgatcgccagcgtcgtggagttgggcctacaggtggtggtgttatccgggatcgtctgggtagtgacgggcactctgaacctcgcctttttgattgccgccgtcgcgatgattatgcgcttcgcagaaccgatggcgatgtttatcagctacacctcggttgtggaactgatcgccagcgccctgcaacggattgagcggtttatggcgatagcaccgcttcccgtcgcagagcaaagcgagatgccggaacgttacgatatccgctttgacaacgtcagctatcgctacgaagaaggcgacggccacgcgcttaatcatgtttctttgacgttcccggcagccagtatgagcgcgctggtgggtgcctccggcgcaggcaaaactacggtcaccaaactgttaatgcgctatgccgatccgcagcaagggcagatttctattggcggcgtcgatattcgccgcctgacgccggaacagctcaatagcctgatttctgttgttttccaggatgtctggctgtttgatgacacgctgctggcgaatatccgtatcgcgcgcccacaggcgacgcggcaggaggtagaagaggccgcccgcgcggcgcagtgccttgagtttatttcccgtcttccgcaaggctggctgacgccaatgggagagatgggcggccagctatcgggcggcgagcgccagcggatttccattgccagagcgttattgaaaaacgcgccggtcgtcattctcgatgaaccgactgccgcgctggatattgaaagcgagctggcggtgcaaaaagcgatcgataacctggttcacaaccggacggtgattatcatcgctcaccgtttatccaccatcgccggggccggaaacattctggtgatagaagagggacaggtggttgagcagggtactcatgcgcaattgctctcacatcatggacgttatcaggcgctgtggcaggcgcaaatggccgcgcgcgtgtggcgcgacgacggggtttccgcgtctggagagtgggtgcatgagtga

SEQ ID NO: 104450 - DNA, 1281 bp, Enterobacter aerogenes; identical to SEQ ID NO: 91728

SEQ ID NO: 104451 - DNA, 1305 bp, Enterobacter aerogenes; identical to SEQ ID NO: 91729

SEQ ID NO: 104452 - DNA, 288 bp, Enterobacter aerogenes; identical to SEQ ID NO: 91989

SEQ ID NO: 104453 - DNA, 918 bp, Enterobacter aerogenes
atgatcatccggccagaacaacactggttttttcgtctgtttgactggcacggttccgtgctgtcaaaaattgttttccgcctgctattgaacgttctgatgtcggtcatcgccatcatcagctatcaatggtatgaacaacttggcattcacttaaccgttgcgccatttagcctgttggggatcgcgattgcgatttttctcggctttcgtaatagcgcgagctacagccgcttcgttgaggcgcgtaatttatggggaaccgtgctgattgccgaacgaaccctggtcaggcaattgaaaaatatccttcccgctgaggaggaaacgcataaaacgttagtcagttatctggtggcgttcagctggagccttaagcatcagctgcgtaaaaccgacccggcggttgacctctatcgcttgttgccgaaagaaaaagtggcggaaattctcgccagctcaatgccgactaaccgaatattattattgattggtaatgagttaggtaagctgcgcgagcagggtaagctcagcgatattacctacggcttgatggataataaactcgatgagttagcccatgttctggggggctgcgagcgtctggcgagcacgccggtgccgtttgcctacaccttgattttgcagcgtaccgtttatcttttctgcgcgttattgcccttcgcgctggtgggggatttgcattacatgacgccgtttgtttcggtgtttatctcctacaccttcctgtcctgggattccctggcggaagagctggaagatccgtttggcacctcggccaacgacctgccgctgaatgcaatgtgcaataccattgaacgtaatttgatggatatgaccgggcaacatccgttaccggaaaaaatgcagcccgaccgttattacaaccttacataa

SEQ ID NO: 104454 - DNA, 945 bp, Enterobacter aerogenes
atgaaaattaacgaacctcaggcgattactttaccgctgccgcgaacggcgatattcatcgtcgcgaccgtagcgcgcagcgctgagagcctgagccgcgtgcgcgactggtgcgatgattttgccgcggtggtgcgttccgttggtacccgcatgccggaggcggggatttcctgcatctgcggatttggcgctgagatctggccgcagttgtttggtcaacccaccccgcagcaactgcatcctttccgccgcgtgggcagcggagagcgcgtggcggtctctacgccgggcgatctgctgctgcatatccgttccgatgatatggggcttagcttcgagctggcgacgcagttgatggataagttgggggatgccgtaacggtcgtcgatgaagttcacggcttccgctatttcgaccgtcgggcgatgatcggtttcgttgacggtagcgaaaacccgcaggggcgcgcggcggcggatttcaccattatcggtgacgaagacccggatttcgctggtggtagctacgtgattgtgcagaaatatctgcacgatatggcgggctggaatgcgctaaccgtcgaacagcaggagcgtattatcgggcgtaaaaaaatgactaacatcgaactggatgccgacgtcaaacccagctgttcgcacagttcgctgaccacccttgaagagaacggcgaggagattaaaatcctgcgcgacaacatgccgttcggcaagcccggtatgggcgagtttggtacctattttatcggttatgcgcgcagcccggcgcccatcgaacagatgctggaaaacatgttcgtcggtcgcccggccggtaattacgatcgactgctcgattatagccgcccggttaccggcagtttgttctttgtaccttccgcgacgctacttgaagaattatccagccgccaggctgaataa

SEQ ID NO: 104455 - DNA, 804 bp, Enterobacter aerogenes; identical to SEQ ID NO: 99286

SEQ ID NO: 104456 - DNA, 213 bp, Enterobacter aerogenes; identical to SEQ ID NO: 89036

SEQ ID NO: 104457 - DNA, 555 bp, Enterobacter aerogenes
atgttcagtaaacacacgcacatttgttccgaacgctatgacctgtggattgacaaccactttctgatgagtggtatcagccttattctgcgcacgctgccagaaagttgctttcgcaaaaagcatgttttcttcaccagcgatagctatttctcggtgttgcaacacaaatataatcgtcgggaaacgatttttattttattaaccgaaggcaacgatcttaatttccttagcgaactgccaatgttacgcatccccgccagatcgacccctgctgaattaaaaacatttctcaatcaaccgacccgttattataaatcgcatacttctcctggcgaactgatacagtttaccgagcgagaaaagaaggtcattcagctcatcagtaatggcgaagccattgccagtattggtcgctcgctaaacttgcatattaagacaatttatcaaatccgtttgaatctgataaaaaaactgggctgcagcggcaggaccgatttctttaatatcagccgtagcgaaacatttaagtcctggagtcaaatccatctgtga

SEQ ID NO: 104458 - DNA, 735 bp, Enterobacter aerogenes
atggctttttacagtatcggtgaagtagccgagcgttgcggaatcaatccggtcacccttcgagcctggcagcggcgttacggtttgctgaaaccgcagcgtagcgaaggcgggcaccgtcagtttgatgaagaagatattcagcgaatcgaagaaattaagcgctggatagaacgtggcgtttcagtgggcaaggtgaaagcgctgctggaaggccagctacctgccgcccgtgatgaatccgcacagttgcaggaagagatgatgagtatcctgcgctatatgcagccggccaaaatccgcgccaaaatcaccgcattaagtcatcagcatcccgtcgacaccctgcttgatagcctgttcgcgccggtgcgccagcggctaaaactcgatcaaaacacctcgatggtcatcagcagcatgttggatggcatattgattgattgcgtggcgctgtttttagcggaatcgcgtaaaaaaaatggcaaggagacgctgctggtggggtgggggaatgaagaccgcaccggcctatggctggaagcctggcgtctttcgcaacgcggttggcatgttaacgtgctggcggaaccgttagaatctccccgcccggagctgtttcctggacaacatattttcgtctggaccgggcgccccgcctcgccgctgcaactggagctgctgggccactggcaggaacagggctttagtattcacttccacggtaacgaataa

SEQ ID NO: 104459 - DNA, 624 bp, Enterobacter aerogenes
gtgctcaacaaactttctcgtctgctggatgaagcgggtatttcgctcaccgatcaccagaaaaaccagctggtggcgtatgtcgggctgctggataagtggaacaaagcctataacctgacctctgttcgcgatcctaacgagatgctggttcgccatatcctcgatagcattatcgttgcgccatatctacagggctcccgctttatcgatgtgggaaccggcccgggcctgccgggtattccgctggctatcgtgcgcccggaatctcatttcacattactggatagccttggcaagcgtgtgcgcttcctgcgccaggtccagcatgagctaaaactggataacatcacccccgtgcagagccgtgtggaagcgtttcccgccgagccgccgtttgatggcgtcattagccgcgcttttgcctcgctgaacgacatggtgagctggtgccaccacctgccggcggcagatgggcatttctacgcgttgaaagggcaggcgcaggaaagtgaaatggcagacctgccagaaggttaccaggtttgcgatgtgattaaactgcatgtaccccagttggaaggggagagacatttggtggtcattaagccaaacgccttataa

SEQ ID NO: 104460 - DNA, 204 bp, Enterobacter aerogenes
atgaataccctgatgaacaacatcaacatggtattccttatattgttatggatagcaaacgatgggatcttcgtggtgaaaaaaacaatccatttactggtattgaatcaatacgtttcagtgcggtcagaaccgattatcatcatgatgaaaaagaaggaaatgaagtcagtacctcatttaaaaacaaaggcgatgaattaa

SEQ ID NO: 104461 - DNA, 165 bp, Enterobacter aerogenes; identical to SEQ ID NO: 33404

SEQ ID NO: 104462 - DNA, 489 bp, Enterobacter aerogenes
atggaccgtcgatactgttattggtttgcaactgtttggtccgagaaaaacagttgttttgtgttcattcagagcacattgcgctcccgaaatgtcttctgcgttatgtctcccatggcgcagggagcgcacagggggcggccaatcggcgccgccccctgtacccccgggctatggccgccaaaatcgccacttcgtggtaccttcgacttatcccgccaggcttcgggtcgggccgaggcagcgtccttgcaaaacacggccctcagcacgcatccctgcgtgctgccccggcctgccgggaacgtctcagcgattttgaggccaacaacggcggcagtttcagtcgctattggcacagaagtagcccggataaggcgcagcgcgccgctatccggggcagggcaaggcttaaaaatccattttcaccgtaaactgcacttcacgcgggtcgccaatctggttgccgagattattggtgccgattga

SEQ ID NO: 104463 - DNA, 228 bp, Enterobacter aerogenes
atgtctaaacttaccgaacaggagaaaaccctgtttgccggcgtcacaggacggggggggcggcttcatacttcagtccctgctggcagctccctgagcggtacaaaagattttcagctgtcctgccaaagaagacctatttttatgtcaatccggtcaacgtcagatatcagggagaagctaagcctctccctgaattcaccctcaggcgttagctgccgcctttaa

SEQ ID NO: 104464 - DNA, 363 bp, Enterobacter aerogenes
atgtccagattagagatttttgaaggtggtggttgctgtacgacgagcagcgtagttgtgcataaagaagccgtaaagtggaatgctaacttcgagtgggcgaagcagaacggtatcgatatctcacgctataaccttgtcaaaaatccacagaacttcctgaccaatccagtggttaaagagttcctgaatactgctggtatgcagtcacttccggtgactcttctggacggtgtaatggtattggctggccggttaccagaacgggatgacattgctcgatgggccaacattcctcagacaagagactgggaagaaggaattgagcaaccaagctgctgctcaattccacgcatgccataa

SEQ ID NO: 104465 - DNA, 1071 bp, Enterobacter aerogenes
atgagtgaaagtaaaaaagcgggtattggttttattgaaaaatacctgagtgtctgggttcttatcagtatggtcctgggaatactgatatcacaataccttcccgagattccggaagcgctgggcaaaatgcagatcgctgaaatatcgatccctatcgcggtgctcatttgggtcatggtgtacccaatgatgctgaaggtagattttgccagtgtgaaagatgttggtaaaagtccaaaggggctaatccttacttgggtagttaactggctcatcaagccttttaccatgtatggaattgtcgctcttttcttgcatacagtattttcagcaattattccggccgatcttgccagtgaataccttgctggggcggcattactgggggctgcaccatgtacagcaatggtgtttgtctggagtgaactaacaaaaggaaatccggcttatacgctagttcaggttgcaagtaatgacctgatccttctcgtcgcctttgtcccaaccgtggctttccttctgggaacggggggcattgaagtgccatgggatacactcattctgtcagtatccctgtttgttgtcgtaccgttaattgccggtgtggcaacccgaatgattgtctcgaaagcgaagggcaaagactattttgaaaatagcttcgtgccaaaattcaataaattcatttttattggattgctcatcatgctggtgatcatcttcatcttccagggcaaaacgctgttatctaaccctctgcatattgcgctattagcaatcccgatgattttgcagtcgttcctgaatttcttcctggcatatttaggagcaagggcgctgaaattaccccatgacgtggcatctcccgcagctctgattggggcatcgaacttctttgaatttgcagttgccgtagctattgctttgtttgggccttcgtctccggtggtactggccgtcaccgtcggggtcctggtcgaagtgccgctaatgctggcaatggtcaaaattgccaataggacgacacactggtttgagcgcggcaaatcagggcaatgcagttcctga

SEQ ID NO: 104466 - DNA, 546 bp, Enterobacter aerogenes
atgagtgatgtaacggcattcaacaactgcatgagcgtgttctggcggcaacatgaagctgaactctctcgctttctgacatcgaagactggtgatagcgaaaaagcagcagaccttctacaagagctattcctgcgtacccgcgctcattcagacaatttctgtgagatggcgaatccacgagcctggctgtttcgggcggcgaggaatctgctgattgatgagtaccgcaccactagggaattcgttgagcttgcagaagaggccacgcagcctgaagaatcccctggtgccatctcaatgctggagatgtgcctgccagaaacgttgcaggcattacccgaagatgagcggtggctgattgaggaatctgatctgcaccgccgaccgcagcaggaactcgcagacgaactgaatatctcgcttcctgcgctgaaatcacggttgctccgggccagaagtagcctcagaaatacattaacgcgtctgtgcgatattaaatcagatgagacatccacagtctgctgccataaaaaaatgaattaa

SEQ ID NO: 104467 - DNA, 144 bp, Enterobacter aerogenes
atgctatgtgtgatgccctaccagcagtggaacagcccttcaactctggctaaacatagtaaccactggaacctccgttgcagattaagtcgtttctccaactcgactctcaggaatgttgactatggtttcctgggaaaataa

SEQ ID NO: 104468 - DNA, 570 bp, Enterobacter aerogenes
atgaaaccttacaatgccaatcccaactacgtaatgaacggccagatcctggaagacataaatacacacatggaagcgatgtttcagcgtttcgctaagctgttacccttcaggattgattttgcttaccggaaaaacaccgccagtttcgggcatgcctgtaaacacactatgtgtacagaaatccgtcacctgcttgccgaaacagaaaacgctttggccggttattactgggtgatggaatacacgccgaagaaaggtctgcatatccatttactcggttatctgaacgggcaatttcaccagaacccttaccagctctcccgaacgatgggggatatctggaaaaggtcaaccgaaggagacggatatcactacctgtgccggaagaaagataattacccggtccggatcgaccaggttatccactataccgataccctcgcaattaatgccctgcggtatgccatcagctatctcgcgaaagttaaacagaaagaggatggcattattctcagccgaagcactgtaccagagaaaagtaacaggggcaggccgcggcagggctga

SEQ ID NO: 104469 - DNA, 873 bp, Enterobacter aerogenes
atggtcaagttagtatcgaacggtagaggcaaaatcagctatctggaaaaacgcctatttgataatgattgtcatttgccatcaggtttagcggataaagattatcatacctatcagcaacgggttcggcgctcactgatttcaacaggagtcactgaacaggcgataaatgcattctttgccgagacagaacggttatacgcagaaacctttccgtccgaaaatgaacttgaatggtataatagggatccacgtgccagtttatggctggtctgcgagttatatgaggaactgaaaatcaacaaagttgaagatagcgccatatatttatcgccgacctcattacaacctgctcataacgtcagagtagatgccattcgacgctgtattgatgactggccaatactgttgtttacacctgcatactttctgaaagaaaaaagtatagaatgggctgagttaatggataggcataatttattcaaggatatttatgctaaacagatcgatagctattcgtggctaaaaaaacacctccaggaaaacaccattatttccttaaaccgtatttgtggtgacacatctgaagaagtgatggcctggtgttatgccagttactttatctggagaaaaaacaacctgcattcacccgatacagtagaactgtttatcagaaaatttaagagtgcctggtcgacgcagaaaaacaggatcaaaaacaagattgagaaaaaattaaaacctctcaacgtgaatatttcacagaaagcgcatgacattctgaggtacatcgccacagaagaaacaatatcgaatgatcgggttgttgagagcgcactgtatatgctttacaaaagtaaaacaggaaaataa

SEQ ID NO: 104470 - DNA, 876 bp, Enterobacter aerogenes
atgcataaatctgacggccttcaggcctttgagaaacccctggcttcactgccactcgctattggcgggcaaatccttaaacatatccacaagctggcataccacgaacccgtcattggcattatgggcaaaaccggcgcgggtaaatcctcgctgtgcaacgcactcttccggggggaagtgtctgcggtcagcgatgtaaacgcctgcacccgtgatgcactgcgttttcgtctgcacagcggggagcacagtctcgttatcgtggacctgccgggtgtgggggaaaaccggctacgggatcatgaatataccgcgctgtaccgccgtattctgcccgggatggatctgatcctctgggttatcaaagccgatgatcgcgcattgtcggtggacgaacagttctggctaagcgtgatggcagcccaccagaagcaggtgctgtttgtcatcaaccaggccgacaaaatcgaacccagctatgaatgggataccaccaccagcacaccttcactccagcagcaggcaaacctcagcgccagacagaacgccatcacggcgatatttaagccgcatcaccccgtcagtgtggtctccgctctcagtggatggggaatggaggcgatggtggaaaccatgatgcgcagcctgccggaccgggcatccagtccgctggcgactcagttgcatggaaggctctgcacggagccggtaaaaaagctagccagggacagcttcagccatgccgtgggaaaggtgtttgatggcgtggagtcgtcccctctgcttccggtcccggttcgggcggtcattcgtaccgtacgggaaaccgttgtgtcagtcgcacgggccgtctgggactggatattcttctga

SEQ ID NO: 104471 - DNA, 711 bp, Enterobacter aerogenes
atgtctcaggctgagcgtcgttatgatcggctgtctgtccgactgtcgctgattatcagccgtctgctcgcgggggaaacgctgaatgtgcgtcatctggcgacagagttcggcgtttcagaacgcaccctgcaccgtgattttcgggagcgactgatttacctcgacctcgaataccgggatggctgctgtcgtctgctgaccggggggcgtcacgaactcagggaagaagcagccctgcattttgcccgtcagtcggggattggcgcattgtttcctgatatggacaaccatctggtcagctcgcttctgagaggccaggggacgtcaccatgtcttatctggcatcaggatatgcccgcgccatcttcccgcccggggatcttcacgcgactggtcagggcagtatcagaacaacggcggatcaccctgctagccgacgggtgtcgctgtggcaatcttgccccctaccggctgatttttagttccggtgggtggtttctagcgggtgaacataccagacaactgagcgttttccctctgagcaccgttcactccgttacctttcacccggaaacgttcacaccggacgggcatttcacccgcattctgtcccgcccggattttttacaggcactacctcattttcatgtttttcattcattactcgctgacggcagttacgggcagccccataaggaacaggtatga

SEQ ID NO: 104472 - DNA, 621 bp, Enterobacter aerogenes
atgaaattactcaccacggcggcgctggccgccagcctcggcattatctctgtgagcccggttctcgcagaaaatatcgtgggttcagttaaggcctggcagtacatgcaggctgacggctggaaatcggccgacggtacggataacgacacgctgcataacgcactttatcaggctgatgtaatagacaattatccctggacgaaacagtttctgctgcgtgctcgtggtggtggtgactattaccttgccgacaagaaaacgcacacggtacgcaggctggatgtgaagccggccagcggctactacgctgacctgacctcggtgtaccagggggaggatcaggggaaaggctgttctttcgtcattattgatagtcaataccgactgagggatgaagctgagcgagatgctgtagtggctgaggatccaggaaaagccatagagcttgcatggcagcaatttagcccaaaggtagtcatgacaattccggataactgtgcgaataaacatcagcaggctgctcttgcagccaagagctcggataatgacaggaaattacagcaatgggttgcacaacaaagcctggcggaattatgccgtcgtaccggcaactgctga

SEQ ID NO: 104473 - DNA, 993 bp, Enterobacter aerogenes
atgccagcatttgatagtttattaaagtcagccaagtatattaaggcatacacaaaacagcaaacaggaaaacctagaggggttttatacgttgagaatccatcagacaggctgttttgggaaaatataattgctcaagtttgtcctgaacagtacagtgtaaaatcatttagtctagaggatgcgccaggtaaacgtttgcttgaaaaagaatatagcaagctgcatcgcttctatattgttggtgtagatggtgattttgattatctttgccctgaccggcatgagtttgctagctatttgaatactagcccatatgtaattcatacattcacatactcaagagaaagtgtaattttcagcacgccttctatattggatatcagtaataggttggcattcaggcataaattacctcatgattgtatcgaagcccttatcgagtattctaaaataatattctctgcactttctgttttctcttatgctcataatctgaactggcaggatttcaaagaagaccagttcacgaatgcaatatctttacctgtcggtgaaaaacttcttactgatggcttgcaagtaaacctagctgcacttgatggtgttagagttagctctcgaaaatatatagactctattctacatgacatttctaatgggatagatgaaaagcattgctgtgatatattgaatgaacgttctattacacctgaaattgcttacatgtttataaatggacattatctcaaagatagcatcgtaaagcctatgttagatttattgaagaaaaaaaataagcatgaagatataagtgatgttaaagcaaaaataccaaaggccagatggaaacaatcgattaatgaggtcgagaatcattttaagaaatgctgtcacactgaaagcattatacacaatgcaaattgttatacatcaggagctatctgggatttaataaaagaaaaattcaaagctatagataatgcagcctag

SEQ ID NO: 104474 - DNA, 1059 bp, Enterobacter aerogenes
atggcaaccgatccgcaactgaaaacactgaaaattgaggctctgtttggctataaggatatagtgttagactttagcgatgttaacgtcttggtaggcagaaatggtttgggaaaaactactatcctaaaaattttaaatgccatgctaaataatgattttaattgtgctgaacttaaattatgtcatcgagcaagcgtagcattcacaaataaagcaacaatatcatatgagcctgataatagccttgaaatgattgcaagagacacagttaataaagttttcaataaacaagtgatggaagcttttcaaacaacacaaatcaaactacatgagcgtttgaaagacgaatttcttaaggaaatcacaaggcggattaaccttgatcagattaacgaccccaaggaaatatacaaaactaacactagagaatatatttcttttttcgacaaaaaaaagcaaaacaacattcgcatgtcaaaagcgttaaaagaatatcttgaaaagagctgtgatgttaggtacatttcaacaattaatatgtcagccaatgctcagcaagaaattaaaatgagtagtgggaaagaaaaaaacattcttaattgggagctaaatcttgagctcgcagagttagctaaagaaaaaaattccgtctacacatctcgatttgtaaaaattgcatctgaacttttattagaaagtagtaagagattggttttacgaaaattaagagatgggtacacattcgatactgtcgatgagattcgcaacgaaagtattaaaattgaaagtttatcatcgggtgaaagacaacttttatacattttatcacgcgtagctaatacgagagacaaacaagcattcttgttgatggatgaaccggagatatccttacatctaaattggcaagaaaaattaatttcgagcataaaaagccttaataaaaactgtcaaatcattatagtaactcatagccctgcaattgttatggatgggtatatggacgcctacgttgatatggatgaaattacaatggagggcgataatgccagcatttga

SEQ ID NO: 104475 - DNA, 3153 bp, Enterobacter aerogenes
atggcaacaccgttaccgactccaacgcagaatcctgtcccaagtacggatatcagggatgcagtttttgccggcgcaaagatggatgaaattgttaccagtccaggtgagaaatacacagacaggtttggaaacgaacattacacgattgagggtaccaggaagaacctaataccactgggcaagcagtacgcgtcactggcagctgcgcaggcggatatcgcgaatattccggtggactcgaccacgtattaccgcagcccggataacagagctctagctattgaggtcatgaatgtcgcaggaacgttgacagagaccggcaggcaaatggactcatctcagaccatttttcctggttcgcgactcagtattatccagcagggtaaaaacaaattcgataaaactcgggtaatcagcggttactatctgtttgaggggactgggaagccaacgcctaacgctaattactgttattcggattttattcccgttactgcaggtcgcgtttacagctcgacaccgccgcaacttccaacatccccggcgcgagtaaccacattctatgatgtaaacaatgcttatcttagcgatgtgagctcagtggatagcttcaccgttcccgcaggtgccgcatttgttcgtgtctcaattttgctgactgacctcaatacgtaccagttatcccttggcgtggggtattcggactatgagagctatctggacgtcattaaaccagaggtaaatctgtatccggcgatcggatttgctgcagggaaaaacctgtttaatcctgatacggtagttaatggtgtgcatttgtcgtctgtaggtacaattttcgcagacgccactaccacgctgtccgtatctgactatatcgatatcgatccgagcaagtcgtatgcgtgtaaccagcaatggcaatgtgtagcgtattatgatgccaatggcgccttcattagccgacaacgtgatacaggttttgcgaccaaggccatcaatctactgaccgtccccgcaggcgctgcatacctgaggattgaagtaccgacgtcagtcgtcccggcaacccaaattgagcagggcgtcactgttgcaacagagtttgaggcgtttacgctgaaatcaccggatgtggcaaatgggtctgccgttcagtttggcgaggtgccagtagatattggggattcaggcctgtttgtttcgggtgaaaacctgtttaacaaaaataccgttaaatacgggtacatcaacgaatacgggtctgtgttcccgatacaggggcccggcagcacggattataattactccgattatattcctgtcaccgctggcgagacactgagagcaggaaacaccctacgatttgttacgttttacgattcaagtaaatcgttcatcagtgcaataactcaggtttctgccgcgtttgttgtgcctgctggcgctgcatttatgcgtgtgaccgtttctcagggattcgttaataacctgcagattgtgcgcggggcataccttccaaccagacaggattacacgcatgtcatggcagatgctctaccagacggaacaccggttcgcgttccaggcgatattattctgacagacagcctgtatcttgatttcgttcagcaggggctgctggttcccggcgttaacctgtataaccgctatacgattacggcgggatatattgatgaaactggcgtaattcatcctggtggaaccacctatttttactccgacttcatcccggtaacaccatcggccatttatacgcttaatatgggggcgcggtttattgcgctgtatgccaaaaataaagcattcatacgttcgctggctgactcattccagaatatcacctcagtaacagctgacgcagattgctactttatccgcgttacgattcagaccgcgcgcagcacagatctgcaggttgagcaggggagtgcctccactgcatatgaggattttgcctactcactaatctctcagctaccggacggaacgccggtcaatggtggagcgtcatctgacggcggggttatgcctgatttttacgggttggagcgtctccgtgaaacccacatgtgcctggacaagttgtcctatggcggtaatgtgcagttttcgtgggcgatgatcggtgatagctacactcgtgggcagtttcgatatgcgctgaaatgcgcgcagaaactgtggcacctctacgacggctcggcggttgctgtaacggtgccgccaattgggtttggttatcgctcatttggatacgatggcagcggggataatacggatattgtaggcacgccgataacccagaccgggtttgcctgcgcatacaataccgggaacggactggatatttcctctgtctccagctcgacagcgggatctacgctgacctggaatgataatttctctcttgggttcgcgtataccctgtatgcagagggcggaagtggggtaatcagctacaacgcacctggtatgtctgcgccggtgcaggtcgatttgtcgacatatgcagtaggcgtgcaaatgataccgctggcgtcgatgccaaccaccggcagcggtacggtgacgatcacattggtttccggtaccgcagtgctgtacggcgtaaacatcatgaatgcttcgttaccgggagttgtcgtgcataaacttggtggttcgggatccacttcgacgcagtgggtcaaagctgacgcaacacgatggaaaacggcacttgcgacgttgaaagcaaacctggttaccatcatgctcggcaccaatgatcagggcgccaagctggcaccgtcgacattcaaggctaacatcctgacaatgattaaccgcgtcagggaggccacgccaacggcagatatcctgctgatttgcccggcagagaataacaggccaggtggcaataccattgcgatgtcgaactatgcacgccagatgtacaacctggcacgggagcaggatgttgcattcctgaatctgcaaaactcgtttggtgtaaacccggcagattatgcctatggctccgcacgtccgtggatggtggcggatgggttgcatcccgatccagatacgggaggctatgcaatcgcagcagcactaatcagggccttgtcgcttccacaggtataa

SEQ ID NO: 104476 - DNA, 234 bp, Enterobacter aerogenes
atgattagttttgataagttgatcaccccgaaaattctctcatgggtttatgggttaacccttgtagcgctacttgccatggctgtactgttcgcaatggggggcgattttgtaagaaccattactatgttagtgatggcattgtttagcaggatcttttttgaggggctgatggttgtcttcaaaaataatgagtatttacgccgaatagctgaagttctcgaaaaagagtaa

SEQ ID NO: 104477 - DNA, 369 bp, Enterobacter aerogenes
atgggcgtgaaagtgagaggaattcgccaggccaaggccaacctcgatcgcatcatcaaagacgtgcgtggacgaaaggttgtaagtgccatccagaaggcgatgatcattggtggcgcgcaggcatcactctacactccgatcgatacgaatacgctcatcaacagccagttcagggaaatcattactaacggcaccagggtaaccgggcgcgtcggttactccgcaaactatgcggtttatgttcacgacccagcagtgaaacagaacttcacgcgagcaacagcacgtaaggagttcttaacgaagggcttcgaagatacccgtagccagatagacgctgcggttaagaaggagctttcgctatga

SEQ ID NO: 104478 - DNA, 174 bp, Enterobacter aerogenes
atggcatgggtttcagttcagcaacgccatccgaggtcattcgtccgtgtctgggtgatgaccgataccgggcgggagactaccggctacgtgaaatcgggcggcgagtggttcatcaactgcccgcgcatccgggcgacaggcgcgaaagtgctgcgctggaaggagggctga

SEQ ID NO: 104479 - DNA, 195 bp, Enterobacter aerogenes
atgcttaaaaaatacttcgttgcttttcagatcttaaaacatggccaagagactattcatcgttcggctgttctaaacgatcctgacaatcttgagccagatgttttcttcaagaatgtctcaagagaattagccagacaaaatatggtgctgcctgatggggtaatcatcacagcattcaatcgggttaattaa

SEQ ID NO: 104480 - DNA, 633 bp, Enterobacter aerogenes
gtgccaactgaacgcagaccttaccctcctttaggcttcacgaacccagaaaacttccgcccatacatcgctatcaccccggcgaatgaggtctatagctgggtgagcgacaatatcctgatggaaaacggtatcctccataacgaggaccacttccatctccacacggctgacatagtgtttatgtgggcgacgaaggcctttgataagcgtggtcgagtcgttctcggacaatgcgaagaagtcatgctacgcgccggaggctggcagaagtcccgcatggagcagcagatgcatgaatggttcggtcgtataccgaagttcatcatcaccctggctgctgactactgcgagcaatgtaacgatctggagttctgtgcactggttgagcatgagctttaccacatagcccaggctaccgacgaatttggcgcgccgaagttcaacaaagagaccggaatgccggtgctcaaactccgcggccatgacgtcgaggaattcgttggagtggtccggcgttacggcgccagcaaagacgtgcaggaaatggtagatgcggcgaaccggccggcggaggttgctcatatcgatgttgccagagcgtgcgggacatgcatgctgaaactggcttaa

SEQ ID NO: 104481 - DNA, 279 bp, Enterobacter aerogenes
atgaaaacaattacgtttaaaacatcagacggccctgacgtatcgtttgttggtcaatttgtcgcggatgataccgaacaaagtgttaccacggcaatttacgatacacaaagtggaaactggtttatagccataacaaactccagcaacatattgattgctaagcgagttattgaaaaaaaatcagtgagtgaccttatcgattatcttggacataccgacggtgcagaacgcctttataagaagattggaatcgacactactcaacatccaaattaa

SEQ ID NO: 104482 - DNA, 189 bp, Enterobacter aerogenes
atgagcaaggtaaaccgtgatttagttgcaagcgcgatgatgagcagtattgaaaattacctgtttgagattctggattctgttgaaaacgaagtgggggcacttacggcagaagatcattacgagattaactccctggtccgttgcgcgattgaaaaggcatcaactgaacttggaggtgcagcatga

SEQ ID NO: 104483 - DNA, 516 bp, Enterobacter aerogenes
atgagcagtagaggcgtaaacaaggtaatcatcgttggtcgattaggtcaggatccagaggtgcgctatgcaccttctggtgctgcatttgcaaatctcacagttgccacatccgagcagtggcgtgataagcaaacaggcgaacaaaaagagcagactgaatggcatcgggtagtgattagcgggaaattagctgaaatagccggcgaatatctgcgtaaaggttcagaggtctatctggaagggaaactgcgtacaagaaaatggacagatcataacggtgtcgataagtacaccaccgagattcaggttggtattaacggcacaatgcaaatgcttggcggcaagcaggcaggaaacgaacagaactcgtctacgcgcaatagtgcacagtcgcagacaccagcggtaccgcagaattatgagcgcagcgagccacccatggatttcgacgacgatattccattttcgccggtaactcttccattccctcgtcacaccattcacgtcatttaa

SEQ ID NO: 104484 - DNA, 219 bp, Enterobacter aerogenes
atgacaccagccgacgaaaacgccatccgcgccgcctgccgtcgttgtacggaggaaatcaaacaggccatgcgcaaaaagccaaagcctaactgggacgcaacggttaagccaatcatcaagaaacaccaccagcaaattgcacctctgggagttagcctcctggagttcgtcgtcaaaactggccgccttaacgggcggtttggagccgaacaatga

SEQ ID NO: 104485 - DNA, 483 bp, Enterobacter aerogenes
atgagttggagtcatactgactatattaatttgattgcatcactaggaggggtcggttcagcaatttttgctgcttacaccgcatttcaagcaaagaggactattgaaataagctcaaaagaaaccgaaaaatctcgattactagacgaactatataaacttgctgaatggtgtaacaaatgtgttggtgaggactcttacgtcattgagaaaagcgaaaagcttattgaactcgccactgcttgctactatgcagaacaagccataacaaaatcgagagttactgaaagtgaaaaagaatccttaagagaagtctttactcgccaattgcgcccatcaattaatggtgaaataggttctgcgagtgcactgaaaaaaatcaaagaagcatacgaacttgacgttctccgtgagatgtatagggatgctcaagtatttttgcaaacggtagatagagaacctttgccagaaaaacttccttaa

SEQ ID NO: 104486 - DNA, 396 bp, Enterobacter aerogenes
atggtgtcaggaagacaatccaggtacgattctttcagccttcacgttcctgaagatctaaagcaagcattcatagatgggtttaatgaggttggtttacatgccggtacagttcattgtttctctgctaaaccaacaagtattaaagagtatctcaatgtcatttttgaacgtggtaaggcctacgcaccgttggttcttaaggtattggatatgctacagagaaagcacagtatcaaaatcgaaatttcagcagaccgcaaactctttgagctaagaggcatctcaactgaagatgcacttaaaatcatagaggccgcagattccatccgtgtttcgcactctgaaaatctggacagttctaagtcgcccttagaaggtaataaaaatttataa

SEQ ID NO: 104487 - DNA, 774 bp, Enterobacter aerogenes
atgttactaccgttaatcaatcaattcttgaccccttatgaaatttgggaaacacgggatcccacgcaaagcgaaattcaagatcgcatggcatcaggtattcacccatcactatgtttcgagtctgttaaaactaatcttgtagatgtaataaattcaccagaaaaagccgcaaactacctagcctataggcagtatgataaagaaatagatgactgcatagagacttcattatgtaatacagaatcaaattacattgcttcacggaaggcaatgccaagcataacccctgccactttatcgcagtatcaacggttgtatggcccccatacaaacatgagtaatgtaaacaccgaaatagtttcttcagggaaatcgttagccgatggccaagttttgtttcatgggggaagccttttagctggagttcaagttggtgagtctttgactataacaagacccttatcaacttcgttatcaccttccatggctctcagaaacggtgagtggagagataaattttatcgtgacaatgaagcaaatttggtcattttaactgcatgctcaatgactcataatgcctttatatttaaaattaacggcactgacaaaggtcatgaaaaagaagtacttattcaatcagatgccgtcttaaaagttgttagccggaatttacttaatgctaagtacaaagtttacgcagctggaaattatgctggtcaagtagtagagaaagaagtccccttctacttaacacacgtaactgtctcgtaa

SEQ ID NO: 104488 - DNA, 561 bp, Enterobacter aerogenes
atgatgaatatgaaaaattttactacttatataccggacgttaacccttatgcgggattgtctgttaatgtcatttttttcagggatgcgaaaaagcgtgactggtacgaatcacaaaagctttttgcgaaagatacacttaaagtctgctatgacgataaaaatgtgatagttcagtattcttatgatgtctctgcattaacacctgacggatattcagtagccgaggttaaaggttttgaggtggatagtgatatcaatctcatcgatggtacatgggtttttaacggaaaaaatatcacgaagcgtatatatacgccgaaggaaatacagcaccgtgctgaatctcagcggcagcgtcttatcgcatcggcaagcgaaacaatcagcttgtggcagtcagaattattgctgggcgttatcagtgatgaagataaaacgcgcctgatggaatggatggcctacattaaaaaactcaatgcaatgaatttcagccgaatcagtgatgaggtggattataaggaaattgagtggccggaggtgccaggtaatgtggcgtga

SEQ ID NO: 104489 - DNA, 2259 bp, Enterobacter aerogenes
atgtcgcaaaccgttatcacgctggcgttcgaacagtggaaagcgcagcaagggaatactggcgaagttgtcctgctcgatgaattcgtttttgccaacgtgccagggcttgacccagcaaagccaattgaccgcaacgaaaagctgccaccggcaggccagatagtgcatcgccaggcagtcacgcgtaaaggcgtggtgaatgaaaacgccgtggtgcattccgttgtgctgggcgcggatgtgggtgatttttcgtttaactggatcggtctgattaacaaggcaagcggtacgctggccatgattgtacatgcgccagtacagcagaaactgaaaacaaaagaagggcagcagggcaacgtattaacccgctcgtttctgatggagtacaacggtgcacaggctgaaacggcgattaatacgccagcggagacctggcagattgacttcactgcgagaatggccggaatggacgagcgccagcgccttgaaaatactgatatttatggcgctgctgcgttctttggcgacggctggctggttggcaaatccggcaatcagtattttgtgacgaaaggcacggggtatgttgccggtctgcgtgcagagctcgccgcaaatcaaaatattacggttgctgcaaagcccgttaaagtctggctggatgtgtgctggacgggtgggtttaccagtgcctgggaagtgcagaccaaagtcacggtggcagcgagcctggcggactatgagcagaacggtatcaaacatcatgtgtttgcgctggccagtattgatgcaaacggaaacatcacggatttacgtccgaaaggttcacaggttgaacgcgtagccgtgaaatcggttgataatatcaggccggacgcgaaaggaaatgtggatacgatgcggggtgatgccattcaaccggtgattatgcttccgcctgtgtccaccgggaataattcctacatcaaaattgccaccattaaagattgtggttcaagttccggattctttcagattgttgtttccggcaccggtaactatggcaggccggggcagagcattgaagacattacagtcagttgccggggcattgccgccatggtggcgggaaatgcagataactatatcaatcacaaatccagtaataacggttcagattcccagttaagggttatcgtcgccccgacaggaaacgccagcgaatttaatatatttctgaatgccactggcggttggtgggcaggcaccaaaatgcgggtggaatctatggctggcgggggcgtttatataaccggaccggtgcaggatcgtaagatgggcgcgaatgcctggacgacgaacaagccagccaatagttttatggtttcacgtttcaatattctgtcgagcggtgataccggcaccagtggtactaaaattccgttgctgagtaccgctaatacgtggtcggaaatccagacgtttaaaaaagatattaaggttggctctgccggggatacgtctgttatttccatgggagattcctcacagattatccgtgacaatggcaagaaaggattaattataaccagttcatccggcgcattagctggcaatggtgcaggattgtatttgcgtccaaaaggtagcactgatagctcaatggaattagtcggtaatgccacaggctggagtgtggataaatttaccgccacgacatttacggtaaatggagctaccagtttaaagggcggcgtcacggtaacgaatggggcaatagtctacggtgaaatgaattcggtaatgaatcgcaccgataactatcctgtcggatcatgggttaatggcggtctggtgcgttcttttatatttgggcgcggaggccatggagatgctcgcggtgcgtttaccggcttatatattcaggaatttgtcggttcatacaaccaggccgtgcttaatctgaatgggtttgggaatgatacgagttggctattcagaaatgacggttcctttttttcaccgggaatgatttttgaggcaggccaacgggtttacagcccaaacaacccgcagccaaacgttgtaaccaatgtccggctgagcgcactaacctggacgggaaaaatcggcaatgcaacacatgactggggctgggggagtgtcataaccgccgtccatgcctgggaaaactacgccatcaatatggaatttggtttacgaaccattcaggtgctgattaatgggcagtggctgagtatcggtagtatttaa

SEQ ID NO: 104490 - DNA, 1023 bp, Enterobacter aerogenes
atgtttttaaataaacgagcaaaaagcctgatggcgcaatattgcgctggtctggctgaaaattacgggcaggaatccgcgaatctatatttttcactgactgatccgcaggaaacgactttgcgccaggctttgcttgagtcagtcgaattcctggacatgctgacctgcgcagatgtggatcagctgtccggccaggttgtttctgtgggttcatccgccctgcataccggccgccatgaaaccagtcgtttcattcgccgcgtgggtgtggatgggaatgattacaagctggtagagactgacagctgtgctgcgctgcgctgggatttgctgtccgtatgggctaatgccggtaaggatgagaacgagtttttcaatcttgttcaaaccttctcgaatcaggcttttgcgctcgatatgttgcggatcgggttcaatggtaccagtgtggccaaaaccactaacccggacgaaaacccgaacggcgaagatgtgaatataggctggcatgaacgtatgaagtcatacggaggtggcaagcaaattattaccgatccggttgtactggatgacaaaggtgattatcgcggtctggatgcaatggcctccgatttgattaacaccaaaattccggcgcagtaccgaaatgatccgcgtcttgtcgtgctggttggcgctgacctggtggcagcggaacagtaccgactttaccaggctgctgatcgcccttctgagaagattgcagcgcaaatgcttggcagcaccattgccgggcgtccggcagttattccgccgtttatgccgggtaagcgcatggtggtgacgccgcttaagaacctgcatatctatacccagcgtaatacccgtcagcgcaaagcggaatttgttgaagaccgcaagcagtatgaaaacaaatatttgcgcaatgaaggttatgcggttgaagagccggaactgtatgccgcttttgatgagtcagctgtcaccatcggtgaagtgaccgaacctgcggagggttaa

SEQ ID NO: 104491 - DNA, 213 bp, Enterobacter aerogenes
gtgcaggatttgttttttgaaaccgttgcttttcaacggatcgctttagttgcaaaacttatggcaactgcggattgctcagaagaagagaaagatttagcgctggcctggttgagtgaaatgacaatggcactgggtaaaagactggatgagcatgaaaaaaaatacccccgtaacgggggagattcacgcagccggtgccgctttcaataa

SEQ ID NO: 104492 - DNA, 2064 bp, Enterobacter aerogenes
atgacgttggccttagacaaacattgcgccgccgattcagcgcggcgtgatgctaatcagtctgaagatgcacacgccatcacacactgggcgtattcctggaatgcaccccgtaaggccattgcaagcccgatacccacatacgaagaactacagcgccgagatcgagagaatgcggcgctggcttgcgcccaggatttgctacaaaagcaatctgtgattgttcgtatgtcggtaaatgcgacagccagcaagctggaaaaagaacagggtataaagcgcgcaaatgcttacctggctaaaaccttccttgaacgcattctgccgcgtatcaatattgtttcagagcgttatcacatcggcaaaatgaccgctgataccgtgcgccttatgtaccgcttcaaccacctgcctgatatgtcgaaagaggatattgacctgctggcgcaggatgtttcgacgttcatcacaatggaactcagtagcataaacgatgaaatgccggatgccggtgcgcttaagttgctgcatgcactttatgtccgtgctgctgccattactcatgcattccgccagtctgcgccggattatgaaaagttaatgcgtcgttgcttcgaggagccaaaagccgccgcttctcttgccaaaatgatgtcagatcggtggtgggcgcttcgcctgcgtcgccatgcgtcagagtggcgtgagcatttgcatatcgccctgaatcatgtcagcaaaaaggtcagcacttatgccagcaaacagcttatccgtgactggaaggagcagaagcgccggacgcgggaattcctgaagtcgatggagcttgaggatgaattcggcaaccggattagcctgattgataagtactggggaagcgtggccaatcccgcgatccgccgtacagaaatgatggtgcgtattcgtggatttgaaaacgtttgtaatgagctggggtatgtgggggagttttacaccatcactgcgccgtctaaatatcacgcgactactattcatggccaccgcaaccgtaaatggaatggcagcagtccggctgatagccagggatatctgcgtaaaatctggggacggatcagggcaaagcttcaccgggaagacttgcgcgtgttcggaatcagggttgcggagccgcatcacgatggcacgccacactggcacatgttgctatttatgcgtcctgaagaagttgaacaggtgcgcggcattctgcgtgattatgcgatggatgaagaccatggcgagctgatcaccgataaagccagaaaggcacgctttcatgctgaaagtatcgatccggaaaaagggtcggcaaccggttatgtagccaaatacatatcaaaaaatattgatggctatgcgctggatgatgaactggacgacgaaagcggcaagccaatgaaagaagccgccgccgcagctgctgcatgggcatcatgctggcgtatccgccagtttcagttcgtaggtggtgcgccggtaacggtatggcgcgaattgcgccggatggctgatcacgataccgcgatggggttaagcgttgaatttgctgcggtacatgatgctgctgacagcggagactgggcgaaatatatcaatgagcagggcggaccattcgtaagacgggatgagctgatcgcacgcacatggtatgaaaccagcccggaatttaacgcatatggtgaggaaattgtgcgtgttaagggggttttctctcccgccgttggcatggatgtgcccattttaacccggattacaaaatggaagattgttccgaagttagccgccgatcaggcggcagctgttagcggcgcgaatgcgccgcctaggagttctgtcaataactgtacggagggaggaacccgaagaaggttaaaaaatgaattaactggccgggggcttgccggcacggatgatgaaatagccattctgatgcgcggcggcggattgagttttggtaataattcgctggtttaccgtaatgaaaggttgcaggaaaaccgaatgaaaccggaagatgaaatctggcctggctggaggtga

SEQ ID NO: 104493 - DNA, 858 bp, Enterobacter aerogenes
atggcagtaaaaacaccgttgaaatgggtgggcagtaaagcccgccttatgccgcagctgcttccgcatttacctgaaggtaaacgcctgattgagccgtttgccggttcctgcgccgtaatgatgaatacggattatgacgagtacctgattggtgacattaatcctgatctggtcaatctgtataaggccatggcctatcataccgatgcgttccttgttgagctggaaacgctattttctgccggttcgctgggtgaagaagaaagccgggctgttttctattatgcagtccgggatttgttcaatcagtcagagaagaggggcgcaaattgcgtggaatcggccgcgcgtttcatgtacctgaaccgtcacggctttaatggtctgtgccgctataaccggcgcgggcagttcaatgtaccgtttggtaagtacaagaaaccttattttccgttagatgaaattcatgcatttaaggaaaaggcaaagcgggcaatgtttatcaccgctcactattcggaaacgcttgaattagtccgggatggttatgacgttatttattgtgatccgccatacctgacggaaagcgataattttaccgcttaccatggaagcggttttacgcatatggatcaggggaggctggcgcggaagttgcgccgcctggcacgtaaagggattagtgttgttgcctcaaacagtaatctggagatggtgcattacctgtatgccggttttgaggcggtgcaggtgaatgcgccccgtagcgttggggcatcggctgttagtcagaagatggccagtgagctgatcctgaaatccccacttgattcaattgcaaaggccatcgcatga

SEQ ID NO: 104494 - DNA, 222 bp, Enterobacter aerogenes
atgaccactaacatttcaatcaatctgcctgtcccttcaatctctaaagaaaagtacatcgaactcaccgggttatctgaagataccgtggatgccatgctgaaagatggccgcttacctcgccatcgcttacgcaaagataagggtcgtgaaaaagtcatgatcaatatcgcggcaatgacaattgacgcccttgcgggttgcaacatcgtacttaactga

SEQ ID NO: 104495 - DNA, 621 bp, Enterobacter aerogenes
atgaatctcaaaaccggaggccaagctgtaataaccaggctccttgaggcatacggatttaaaacaaggcaggcgctatgtaatcagctcaacgtatctaccagcaccatgggaacccgttggatgcgtgacgtattccctgcagactgggtgattcaatgctcaatagaaacaggggcgtcagtagagtggctatcatttggaagtggcgagatgtttccgaacgggcacagcacacattcaaatgagacaaaaaaatccgcaaatgaaaacttgctgggtgatgtagttgctgtaccgaggaaaaaaatagttgatggtaatttgtacgattcaaatttctacatgttagataaggcaatccttcctgagaatatcctcatgccgttaatcatcattgatgatgaccttacttatgtagctgaacatagtattagcgagattacagatggaacctggctagtagaaattgaaggcaaagttagcatcaaagaactgatccgaatcccagtcggtaaagtacgtgtttcctcaccaaccggaggctatgcgtttgaatgcggcattaatgacctcactccgctagccaaatgccattactacttaatgaccaatgtttaa

SEQ ID NO: 104496 - DNA, 1050 bp, Enterobacter aerogenes
atggctgttcgtaaactggaaacgggaaaatggatctgcgaatgctaccctgccggacgttccggcaggagagtaagaaagcaatttgctaccaaaggcgaggcactagcatttgaacgccacaccatggatgaagcggcgaataaaccatggttaggcgaaagcgttgaccgaaggacactgaaagatattgttgatctctggttcaaactacacggcatatccctatccgcaggtgagcatgtctatgaaaaattgcttttaatcgttgaagcattaggcaatccattagctacttcactaacacctaaaatgtttgctcactatcgagataagcgtttgactggtgaaatttacttcagtgaaaaatggagaaatggcgcaagtccggtaacagttaaccttgagcaaagctacctcagtggcgcttttagcgaattaattcgactgggtgagtggctgcagcctaatcctcttgaaaacatgcgtaagttcaccatcgctgaaaaagaaatggcctggctgactcatgatcagattgccgagttactctatgactgccagcgtcaaaacaagctgctaacactcgtagtgaaaatttgtcttagcactggggcacgttggagagaggcagttaacttaaccagatcgcaagtcacaaagtaccgcatcacgttcacccggacaaaagggaaaaaaaatagaagcatcccaattagcaaggaactctatgaagaaattaccgcgctgaaggggtttaaattctttgatgattactacttccagtttgcttctgtaatggataaaacttctatcatcctaccacgtggtcaacttactcatgtactacgccacacttttgctgctcactttatgatgtccgggggaaacatacttgcgttacaaaaaatactgggacaccacgatattaaaatgacaatgcgttatgctcacctcgccccagatcaccttgaaaccgcactaaggtttaacccacttgccacgatgaagaatggcgacaaaatggcggcagcggttgccactccctaa

SEQ ID NO: 104497 - DNA, 228 bp, Enterobacter aerogenes
atgatccgttgccatcttgctcggctcatgggcgaacataagatgcgaatagccgatgttgtcagggaaactggcctgagtcgcaacactatcactttgctttacaaagagacggctcaaaaggttgacctggatacattagaaaggctttgcgtgctttttgactgtgaaatacacgatttactgcaaaaggttcctgcttcgcagaatcgtacagagaaaaattaa

SEQ ID NO: 104498 - DNA, 1500 bp, Enterobacter aerogenes
atgacacttattaacctaaaggatctcgaggcccatctttggcatgcagcccatattatcactgggcctattgatgcgtcagattacaaaacgtacatattcccaatcctgttcttcaagcgcatttgtgacgtatatgacgaagaatttgccgatgcgatggagaaggttggggatgcagagcttgccaaggggaagatgtttcaccgcattcagataccagagaattgccactggcgcgatgttttcgctgagaccaaagacattggccaggccttaaaagactccttccgtggtatagaactggcaaaccctaaactgcacggcatttttggcgatgccagctggaccaataaagaacgcctttcagatgagttactggctacgctacttaatcacttcaataaggtgaacttgggtgttgcaagtgttcgtgacgatgatatgggccgcgcatacgagtatctaatcaaacgttttgcagacaaagccaacaagaaagccggtgagttctacaccccacgtactattgttcgcttgatggttaacattcttgatccaaaagctggtgagagtgtctacgatcccgcctgtggtactggtggtatgctgcttgaaactatccaccatgtaaaagaaaacggtggcgatccgcgcttgctaaaaattaaaggtcaggaaaaaaacctgactaccgaagccatcgcgcgaatgaacctcttcctgcacggtcaggaggatttcgatattgttcgcggggatacgctccgtgaacctaagtttttacaaagcgatcgtttagaaaccttcgactgcgttgttgccaacccaccatttagcttgaaggaatggggatacgatctgtggtcgaacgatccctatggccgtaagcaatatggtctggcacctaaaacaaatggtgattttgcttgggtgcagcatatgtttgcttcacttaacgacaatggacgtatggctgtcgtgttacctcatggtgtgctgtttcgtggcggcgcagagggagtaatacgaaccaaattgctgaaagaaaatcgcattgtggcgattattggtgtcgcttccaacctgttctatgggactgggattccagcgtgtattttggtgctgcgtaaatcacgcccggcaacgcataaagatcatgtattgatcatcaatgctgaagagatctataccaaggggcgcgcgcagaatacgctgtccaacaagcaggctgatgacatataccaaatctatcatgaccaggcgcaacaggggccagatgcaaaagaaatcgaaggcgttgcacgctgggtacctctgaaggagattgaagaaaatgacttcaatctaaatattgctcgttatgtgcaaaagccactcgaagaagaaaccatcactgtggaagaggcgctcaaagattttcaacgaaacctggctgagctggaaaaagcagaagaggagctggaagccctgcttatcaaagaagggttcgaggtatga

SEQ ID NO: 104499 - DNA, 1491 bp, Enterobacter aerogenes
atgagtaataaaaagctggaagagctgctctggggggccgccgaatttcttcgtggccaaattgacgcatcagactacaagcagtatgtcttcccgttgctgttttacaaacgcctgtcagatgtctatctggaagaatataatgaggcgatggagctccatgaaggcgatgccgaatatgcagccatgccgatgtttcaccgtttcaacattccctctgaagccagttgggaaaaggtccgtaataccagtaaaaacattggtgaggcgatccagaatgcgcttcgactaattgaagccaataacccgcgtttacatggcgtcttcggtgatgcacagtggaccaataaagagcgcctgcccgatcatctgctggctgatctgattgaacatttcagtaaaatcccactcggcattaaatctgtcgcccaggatgatcttggtgaagcctacgaatacctgattaaaaagttcgctgatgattctggtcatacggcagcagagttctacaccaaccgaacagtcgtgcatttaatgacgcgcattatgggcttaaaaccgggtgaaactgcctatgatccgacgtgcggtactggcgggatgttgctaaatgcagtgatggatcttcgtgcaagaggagaagagtggcgctctgtgcacctttatggccaggaagtgaacctgctgacttccgctatcgcccgtatgaatatgtttctgcacgatattgaagagtttgatgtgctgcgtggagatactttggctgagccaaagtttattgaaaatgatcgtctcaagcagtttgatgtgatttttgcgaacccgccgtactccatcaaaaaatggaatcgtgacaagtttgcagtcgatccttatggacgtaatctctatggcgtaccgccccaaggatgcgctgattatgctttttacacccatatcatcaaaagtttgaaacccgataccggtcgcgctgccatgctctggccacacggtgttctgttccgcgattctgagcaagccattcgtaaacaggtgataaaatccgacatcatagaagcggtgattggtttgggaccaaatctgttttacaactcgccgatggagtcttgcgtggtggtgcttaacaggaataagccagctgaacgcaaaaacaaagttttgtttatcaacggggttgagtatgtcactcgtgaacgtgcccatagccgtttatcctatgagaatttaacggtgctatgtgaggcttactttacacctgaaaagcaaagtaatatcaccgcgttggtggatctcgacgttattaaagagaatctctataacctgtcaattccactgtatgtgcaagcacaaagtaacggtgaagcacataatattgaacatgcaattgaggtgtggaaagtaagtcgcactcagctaaaaaaacaaactaataaattattccaaagccttgtagcgcttggatatagcgttgaaagcaaggtggaggaataa

SEQ ID NO: 104500 - DNA, 1155 bp, Enterobacter aerogenes
atgacagaacaacaattacctgcaggctggcagatggtgaaatttggtgatatcgcgaaacatatctccaaacgtgtagaaccgagcgagacagaccttgatatttatgttggtttggagcacttagaccctgatagcctgaagatcaaacgtcatggcacacccagcgacgttgaagggcaaaagcttttagtgaaaaaaggccagattatttttggtaagcgtcgtgcttatcaacgtaaggttgctgtagctgattgggattgtatttgttcggctcatgccatggtgctggaagccaattcagcaaaggttattcctgagtttttgccattttttatgcagtctgatgtatttatgaatcgtgcagtggcgatttctgaaggttcattatctccaacaattaagtggaaaattcttgcacagcaagagtttcttatcccacctactgataagcaagaaacttacgtatctattctaaagaagatatcttcagtggtggcgagctcagaacgtgctttggcacaggcaaatttgctacatgatgtgttaggtataaagagttatagcactacgaaaaaactaactaccctggatagcttgtgtataaaaattcaggatggaacacatttttcaccccaaaacatcggttcatcaggtgactatcagtatgtaacatccaaaaacattcgtatgggtaaaatggagtttttagaaaaggagtacatttcacaagaagaacacaaaaaaatatataccagatgtgatgttagaaaaggagatattttacttacaaaagatggagctaatacaggtaatgtatgcctaaatgaactcgatagtgaaattagcttactctctagtgtcgcctttttaagggtggatcctaataaagcagattgtaactatgtttatcactggctaatgttgagaactacacaaagagatatctcatcacaaatggctgggaatgcgattactagacttacattgaaaaaaataaaatcaatgatgattccagacctttgcctaaacgagcaaaagcgaataggtgatcttctatctagaagtcacgcattaatccaaatatttaacaacaaaattgaacatctaaagagattgaatagagcaatcttggcagctgaagaaaattaa

SEQ ID NO: 104501 - DNA, 3063 bp, Enterobacter aerogenes
atgtttaacgaacaaaccgttacagaaaatggaattatcgaccgtttaaaaggtttaagcggagtcaagtggacttactgccacggtgaaaacctgcctaaacaagcgcaggatatcttcgttgatgagtggctaaaagacgcgctttgttcgttaaaccctgatatcggtagacagcctgactatgccgatgaggtcatttacaaactgcgaggagtggttttagaagcccgccataccggcttggtaaaggccaacgaaaacttccaggaatggttgatggccgacaaaaccttgccttttggcgagaatggagaccatatcaccatcaatctgattgattttgacaatatagaaaacaaccactttgtggtggcgcagcaggttcactatatcgcggccactgaagtctattttgatattgttctttatgtgaacggcataccattggtagtaggcgaagttaaaaccgcaacgcgtcccagcgtgacctggcaagacggcgccgccgacttcatgggcggcaaaaagtactactggaaaaacgttgaatctttctttgtacctaacttgctgtgttttgccagcgaaggaaaaacctttgcttatggtgccattaatgcccgagttaaagactgggggccctggcataatactgagcttcgtgatgagattctgccgggattggcatcggtactcaacagctgcgagagtttgttaaatccacagaccttaatgcaattactggaatcttttgcattattttcaaccgtcaaaacgggcaaaaatactccacctaaacgcgttaaaatcctgccgcgttatccgcaatttgaagcagcaaaacaaatcgttgagcgtgttcgtagaggctatccaaagaaaggtctgatttggcatttccagggatcgggcaaatccttgctgatgctttacgctgctaaaatgctgcgtgccgacaatgcgttaaaaaacccaacggtactcatcgtagtggaccggcgagatctggacagccaaattaacgaaacctttggtggagccgacgttaagaatctgattaaagtgcaaagctgcaaaaagttgggcgaatacattgagcaagacagccgtggcattttgatcaccaccatatttaaatttaaagatatcgaaattgacgatagcaaccccaatggcctgaacaaccgtgacaacattatagtgttggttgacgaagctcaccgtacccaggaaggtgggttaggcgagaaaatgcgctgggcgttgcccaatgcccacttctatggcctgactggcacaccgatttctggtattgatcgtaatacattcaagttgttcggtgccgaagaagatccgggtcgctatatgagccgctatagctataagcagtcgatccgggatggcgcgactaacccggtgaagttcgaacctaggttggctgaactccgagtggatcgtgatgctatcaacgaagaattcgagcaactggctaccgaaaacaacctggatgaagaagaaaaagcagcattgtccagacgcgccggcaagctggccatcatgctgaaatctccgagacgcatggctgcggtaagtaatgacattgttgagcattttaccagccatgttatgccgaaaaagatgaaaggcatggttgtggtatacgatcgcgaagcctgtgtgcagatgtattatttgctcggtgaaaagctcggttttgatgcagttgaagtggttatgaacgttgaccaggctccggttaaagctgaagagggtggtaaaaaagataagctcaacaaggactggctcaaatggcatgacgaactggagctacctgttaaacaagctgatttcgaacgctggcagcacattgatgcagaagagcaggcacaaaaggatctgattgaatgctttaaagatcctgtgcatccgttacagcttatcatcgttaccgccaagctgcttacgggctttgatgcaccaatttgctactgcatgtaccttgataagcctctacgcgatcatactcttcttcaggccatgtgccgaaccaaccggttgtatgaaaccgatgatgcacgaaaagacatgggattaattatcgactacctcggcgttttcgaaaatctgcgtaccgctctggcctacaaccctgaagaaattgaaggggttgtagagggaatcgaggcatttaaagagctattgccgttacaactgaataaatgtctggccttcttccctggtgtggatcgttccatagaaggttttgaaggtattatggctgcgcaagaatgtttgccaactaacgagaagcgtgatgaattcgctgccagctttggagtgttatctaagttatggtcagctatcaatccagatccttttttaaccccttatcgtcaggactacaaatggctggcgcaaatttatgaatcggtgcgtccggtggggcagacaggtgcgcttgtttgggctgcgcttggtcctgaaaccatcaaaatgatccatgagcatactgatatcaatcgtattcgcgatgatattgacgagttgatcatggatgagcacgcaatttttaccctgaccgctaaagaacaggaacaacgcgccaagcgcctagagattgatcttatggggcgtttgcgcggcagtcatgaccctaaatttgtggcattgggcgagcgtttggaaaaactgcgtcaggactatgaagctggtgttatcaaggccatcgactggttgaaaggcctgttggatgctgcgaaagataccgtacaagccgagcgcgaaacgggcgagcgcccagtaactgaagctgataataaacaggcgttgaccaagcttttcttggaaacacgcccagaaactacccctaagttaatcggtgatgttgtagagcaaattgataaaatcgtcaaagccacacgctttgatggctggcaaaactccaacagtggcccgcgtgaaatccaaaaggcgcttttgttgaccttggcccagtttggactagggaaagataaagagttattccggaaagcgtatgggtatatagaagagcattactga

SEQ ID NO: 104502 - DNA, 240 bp, Enterobacter aerogenes
gtggttaacgcgggaattccgctgcgcaccaacggtcgctacgccatcatgcatgacaaagtcattattgttgataatcatacagttgaggctggtagctttaacttcagcaggtcggcggcacgcagtaactccgaaaatgttctggttatccgggattatccatcgctggccgatacctatctacagcactggcagtcccggtgggacactggaaccttctgggtgcccggatactga

SEQ ID NO: 104503 - DNA, 228 bp, Enterobacter aerogenes
atgcatacaacgctttttttgagtaaccggacccaggccgtgaggttgcctaaatcaatatcctttccggaaggcgtgaaacacgttgaagtcattgccgttggcagaagccggctcattacaccggccggagagtcctgggacagctggtttgatggtgaaggtgtcagcgctgactttatgaacgtcagggaacaacccacagaacaggaacgggaaggattctga

SEQ ID NO: 104504 - DNA, 399 bp, Enterobacter aerogenes
atgctgaaattcatgcttgataccaatatctgtattttcaccattaaaaataagcccgaacacgtcagggaacgcttcaacctcaacacgtccagaatgtgtatcagctccatcaccctgatggaactgatctatggtgcggaaaaaagccaggtaccggaacgtaatcttgccgtggtggagggttttgtctcccgcctggaggttctggactatgacgcgcaggcagcgatacatagcggccaaatccgagccgaacttgcccgcaagggaacgcctgtcggaccttacgaccagatgattgccgggcatgcccgtagccgcggactgatagttgtcacaaataaccttcgcgagtttgaacgtattccgggtatccgaacagaagactggtgctag

SEQ ID NO: 104505 - DNA, 1899 bp, Enterobacter aerogenes
atgaaaagagcaatactgatgccggtgctggccattgccaccacgatggcaagcgtgaatgtatttgccgatgctgacgcgcagtacagggcgggggctgattttgcccgtcaggtacaggggcaggggcaggggcaggggcagggggagagcagcctgaaaaactttaacccctcagcgtctatccccaactataccgcctcacccggtgagaaaaagtactatggcggcgtgacggcgaccggtgatggtgcgctgaaagcggacggtaccacgggctggaccactaatgaggccacaaaagccgtcaccgactcgtttgttaacaacccgaaggagcccatttcacccgatgcgccgtttattaaggccagccaggatgtccagtcccgcgccgataccatcatcggcaaaacggggcagacgcagtgcgaagcgcagaacatcagccgcagcgagttcaccaactatacctgtgagcgcgacctgctggttgagcaggcctgtacgcgcacggccagcattaccggccactacgaaaacaccacggtgacgcgcacctacacggtgcccaacagcgactttacctatacatacgacggcaacaagacggtgaacttcagcttccgtgcgcctgcaaccggtaccgtgctgagcgcgtcggttgccgtccattttaatgacaaaaatatgtactacggcttctcgtggtggggcgtaaatgcggattctgtggctaaaagggataacggatgggcgctgcccggtgccgcgggggctgcgctgaccgcaggacagtactctccacagggggcaatgctcaacaaaaactgcctgagcggtaaacaatcccgctgtcgggaatatgctcagaagacgctgtcctggatgcagggcggtacgcaggcctggatgaccgtcaccttgaccatgcaggtgacggacaaaaaatgggtgccggacgtagtctggaacgaatcctgcccgttcagcaagagcgaaggtacgctcaaaaagaccgaatgtattgagccggggagcacgaaaacggtggtggttgacggcgtgtcatacccggtcacgcaggcttgctggaagtacaaagacacgtatatgacccaggctgctgacaatggcacctgcaaaacctacatgaacaatccggcctgtacgcttgcttcacgcacctgcgctttcacggcagaagacggcagcggctgcctgcatgaatacgcgacgtactcctgtgaaacgcgtacttccggtcaggtgatgatatgcggcggcgacaccttctgtcttgatggtgactgtgagcgggcgcagaacggtaaaaacaacgattttgcacctgtcgtttcggcactcgccgcgctggccgctgcgggcaaggacgtggccgccattaacagcgttaacgtgcgcgcctttaccggcagcgcgaagttctgcaagaagtttgcggcaggattcagcaactgctgcaaggacggcggctggggccaggacgtcgggcttgccaggtgcagcagcgaggagaaagcactgggcaaggccaaagagaataagctcacggtcagtatcggtgagttctgttcaaaaaaagtgctcggcgtctgtctcgagaaaaagcgcagctactgtcagtttgactctaagctggctcagatagtgcagcagcagggacgtaacggtcagcttcacatcggctttggcaaggccagcagcccggactgtcgcggcatcacccagaccgagctgcagcaaattaattttgaagcgctcgacttctcgaactttttcgacgatctgcaaaagaacaagaaaatcccggataacgacaccctgacgaagcgcgtccgcgaggaaatcgccgcgcagctgaagaacaaacagtaa

SEQ ID NO: 104506 - DNA, 699 bp, Enterobacter aerogenes
atgcacccgcgcgatcctagagatctctcccaatcaagtcaatcattagatgatgttctaagtcattttaatggcctttataattcctcatcactacctttttgtattcgcgatcaatccagaaaagtaatttataaaaatgatgctttttccgacctctttcatccactttcgaaatcattttcaggtataagcttcgattctgacgaggttgaactcgaactatcatctattgaattagaggcatttgttatgggacctgaaacagcactatgtcgtacctttaactttaacggtgagttttatcaattgagagtcgaaatacgtttaattgatggggatctttatgctatatggcttataaattattttccagattaccaggcattattcaaggtaaacactaaggtactgaatgacagctttgatgtggacatttttctttctgaaatgacaacgaaaaaaatgattactttatgtttttctgttctcggatttcagcttcatactatgtcgaggtgccttggagtttctgaatctgcggttactaataggcttgctagtgttaaaaaagaaattagaaagcatttccctgattatgatgacttcagattcttttgtctgaagaatggtgtttatataagaatgacgtcagtagtacttaagatgcttaatgttaagtctttgttaataaaatag

SEQ ID NO: 104507 - DNA, 126 bp, Enterobacter aerogenes
atgaagctgcaggtaactggctaccgtggttacattattacgaacgaagtgcgtgtggctctggaaggtatcaagatcaactccatcctgtccgtcatcaagcgcatcaagaataaaagcgattaa

SEQ ID NO: 104508 - DNA, 459 bp, Enterobacter aerogenes
atgctttcagacatggagccaggggacgtcattttgatagaacaggtggaccggctatcccgcctggatgatgctggctggcagattctccgaaaagaaataacagataaacggttgtctgttgtcagtcttgatctccctaccagccatatggccctgaccaacgctgtcaatgatgacttcaccagaagtatgttgaaggccgttaatggcatgatgttggatatgctcgccgctattgcccgaaaagattacgaagaccgtcgacgtcgtcagtcagagggtatcagtaaggcgaaagctgaaggaaaataccggggcagggtggccgatgcgcagaaacatgaactgatacgcactctgcgcctggtcaacggtaaatctctgcgtgaaaccgcccgcctggctggcgtatccaaaatgactgttgtccgcgtctgcaacaacgctaaagagtag

SEQ ID NO: 104509 - DNA, 1710 bp, Enterobacter aerogenes
atgcctaatataactttagaaaaaaatgattatcttgataatatacatgtcgaaaacaatccattatcgaattgtattggggagagaaaccacatttcattgctcaatataaatagtatttataatagtaccgaaagtttgaactcttctgactatgaatcaggccctgaattagaaacagtgcttgcgataggagaggaaattcaaaatcaagtttctttactaaactctccacaaaatgaaatggcaacctcaagtaatcggcttaaggggcggggatggaaaactaagacagtttgtactttaggtttgctaagtgcaagcattctagcagggaaaacattatatggaagtaggaataataaaactatgcagccacatagcttcgaaaaccaaagagacctgaattttcctcaggcgctcccatctacgatgcaaaaaaatgaatcattagctggtagtgtaaatgccaccaaccaatatttatcgctaaataaggaaaaaattttatcctctatatctcccagttttactattaacttaacaggagccgtgcctacaggtattaaaaccgcaacctccagcggaggaggcttctataaacttggtgataaaaaatattttgtaaaacctggagtcgctcatatacctttgactccagagaaacaagcgtattttgccttatctgaagttgccagtaattcagttactcgtttacttgctacaggtaccgagggggcaccaaaatcttttgttggggaaatttctggtattccttatattgcaactgaagcaattgattataatgatataggaaattttttcagaaaagagtctataataaatgagtttgcaagatctcacccagaaatgaagcaagaagatgttataaaattaaaagaaaatgctcttaaaatatctgatcattataacagaatgagaaatttagaaaaaagcaaactgagtgactggtggaaaacgaaggagcaaaaatttatcaatgattatcgtgctgaagcacaacctcatcgcgatttaataatcgaaggtttgaaaatgttacctattgaattccagaaagcggttcaggaacatataattattgggcagattgttggggattgggattttttaaatgaacgatttgaaaatattgggatttctaaaaatacggatggccaatatagggtggctagtctagaccgtggaatctcatttggtgttggtttttgggggagttcaaaaccagaaggttataatttagcagtcagtcagcgcccccccgcctttttacctctaaatactacttttactcaagaaaaatctttatttggtagttatcttcctgagttagggaaggatttctcatttattccttatgccgatgttgcgaaactcgcatcaggaaatactgagtggattgccgaaaatataaataagattgcttatagaatcactatcatcaatgagcaaagtcttataagtaaaatattgaatgatacattagttgacccttctaaggcaggcctagagggtcatcattttttggataaggaacagactaaaagaattatggaagccagattaagtgatgttattcgacaggctggcggatatgacgaggtagtactttgggcgcagcagaatcctgctaaagctgcgaagattagggaagaggtaaacggtgttcggcaatctctcggatattaa

SEQ ID NO: 104510 - DNA, 126 bp, Enterobacter aerogenes
atgagaggccttattgttgttgcgccaattggtgactttgaacttctgctttgccacggaaaggcctgtattgtcaggatgatttgtgatctgatccttcaactcagcaaaatttcgatttattaa

SEQ ID NO: 104511 - DNA, 171 bp, Enterobacter aerogenes
atggtatgtcatattttttataagccaactataatctgttgcccgtttccggcgcgtattgatcccactcagccgctggtccgccacctcacggtcgtggtttgcatactaaccggatcagtaacctgcacccttccggccggtataaacgcgctgattttcttacactga

SEQ ID NO: 104512 - DNA, 798 bp, Enterobacter aerogenes
atgaaaaaaaaatcagtgagtgaaggaaggatttactttctagattttactttcaatccatttgtaaggacattacaacaaaatgagaaggtaatacaactacgtaagaaacagtctgatgttctcactcttctttgcaagaaatatcccgatccagtttcgcaagatgaatttctgatggaagtttgggagggtggatatgttacctcgcaaagcattgcacaaatgattcgttcactgcggataatcttgggagacgaatcaaaaagtactattgtgaccattccaaaactggggtatcagtttaccgtcgaacctgtttgggaagccttgcaatcagaaccaaaattacctgttgatgatgttgatgatgttgatgatgttgatgatgttgatgatgttgaggattcattggcaaaagaagttgagttgaataatattcctttctcaacgccgtctgcttttatgctcaaaccacctagtctcatgaggacagccataacctctcactctaaagctggtttgtcggtcggagggcgttttccacccaaaatgtggtttttcagtgcggtggcagttcttttttgtagcttgtattttatgacgatgagtgccaaaagcgaccctttacctcttcctgaggagacaaatactcttttttaccatcacaaaatggattcagcatcaattttggatgagttctttttatatttttgtcgccatacggtgggaagcattgtttgtcggaacaaggtatttgcattagcgacctgtattggcaaagattttaataaataa

SEQ ID NO: 104513 - DNA, 510 bp, Enterobacter aerogenes
atgcagatgaaaattatcaaaaaagcagctatagcgctcattatctctctcccccccataactacggcgatgtctgctgactgtatcaccgacgccgcacaatgcttccagataaatcctttagtgatcaaagcgattatttggcaagagtccagaaatcagcagcaaaccatcaatatcaataaaaacaaaacggtagacataggggttatgcaaatcaataccgtgcattttaaatcactcaaggcgcatggtattgatgaagaactattacgcgaaaatagttgtgccaacgttttctccggcacatggatcctcaagaaaagtattgagcgctacggttatacatggacgggtattggtaactatcattcacatacccccctccatcacgacaaatatatcagggaaataatcgctctgattgcttaccattcgtcgacactcaataaggttgaggtagcacgcaaggaaggtatacgagagcaattcctttgctctcaatactaa

SEQ ID NO: 104514 - DNA, 330 bp, Enterobacter aerogenes
atgacctatccgcgtccgcaaacggcaccggacagcaacccagcggagttgaactttaatgacaaagtcctcctttatattcaacagcatcagccgcaaggttcgcttaacgagttgctacaacaaatgcgcgcattatcaccagatgaaaaattatcgatgcatcagcttaataatgcgttattgagcgcagatgctcagatgagaaaggatgataactacagtgattacaccgacagcatactggataaattaactacccgattagttggggtaaatatgttatttaatgacatgatgaataataacttttctcaaacaaatgattag

SEQ ID NO: 104515 - DNA, 750 bp, Enterobacter aerogenes
atgcgaaccattactattaatgaattaccggaagatttacaccgtaagatcgtgattaaatcctccgaacaaagccgctacaagcgattgtccgtcgcattggaacggaccttaaatcactgcagtgaaattcatgccgagtatgagtcgcaagcgatcagactgcgggaaagctgtgaaaggcaaggttttgaagcaggctttcagctattcttctcacagctcgtgaccctgatagataagtaccaacaatgtcagaatcagtatctgtcgcagtttcgtcagcacatttccgatgccctgaggcaatcgctgcatgacccgatgatcgttgagcggattatccatcacttgcaggaacattgcggacatcagaaagcactgcgcattatcattcccaccggcgttaatctaccagagggtgctgacagcaataactatcagtacaccaaagacaatcacattaccgtacagaatgacatggatgcggttcgcttccccagtgaattgttatgccaggagtggctacaacatgcccacgaagcgaccgcgccggttaataccattataaataaccttacccccaatactttacatgatattgccggtcagctcattgcgatgagcaaccagacacagaccagccccttaaaatccgaacaggaagataaccatgagcagtatcagcagcatgacctatccgcgtccgcaaacggcaccggacagcaacccagcggagttgaactttaa

SEQ ID NO: 104516 - DNA, 555 bp, Enterobacter aerogenes
atgagagccgatgatcagcgcatgatgggcattatgtatgcccccgcaagctacacgcatataagccatctgcataatgctttccgactaggtgaaattcatgacaaaacactgatcaatttctggttattaagatatggcaatctttgtaacctgcccgagatgtggcgatccaatgacgcgacactatggcaattgatcaccagttggtaccggatagcagacgcagcgcatttaattggcggctatttgctgcgaaatcaccttcctagacagagtgcgatactcatgtcagacccgcggttgctggcttttatctcactcccaatacgccattccatcactctcgatgatgccatgtccgcgctggatacagcatcctgcggagcggcattcattctaggactcttttccgacctgccacttgctttgcgccagagaatgcgactgctatttcctgctaatatgcagcgtgcaccattttcagcctctaaaacaccaaatcatatcaacctgttacgaatggccttaacctatgcgaaccattactattaa

SEQ ID NO: 104517 - DNA, 771 bp, Enterobacter aerogenes
atgatgaacaaatactctcgcacactggccatcgtgtttctgaccttgatgctcagtgcctgtaatgatgaaagcgtgctgtttaatctgacgcaggaacaggccaaccaggtattgacgattctgcaacagcataatgtagccgcaaagaaagaaggtacactcaaaacgggatacacagtgatggtggcagaatcggagagtacagccgcgctctctatcattaatcagtaccagcttccatgggcgccagacgttcaaatagcgcaggcctttccggaaggttcgctggttgcatcacctaacgccgagcaggcgcgcgttatttcacttcaggagcaacgactggagcagtcgctaagattgattgcacaggtggtgaatgcgcgagtacatgtgagttacccgccttttaataacgacactagcggtaaaaagccaataaatcatgtgagtatcatgatcacctataaaggagaggtcgacgacaacctgtttatttcgcagattaaatcattaatcaaaaacagctttgatgatgtacgttacgagaatatttctatagtgctgtttgctgcgccggaaattcagtatgtttcaccgaccaaagtgcccaatagtctcaccaccttgtgggtccttattttttcagcgctggcgctatgtgtaacggcaacggctggttatatgctgtatcagttcaagcatcaaccaccaaaaaagaccgtgacaacgacacaaaaaaatgatgatgaggtcatcgaatcatga

SEQ ID NO: 104518 - DNA, 324 bp, Enterobacter aerogenes
atgagccagaccattgaagcgttgtcatcactgacaaaaatcataccaaccagtacgcctcccgaagaaaaattcgcgctcacagtgcatgatcaaaattttaataatctggtttccagtacgtttaataaaattagcgaaactgataaccagttaaaaaacgtgattaatactctcagccagtcacccctgttcaccagcgatccacaaaaattattgacgctacaaagctacctcggtgagtactgcaattatgtttctctagttagtacgctagcacgtaagggtgttagcaccattgaaacactggaaaaatcacaataa

SEQ ID NO: 104519 - DNA, 264 bp, Enterobacter aerogenes
atgtttaaccaaaatgactaccttacatatgataacaattactatctagataaagtatccggagcctttgaggacggggcagttacaatgatggatgagctaaaaaaagcggaagaagcattaacaaaggatccgtcagacccctccgttctggctaattatcaggcgaaattacaggaatatacacttttccgtaatgcccagactagcaccgtcaaagcctataaagatattggtgccgcgattattcaaaacttccgttga

SEQ ID NO: 104520 - DNA, 1275 bp, Enterobacter aerogenes
atgaacagcgacacccacgaagtaactgattcaatgccagttgctatgcaacaaaagcagtatacgttgaaagtgctatttggccccatgtttggctgtgagttacacttgcctgcaaatgattatttcttaatcataaacccaggacctgagttacaggatagccgcacagagcatgatgccgataatcatgctgcagcctatacacataatacgctgtatctgccctgcaatacaccatcacctaatatcatattacgtctgtcttcctctgtagaagaagaaggcggaatctgtccaggctatcgtatcgatattctggatgaagtagaaaattactcttcgatattgagtgaaaatgaagtttttactcatcagcatatacgtttcgctatcaaacgtagtgaatccgactggtcggaatatatcaagaactttgtcattgctcccacgctggatatcggatttagtcatacggaaaccctctatgggtttaactatcgtaaaaatgctgctttgattataggttcactaattctgatttttttgatgataatcgcgggaattatttggtataaaaagacagagagagaacaacaagtattaagcttaaatgaagtacttatcggtgtacccacccctgtaaagataatccgtagccgtgataaaaaaatgatctatgtgttagcaaatcaatatcaggcaatggagtgggcacaggaagcaattttcaaaattcaaggcattaacaatgtgcggcccatttggttgccgaaactgaagaaagagataattaatcaattgggcaatgcgggttatcctgtattacaaatcgattacaccataccgcagcacccggtccttgctttgtgggagaatttgtcaagtcagcaacaacaagcattgcgttccatggcgttgaaaaaaattccctttgccattgatataaagatggtggttagaactaaaaaccaacttttacaagatgcccgccatggattagatcggttgcatatttattataggcaaattgacaccgccactggttatgctctggtagttcgtgatgcactcagtgatactactctcgctgcactcaataaatttattaaaaattttaaccagcaatggggagaacaagttattaacttttccattaacctaaatgaaaactggttacaaaacaaatcatacgttgattcatcaaatggatatttgtttttaaaccctcgtcactggtacttttcaattaaacacggagacaaaaatgtttaa

SEQ ID NO: 104521 - DNA, 789 bp, Enterobacter aerogenes
atgacggcaaaaatgaacagtaaagttagctatctgaataacgggcttttatttgcaagaccgttgcatgacaatgctgtaatggccttttcgactgttggtgttgaaaataaataccacatagaaaaagaaggtatccgagatcaggttatcttaatctcgcttgataaaattgaattgcgttttaatggtgagtggttctttgaaacggtgacgatgtcacaagcaacgacattattctcttttctggactttcagaccaaatctcgggaggaatctgttagtaaatcgaatggtgaagctcattcggttatcctgcaaacaggacgtagcttggcaatgattcctgctcaggacaagaaaacattcattgggacccttatctcctcaatgcttaatccacagaaatgtcagttagaacaccttttttcgtttgtcagaaacgtggaaagttattggatttcctcttttttgttatcgcaggttatgaatgaagacaaagatgctgatacccagaaaatatataatgccagtaaactttatggcgtttccgaatcttactttaggaagttatgtcatcacgcatttacccgtgggccgaagaaacaactccgcctgtggcgagcggcttatagcgcgctacaactaatagagaatgataattcgattgcgatggtggccggtgacaacggttacgcatcctcatcccatttttcgactgaaataaaatcgttatttggcatgacacctagagagtttaagaaattggaaggcttgcttcatgaataa

SEQ ID NO: 104522 - DNA, 1776 bp, Enterobacter aerogenes
atgaataatatcgtaatgaacttgcggaattgtccgctgtgttgtttgcttttaggggcgttaacctgcatgccagcgaaagcggcgttactggataaacaggatatgcgtaatacatcaggcttgacgcagacgtcatcatttgatagcgaaaatatttatgtcgccagtaacaacagtgtccagcagtttttttttgttatcggcggtgcgttgcataaaccttttattgtcagcaccgaagcagcaaaaaaaaaggtgtctggcaattttgacctcactaagccaaaagagctctttaatacgttggctgcgcgtaccggacttatctggtatgacgacggtagttcagtatatgtatacgactccagtgaattgcaaagcagagtcgtacgtctggcctacgcaccttttgatcgactgctagcctatctgcgctcttcagatctatatgactcacgttttcctctgcgctcagatggtcactctggctcattttacgtttccgggccgccggtttacgttgaactggttgcggccgcggcaaagtatattgatgcaacctacgcacatcctggtaccggtgaaagcaccatccgggttatcaaacttaagaatacttttgttaatgatcgcatttatacccagcgtgatacgccgttaaccgttccgggagtcgccacggttctgaaccagttactcaatgatggcagtaataagagtggtggacgttcaactccctctggggcgacgatcagtatcgataatgatactcgcggcgcgctgatggctgcctctgcgatgcagaaaggtaattttccgccactgcccgcctttaatgtaaggtcaacggcagaacatccgagtttccatgacgatcccgggcaacagggcattaatattgttggctattcggataccaatagtttgcttattcagggtgctgagcggcaggtcagttttgttgaagatctggtgagtgcgattgatattcctaaacatcagattcaactctctttgtggattattgatatctcaaaggatgatattaacgaactgggtattcgttggcagggagctggtaaatttggtaatactggcgtgacttttaataccagttcactgacgccggaaaacagtctccactttctagcggatgtctctgcgcttgcgaaaagaggaaatgcacaagtggtatcacgtccggaaattttgactcaagaaaatgtaccggcgctatttgataacaacagcagtttctatgccaagttagtcggtgagcgtacctcatcgctggagaaaattacctacggcacaatgataagtgtgttaccgcgtctggcgcagcgtcatcaggaaattgaaatgatccttaatattcaggatggcggattgccattaaatgctagcggtgaagtggaaaatgtcgatagcctgccgatggtgaataacacccagatcagcactgaagcgcgagtgccggtgggttatagcttgctcgttggtggatatagtcgcgatcaggatgaacaccacagcattggcattcccttgctgcgcgacattcccttcctcggcaagttatttgattacagctacaccaaccacaaaaaaatggtacgcatgtttcttattcaaccgagattactcaatagtggtgaaacctggcaggggcgtgatgagcgaaatcccgttctgggccgtaccctgagtggtgacaacgtgacgctgaaatctaccgtttcgatgttacgggatacgatgaagagacactaa

SEQ ID NO: 104523 - DNA, 1116 bp, Enterobacter aerogenes
atggatattcgttctgttattggtatagacttcaatcgcattaatgcctccatgcgggaaatccgtaccggtattcaacctgtcgaagatcaggctgaaaatcctcctgttctaaatttgcaggaagagttaagtagcgccgctgaagagatggcggatattctcagcgcgttcgggcgctttagtaaggctgggcgaaaaaatgacagtgcggataacgactttttttcctcaatgcttgaggatcaaggtgatgaaaagctgaattcattgatacgtcaggtagcaaaacttcacgatctgaataatctgctcaattttgcccgacagcttttccctaacgacagcgatttaatgctagcgctgcgtgaaatgctactgagtcgtaaactttcagagttacagaaaaagaaaattaaagaatcgatcgctgatctggagaaatttggcgatcggaaaaaaatgcagtctggtatcaatgttgggcatcttgctaaacgttttagtgaacacggtggcaagtcgctttcggcgcaggatctacgtaacagctatctcaattttctggagctggatataccggcaggttttatttataaagactgggttgacgtttacggctatgagaaccgcacgcggttattggcttttacactgtcggcgttagtagcggatatgaaagctaatgagccggggatccatacctcggaatttggcccgcttagtgccaaactgtcagatgctcgcgtgctgcacacattggatttgctacttaatgatattttttctcaattaaattttcgtgaacaattgcgcaataaccaaatcatgttcactgagggcgatattattactctgtatataacagggttaattgacacggatggattcaagcaagtatttaaacgctttagccaggagtttatggcatcgttgcttatcaagcagcgagcttccgttattcagatgttgaaaaatatttaccaccaaacacctgtttttctctttgctgatgcattttatcgtgatggtattctgagttatctctctgtattgctgagcaaaatacatgaaaaagagaggaataccggaatctggaatgaatattataaataa

SEQ ID NO: 104524 - DNA, 2052 bp, Enterobacter aerogenes
atgattgaacaatttattctgaaagttcgcagccgacctgaacttattatcttgtctataatggtgttggtcgttgtgatgttgatcattccattacctacgtatctggtcgattttctaatcggcttaaatctgacgatggcattattaatttttttgggctcgttctatatttcacgagtgctggaattttcgaccttcccgtcgatattactaattagtactatttttcgtttagctatctccatcagtaccagtcgcttggttttgacggatgcggatgccggggagattattgccagctttggtgagtttgttattgccgataacttggtggtgggttttgttatcttcttcatcgtcaccatcgtgcagttcattgtgatcaccaaaggctctgaacgtatcgccgaggtcgcggcgcgcttctcactcgatgccatgccgggtaaacagatgagcattgatgctgatctgaaagcaggggttattgatgaaaaagaggtgaaacggcgtcgaagcgacctggaagctgaaagtcaattgtacggtgcgcttgatggtgcaatgaaatttattaaaggcgatgcgattgccgggattattattatctttgtcaacctgcttggcgggatttctgttggtgtatttcagcatggtatggacgtatcccatgcgatgtcggtatttacgctactgactattggtgatgcgttggtggcgcagatacctgcacttttgatctcgataagcggtggccttatcgtgacccgggtgaataacagtgagaatgataaccttggtgctagaattctacaggatatgttttccaataaatttattctggtgatcacggcgattttggctattgccttgggaatgctaccgggtttcccgttagctgtatttgttctactggctgctcttttactgggtgtttttattaaagataaaattgataaaaaacggggtaaaaacccggttaccgagattgaagatactgacgaacagtcggtgctaaaaagcaagccgatgatgattgatggcgagtatatccctgaaaccatcccacttattattactgcgtggaaaggttatgaaagttttttccatgagcataatttctcatcactgctcaagcgtaacttttttattgaatatggtgtacgcctgccggatgtggtcatgaactatgatccgcaaacagagcggggaaaactgacggtcgcgattaacgaaattcaggtcgcggtatatgacatcttacccggcatgtgcaaagtactgatgcgcggtgatgaattacaggcgattgataacagcgtccaggtagttgaaactgcacaggggagggcttactggataccggaaacgagtagtgcaactgcactggccctgggattctattcgcggacggccattgatgagttttacgcctgtgtctcgactttgctggtacataatattcccgaattcttcggtattcaggaagcgaaaacgttgcttgatgaccttgagaaaaaatatccagagttactgaaagaatgctatcgaaataatactgttcaacgtattaccgaagtcttccagaggttacttcaggaacgtatttcaattcgtaatatgcgtttgattctggaagcattagtgcaatgggctccgaaggaaaaagatcctatcatgctggtggagcatgtacgcggcgttttatcccgctatatctctaatcgtttcgcggcgaatgggcgaatccgcacgctggtcatgtcacatgaaatggagaatcttgtgcgtggtggtattcgtcagacctctggcggtacattcattaacctgccaccaccagatactgaaagtattattaaatgtcttgatggctgtattagcaaaaatggcgtcaatgctcgtgacattattttaatggtttcattggatattcgccgttttgtgaaaaaaatagttgaaggtagttatccagaaatggaagtgctttcttatggcgacgttgcttccggtgtggatgttgatgtcattggttcgttagaaaattaa

SEQ ID NO: 104525 - DNA, 408 bp, Enterobacter aerogenes
atgaaatacgatattgtcgcactgctttcctccatgctaaatgaggctggaatcaatgatattatggacagcgatctcagtaaccattctactatttctctttcgatgaaagaagagatccccgcgattcatattcgtgatgagaataatgaagtatggatatggtcgcctgttttagaaaatgcaccggcgtcgctggcgtattgtagtgccaatttgctccctctgatgatgacctataacgaagaatatttttatgcaggtcagccttgcctctatcccgtagatggaagtattgaactgcgtgcccagataaaagataagcatctgcaaaactcagatgcctttttatcacttctggatcactacctgactgtcctgcaggactatcgttccgtgctcgtttaa

SEQ ID NO: 104526 - DNA, 1296 bp, Enterobacter aerogenes
atggttgcgcaatgcctggtccatctcgcacatcctctacgcattcagggcaacgtaattgaagcccatctgccggggacacgaatcggtgagatttgtgagattcaaaaatcactactggagcccgaggtggtgggttttgctcaggttatcggttttaacaaggagcatacgctgctcagtttgctgaatgacaaccagggattttcccgccgcaatgtcctgctacctaccggccagccttttcggatcccggttcatgaaaacattgcgggggccattattgatgccacagggaatgttcgcgggcggctggacaacttttccgcgcaaccggtaatcggttgtatgaacctcgaagctagcggctcgccgcgtgattttactcagcgtaagccaataaccgacgcattgtcgacaggggtgcgggctattgacggtctcctcacgtgcgggcaagggcagcgtatggggatattcgcggcggcgggctgtggtaagacatcgttaatgagcatgatcattgagcactcagaggcagatatttacgtcattggccttattggcgagcgtggtcgtgaagttactgaatttgtggaagaacttagaaagtcatccaggcgctcgcaggtcattttggtgtatgccacctctgaccgttcatgcgttgagcggtgtaatgcggcacaaatcgccaccaccattgctgagtttttcagtgctcagggcaaaaacgtcctgctgtttattgattcgataacccgttatgcaagggctctgcgtgatgtggcgctaagtatgggagaactgcccgcccgccggggctatcccgcatcggtctttgaagcgttaccgaaacttctggaacgacccgggcgttttttgacggggtcgattacagcgttctatacggtacttatcgaaaatgaagaagaatcggatgtgattggtgatgaggttcgctccattctcgatgggcatatttacctgagtaaaaagctcgccgcgaaaggtcactacccggcaattgatgttatgcagagcattagccgcgtatttttgcaggtcaccagcccggagcatcaacagttggcgacactctttcgtgattatctggttcgccagaaagagatgcagttgtttttggatcttggcgaatatcgccggggggagaatccagataacgataccgcgttcgatcataaaaatcagatggaggcgtttctccaacaaagtatgacggaaaaaacggatatgcaggcttgtctggaaaaactatatggaagcgtggcgtaa

SEQ ID NO: 104527 - DNA, 462 bp, Enterobacter aerogenes
atggaagcgtggcgtaaaggacgtgaatttgtacgcatgctggatcgcaagcagcatttcttacagggcgatattgttaaaactgaaagccgactggctcaggtcaggttgcaaattatgtctcaccagcaggaggtgacggatattaatcaacagataaaaatgttaacacctgcgggtgttgtcagtcgcgaagatatttataaagggattagacagcaaggcgcattattaacacatcagaatattgtatttcacaaaataagccagctggagaatgagcaatacaatctggaaaatacgcttgaggaacagcgtgccgcactgagtgtgctggataaaaaacactataagattacttattatttacagccgctgcgccgcgattatttacgtcgctgcgatgatgctgccgaaaatgaaattcaggagattgcgggctatggtagaaaaaatatctga

SEQ ID NO: 104528 - DNA, 1074 bp, Enterobacter aerogenes
atggtagaaaaaatatctgaggcacgagtcagcgctttgacaaatatcgacttagtcacggacgaacgaacgttgcgggaacaggttgataaaaagaaaaaacaggaaaagaaccgtggtaatgacgtaccagatagcttgtcgactcaggcgttactagcccgtctgatgacggctcaggttatcggtggagggggagacgcgacagaactaacggctgcgaaatcgcttgccactcttctcgttgaccccgatacccaccctatgatgtctgataaaggtgatactttgcgccagctcgtggtgcaggcgttatcgcgccagcaagccgtgatgcaaggtagctctgtacaaaatgccacgattcagaaaatcaatgagcaaaacctgtcggaacaaataaaaacagggggggaggggctaaagtcggctctggttggcgcgtcaactgacccaatggcttctgataaatctcaggctgctggggcaatgttgctgtcgtcacgacgcattgccagacatcaagttagtgcaacaaccattaccagttctgcgcaggagaaagctgtgcgtatgcaagaggtgaagttgccgcatcctgacaacatgtcacaggcgttaacgctgacacccgcgcacagtgaggagagacatcctacccaaattgaggtgaagacgccgcttccaggcaatatggcacagatgttaacgctgacgccttcgcacagtaaggagcatcaatcaccccaaatcctaacgcagcagctaaaagcccaggccagcgtagcccttcctgcagcccagtctggtgcagagtcacaaacgctggaggtgaattatgctttccagcgctggtctggtgaccattcagtcaagatctcggtacccgcgcaagtctcgcgtgacaccagtattacgttgttgccctccgatccccgtgcctctgaggccttgtcgcgtcagatggggcatctgacaggattaatggccgatcttctgccgccacagcgggagcgggaagaacaacaacaaaaacagcaacagcaacaaccgcaggatgaggatcaggaatga

SEQ ID NO: 104529 - DNA, 927 bp, Enterobacter aerogenes
atgagtttacgaggccatctgcgtcagagtgatccccgccagcaggcgttggtgcagcttcgtaaccagcatcctggcagtgagataatgccagtgtcccctgacattcgttatctgacgctaacgctacaggacggacacgacaacccggcgcaggctctgctcaatgtggatagctggctggagacaatgaatcttcatcttcctgagatcccctggcaggaggtgcctctaagctacttggcgcattggttaaaccggcttcaactgagttttttggttgaggataaggtctggaatgcagcgcaggttgccgtcagtgcgccatctttgccggaacttgcgctttcgttaccggctgaacccacatcactgttgtgcgtggattggccagatgacggagtagacggcccacacccacaggccattactgccacccattttccttttcagatgaagatagttctgggttatagccagataaatttggcgcagttagtcgatgtcgctgtgggcgatttattactgattaaagacgtatttacccatctggtcgtcggccagcgacgcctttatcgattgagttattacctaaaccaggaggttattgtggaagaacagctcactgcacatgatgaaatgtaccggaacgatgatgaaccgctgcacgactgggctaatttagcggtcgaaatagaatttgtgctggacgggaaaaccgtaacgctggcagatctggatacgctcagacccggtacaacactggcactgaacccgcaggcagagcagcagattaaaatctacctcaataaaatgcttttcgctcgtggtgagctggttgcactggaaagtgggacgctggccgtcgaggttaatcatattaaccctggtcttatcggtgatatggaaacccccgatgctgagtaa

SEQ ID NO: 104530 - DNA, 672 bp, Enterobacter aerogenes
atgctgagtaacgatctctctttaattgcgattttgtcattttttacgcttctgccttttattattgctggaggtacctgctttattaaattttctatcgtgcttgttatggtacgtaatgctttaggcattcaacaggttccctctacattaacattgaacggtattgcactcattctaagtgcattcgttatgatgcctgtgtgccagaggatctccagttatattgagtctaaccaaattgacttcaataatagcagctcggttactcaactgatggaacaggggttagtcagctatcgtgattatttagtccgttattctgaccacgatctgattcttttctttaataaagtacaacagcagcgaagcggtgagcctgagacagttgttgaagaacatgaattgagtgcgttgccgttgataaccttgatgcccgcttatgcattaagcgaaatccagagcgcatttaaaattgcattttacctctatgttccttttgttgtgatcgacatggtggtctctagcatcttattggcgctggggatgatgatgatgagcccggtgacgatctctattcccatcaagctcattctgtttgtctcaatgaatggctggagtttattaactaaaggacttatctcccagtatgccgagctgatgacatcatga

SEQ ID NO: 104531 - DNA, 255 bp, Enterobacter aerogenes
atgaataatgtactttttattggtaactctgcattgatactggtgttgaaactgacggctgtccccgttgcgtttgccaccatcgtcggcattattgtcggcctgtttcagacggtcatgcaaatacaggaacaaacgctgccttttggcctgaaaatgctggcggtattcgccagcatttttatgttaattgaatggttctctgctgaaatgatgaattttgcgacccaggctttctatatggcttttcgctaa

SEQ ID NO: 104532 - DNA, 765 bp, Enterobacter aerogenes
atgctgtttgttgccctttatctcaatttccagcacagcgtgctgacgtttgtcatggtatatgcacgtctggcaattgtattttatatgttgccagtgctgggggagcggactttatcaaatttaattatcaaaaataccattatttctctgaccattattggcctgtggccctgttttgaaactgtgctgatgccggagcagggatggttttttgttctggtcaaagaatttgttgtggggttaattctggcagtgacgctttgtattcctttttgggcggtgattgggctcggagaaatactggataaccagcggggggccaccattagcgacagtattgacccggtaaatggtgtgcagagttcgatcttgtctggttttcttaattttgcctttggggctctttttttttcaagcggcggcatgatgcgattgatagaggtgatggcactgagctatgagatgttacctcgcggaagtgaactgcacgacgttcattgggagatggcagggcaactggttcagactctgatgcaaaacagcattctgctggcagctccagtcatgctggtgttgatgattgcggaaatgctgttaggtgtctttgcgcgttattgcccgcaacttaacccgttttctctgtcgctaacggtaaaaagtaccctcgcttttgctgttttcctgttctacggttttcagtcattaacggaaaaaccactgcacttattttccctttcggcttttcggcagttaatttcctga

SEQ ID NO: 104533 - DNA, 1077 bp, Enterobacter aerogenes
atggcggagaaaacagagcaacccaccagtaaacgtcgtagggattcggcgaagaaagggcagaccttcaagagtaaggatctgatcaccacccttattttattagccggtatttacttcatggctcatgccatgagctttcgaaatttcatcgaattttatacgatgatcctgcggtataacactcagataagcattaatgattttttgctggggctagtacgtattttctttttattggcactgccatttatagcggtatgtgtgctggtcgggatggctggaaccttgtttcagacacagttttccctggcaacagaagccatcaagctgaatttcaaggcgcttaacccggtggaaggggtgaagaaaatattcagtatgcgcacggtgaaagaattggtgaagtccttgtgctatctgattgtttttgcaggaacatgttacagccttgctcacaacgatctacatcaggcactgactctttatcgtacggacatggctggcctcattacgtgctgggtgtcattggcattaaaagccgtactggtttttattggctggtctgtgtttgttctgttggccgatcttctggtggaatattttctacattttaaagatctgaaaatggataaacacgaggttaaacaggagcgtaaagagaacgacggtaaccctcaaattaaaagcgcacggcggcgtgctcatcaagagctcctatctggtgaagagatggcggcggtgagaagctcggaagtggtaatggctaacccgacacacattgcaatggctatctattttaatcctgaggtcgctgcgctcccgtttgttgccctgcgctgtaccaaccaaaaagcgaaagcagtgattgcttacgccgagaaaattggtattcctgttgtgcgtaatatcccgctgacccgccggctttaccacacttatacccagtttagttttatctcaataaatgatgatgtgcttatggacgtcatggaagtgctgatctggctgcgtcaggttgaagcggcgggtatcacgcaaaccgaccccgtggacgacgacccccggcaactctga

SEQ ID NO: 104534 - DNA, 537 bp, Enterobacter aerogenes
atggcaaataaaaacatgctgaattttctcgacgacagcgaagaaattataagtaatgaaaaacttgaggtttattctgaaggtttattggatgccattcagaatggcgcaacgttaaaggatgtgtatggtgtctctggtgacactatgcaggatgtttataaactggcatatgatttttatcatcacggtaaattaaatgatgctgagtctttgtttcgttttctctgtatttatgatttttacaatcctgaatacgccatggggttggcggcggtatatcaactgaaaaaaaattatgcaaaggcaatcgaattttatgcgttagcgtattccttatcaaaagatgattatcggccaatgttttatgccgggcagtgcaacctgatgcttcgtcagggggcacaggcgaagaagtgttttgaaatagtgtgtgaacggtgtggtgatgaggtcttaatcgaaaaagcaaaagcatacctttctgcgctaaataaactaaagcgcgataaaactcagccacctgaaaaagaataa

SEQ ID NO: 104535 - DNA, 2019 bp, Enterobacter aerogenes
atgaatatgcggatagatagtctggatgtcgttaaccaccaccaggccggggttgaagttggtaatacggaattaaaaagacattccgaccaggctaaacgtcttggaaatgatggtttcaaaaagcacccacagctaaatggagttaaaggcgcggtccaatcactacagccggaccagctgttgaaggtgcttaaaaatacgcatcaggcccttcacggaaagggaggcgaggcgcaggtaagcagtcaggatattccaatgcttaaggcccctcaggaaagtcgttcatcgcagtctgctagccgtgatcctaaattatctgcttccgccacgatgacggcattactggggaaaattagccagctttcagcagattcgtcgctcacgaacctgatatcacaactggaggtgttcaatgccatgatgtctggagcaggagaagcctattcgtctttagcaaatcagttagagcagcaagggaaagcatgggccagtgatgccgatgcattaaaagacgcgcaacaaaagtcagatgcgctttcggatgacgttaacaaggcgcaatcgacgctggatgacgctcagaagacactgtcggctttggaagctgaggcggcgaaacagaatcccgtttctgctgaactgcaaaaaaagattgatgaagcaaaagtggtcgtggcgggggcgcaggcgagcctgactcaggcaaccaaaacgtttaacgattttaacgacaaaactctcaatccggcgattgctgccgagaaaaactcccggacggagctggattcgacacaatcacagtctaaaggcttagttgacagtctgtcatcgcaacagaataacgccattgaacagttgcgaaagcaaagtgatgctgagtcgaagtccctgacgttcctgatggctctgatggcacaactgattgataagagttccagtgatgagctctcggcgacggctgagctgaagcagcaactggcagaagcctccgcgaaagatgcggagaaaaaggcgaaagaatacgaagaggaagtgcgtaaatcagaagagatgcagaagacgatgggctgcatcggcaaaattctgggctggctgattaccgcagtcagttttgtttcggccgtcttcaccggtggggcatcgttggcgcttgctgccgtggggctggcactggcagtgggtgatgaaattaaccaggccgtgaccgggaagtcatttatggctgatgccatgcagccgttgatggatgctatcgtgaagccattgatggagctgctgggcaaaatgttctctgcaatcctggaaggacttggtgttgataaagagactgctgccatggtcggccagatcctcggcgcgattgccgctgccgctgcgctggtggttgccgtcgtggttgctggcagtgtgatgagtaaggtttttggtgtcatcatgaaaaaaattggtatggatgtcgccgaagaagcgggcaaaaacttgggtaagagtgtcgccgtagaagttgaaaaagaggtggtacaggatgttactcaaaacgtgttacgcactgttgtgaaaggagtggcgaaagatgttgccgaagaagcggcggaaaccactaccaagaacactatgcaacggttaatggatagtgcagtagggcagatgctcaaacgcctaagccatgggattggtcgttccgcaggtatggatgagctcaaaatggcgaagatttctaaccgcacccaaaaagcattaacaggtgcaactatggtgaatacatctgtgcaagccgcaggcggaattgtcgttggcagtatgctggttgatgcctcaaaaatcagagcggagatgatgaaagatatcgcgttgcaggatctgctaaatgaaatgatgaatcgtgccattgatacgttttctcatcgtatggaaacggtaaatcagattattaaaaatatttccactgttgcggaaaaccaaatgaacgccgggaaatatattacccgaaaaatgagtcacgtcgccggataa

SEQ ID NO: 104536 - DNA, 1218 bp, Enterobacter aerogenes
atgtctggagccatcggccattcaacggaaggtacctcacaattacagtttattcaaaatcaatccaatacgaatattgttcaggaagaaaaaagaaatattcaggatgtcgcatcatttgcaaatgaaaaaggtggcttgtcactgttgctggataagcaaagcctgagaaccgatgagtcacgagcaatgtcggttgcacaaaaaagcaaggtaggagagggaaaagatgaggccatggctcaactggtaaaactgtccgctgcagacgccggggatgctagtaaagcagagcatctggcgggggctgcggcaagcgtattacctgcgcagagtgcaatggcccagccaggcaataaagtatcagaaacgaaagtggcgacggggtcttccattgagaactcagcggtttcttcggctcaaactcgctctcatcaggccgttgaaggtggcaccgatattactccaccggcatttattaatgttattggttcaatgagtcagctgaaagtgagtaatgccatcattacagtctctaacaatgcccagcgtatggcgaatgaatcggcggcaaaagcgtctattcgaagcgtcgattcggcaagtcgtgcgggcgataagatgatagaggctgcacagcagaacatgaatggtgctattacctccggcgttgttgggcttgttggtcagggagcaacaacgaaccgctcgtttaaagcactgaataaagagtctaaatcgatcaccacaaatctccgtccggcccgaaacctggaactgggcgttcgcgatcatcagagcagtattttgagtggcaaagatgcgatggtccatcagggcaaaaatctatccgctgatgtggaagcgacgatgaccaagtctcatgccagcgatatgcataccagctctcttaaacgtgatgcacataacgagattcagcttatggtgcaaaaacagcgcgtcggcgctgaatacatgaaccaggccattcgttcaagccaaggggttattgacggttcattcggtgtagttgcctccgagaagcagaaagaggccgaactggcgcgtgccgatcgtgatgttaacaacgagttggccaatgttcatagtcaggttgcgaagaaaacggcagaagcaaatgctgctgcgattaacgcgctggataacgctctcgcaacgaataacagcacgatctcttcaatggctgaacgctcctga

SEQ ID NO: 104537 - DNA, 972 bp, Enterobacter aerogenes
atgttacctgtaagtcatacgtcgtctgtgattccctatatgccagttggcgtcgtaaccggacaattggcgtcagtgagtaatacgcatgtgggggcatcttcagatcacaatatcaaaatgttgaaagagcttacgctgcaaatattttgctgccatgctcctgataagctggataatatcaatgcaattttgagcctgtatggacatacaagcagtattatggatacccgtgatctttcacaagatattgcggcaaaccgcatgaaagcaaattattctctcaaccagtttatggcggcaaaagggaaagcattaaaggaaacaaccgaaaataaggggagcgatgatatatctgttcattccagctacgctgaattatggacaaaaatagcagcggcgattggaaatataaaatcggattatgtggatttttatgccgaccttatgcagtcgtatacagagatgtatgagaaatataacgattatgtttctggtgcctcctcatcggctgtctcggcaggtagtaacggaaacaatgtaagttttaatgccgatactatgacgaatggttatgcgaaatttaataactggtgtaatagtcgtcctcatcagtatgttgataattggggtcatatgacacaagaagaacgtgatagtatgattgcaactctgcaaccagcctttaaggtctcacaaaatggtgaaatttcgtttaatcttgatgcgtatcatgattgcccagatacgcccagggttgggggcaatggttgggaggtttctaccgcaagttatcaggcatggttagcaacgtttaattcagtggggagcggattacaaagtaatatgcaggcttttgcccaacgttacagccaggcaaatagtactttcgataacttaaataaagtactaagtggcgcaattagttcgctggcagatagtgcaaaagaagtgcttaaatcactgaattaa

SEQ ID NO: 104538 - DNA, 2106 bp, Enterobacter aerogenes
atgccatctattagcaactacaataatgtcaatagcacagttgatctctctacaagcagtgttggccatgtcgtcagccagaccgggagatccgctgttattaacttgacgagcagtgttaaaaataatccattggcgtcatttaaaaaaaatccgcatcaaacctctcttgcggaaaaagcactccgctatgagatgcaaaaaaatcttcctgcggatttagcaggaaaaaaattaaataccgatggcgagagaattaaaaatttaatcggtataatttatgaaccggtgaagttcagtggaaatatggctgatattaaatcactggattctatttgttcaaaaatgacgatgaataaagataatgccgcattgagtaaagcagaaatgaagcggctttctgggttggtcaaacaatacggtgatgtggcctttgaaaagaccatcaatacctttatcggcctttgttcgcagtcctggcaggatcatcatgatgcccgttcgattaatgtcgaaaataaagagacatttaaagcctgtctggatgtgtgtaaatccgtactgcataatctggcgaaagggcttaatgaaccagggcttgcctgggaacaaatgggtcagaaaatgaaccagttctttgattgctgcgtggcaatctcaaaaacgccgattcattatgataccgacgccgtagccgactctggcactgaacctgtgcctgaacaaccggcgtctggcccaaattctccagcaccgtcttctccggtgcatcctgccagtgtcgatcccacaggaaacattggccccggtaacgatcccaatactcagcgaattttcatcccacgggacgcgggaagtgaggggatcacgctaaatattacgaacaacaatacgaatacgaatacaggccctacaaccggggaaagggcagctcaaccgactggattaaatagcgaggatttacggacgattttgacgtcagatctctccaacaccgataaggttaagctggcagataaatatctggatctgaatgctggtggacgtcatttcctgacccgtctgcaacatgtggcgaatacggatccgttggcagaagctgaacgcgcaaaaacgtcttctcagccgccggacgtcctcgcgcaaaatggcagccatgacctgggcacattggtcgacaacagcctagtggatggcgttgaaaaaacgccaccgtcagctgtattgtgcgatgccgcgcaggtgcctttagaagcagaatccgaagcgccggaagcggtgcagaaacagctcgtcgagcatcagcaggaataccgtgcagtgcaggtgaggacacagcctgaaattttctacgccgctgaggagttgatagagcagatccagccgcagtatgcgcagcctctctcctcgccaggcttaccgcaagtggcggtaaaagaagtggacattcaaccgcacgaagagagcccaaaagcgtttcaaagccacctggagacacagaaaccggtcatcgatgtggctatttcgcaagaacaagtccccgttcgcccgcaatacgctcaaaccttgacgacaccgaacggcgaagataagcgtcctggcatggtaacatcagcattgcagcctggcatcaatgaagaacccactcttgtacgctcgaatattttgagggagctctcagaaagtgtcggaagcaatgtggcggaacatgcgccagaggacatgccaaaagatctgcctaaagtagaaacccagcgccagcgttttgtgccggcaaatctggaagggagaacgcagcacactgaaagtggtcgcgggcgtgtttttctgaccgaacgtccggctgacccttatagccggctgacattttcaccggcacagattattcccagttataaatggaatcaggatgtagagtccaggaatgagcgacagaaactggagagcgtgtttgagtcgagaaaacaacggaatcctgacgattacgagaatctgggaagccaggcgatagaggaggctaagttagaaggattggttgaatttcagaaaatggcggctgaatttagcgcgctgaggaacaatacaggaaagtatcacgatgagtaa

SEQ ID NO: 104539 - DNA, 249 bp, Enterobacter aerogenes
atgagtaatgtcacggctgacagctctattgaatcgatggtaatgtatattattcatcaggttaatggggtactgccagaagagattaatctgcaggatagtttcattgatgatttggcaatggattcagtggagcttctcgatcttctgatgcgtcttgagggaattggacttgttcttcctgaatcggctattaattgtagcctgaccgtcgatgatattattaagcacgttgaagcactggcataa

SEQ ID NO: 104540 - DNA, 150 bp, Enterobacter aerogenes
atggtaaaggtgatgtactgccagtcgcagtcgggggggatttggttctgctgcgacacccactgctccgtggctttgaagccgcaggtgctgcaggccgttgactttcagctctggcagaaaaagcggctatgggtgcagtcatggtga

SEQ ID NO: 104541 - DNA, 285 bp, Enterobacter aerogenes
atgcttgacgggatcatcggcagccagcgtgaatatatccagtggctgttgaggaccagtaccggcaaggataagccggaaaatattctgacgaccgaagccgttgacctgctggcgatggaagcaggataccagacgggggaaaaaccgatgactgccacgctggttgaatccgtgctgtcacgccagatggatgacctggagccgacactcacgcggcatggttaccggctgaaggacatggtggagcagttcgatgcacaatctgctgaaatcagggcatga

SEQ ID NO: 104542 - DNA, 5928 bp, Enterobacter aerogenes
atggatagctctgtatgcgcgcccgagaggtccgcttttaccaatctggttacagaagttagaaacgatccaatagcactttttaaacaacaatcgcatcagacgtttaatacaaaagagcgagtttcgtataaagatcaaaataatctcccagccgaatcgagtagtcatggtcatttattcgcatttattcgtgaaacctacctggaagaagctcaggagttcaggctaaaagggtataacagccagcagcccaaaattgacagggggctactaacacagctgcgtagcgacctagccgcggccaaagctcgtctgcggctcctggtaaacattagtgaggggctgagttctctgtacctactggcgcagatacgcaacatagagtgtcttacgagtaagctttcggacgatgtcataaaacactgggttgagtgtgagctgtcaagcaaaggcgacggggaagccacggagaccgcaccggggaaccggcgtacggctcagtcgctggccagacggttggagtccaccctgcagacgctgatacgcgttgttcgtaccctgagtgccatggatgactacagtaccccggaaaaacggcacgaaatgctggtcgctgagttgaccggcgcgttttcctctagtgataaaagtacgataatacaggcgctggggagcctgacggcagagacgtcaggccatgctgcctgggtttctcttatgcagacacgggcagcagcgtgggaggccggtaagtggtcctccgtaagggtgatgattgcagacacgcggcacgaagcagaaaaagtcagtacaaaagcccgccagcttcagggggaacctcagaaattctttcgcgatgtcgccgcctgtctccagagcctctccggcgatttggtaaaggcgtcgattcacgctggcctgagcaccacttcaccgaccataccgcaggtgaatattaatgagccggcggcctctttgtcacgctcaaattctctcccgcagcaaatcagggcgggttttgataagaaaaaattacaggcgcaaactgccgttgtgggaatgaaagtacacgcgcaccggctgatccgcatcgcacagcatggtcacctcaccggaacgcccgcaaagccccctgagcacgtcgttgccgattccatcatcagaagcattttatggcagtggcagcagtcggcaattaaaattcagtacgccagcgctgcgctgttgtcaaaagtggatgagctgaaaaaaattgaagggacactggcttcttactccgtggcagatgaccggggaagcgaacaggagcgccgcaatccccctgtcagcccgtcgggtgaggaagacctggttgcgcgggtaagggaatgggtgagcgacagtcttgaacaggaaacccccgaaaaccagcgggcggtaaaagtggcgacgctggagcggttgctgggcggcgatatcgactatgcgcagtcccttctggctcgcctggggagtaccactgacagtattcagaaggcgcttgaaaggcagtggatgtcggtcaatgacatgctggagcccctgctgccagctgatattgcccgctctctgcaggaaaaagttgatcatttgctgtataaaatcatgcctgatatggctagagcgcttgctggtgctgcacaggcgctgaataattccacgcttgcagccgggaagtcagcgcgcaatttctccggggccagggtacaggcaggcaaagcacagctgctggcgacaaaggtgaaggaaagtctgtcggcagaatctgcacgactgaccgaaaggcctctggatgaacactctcggggcgcacgccttgccagacactgggcaaacctcgccagtgcacagaacgagggtaataatccgccgccggatgctcggcaggtgcttgcctccctgaaagcgcaggggctgttagcgggaaccctttcagccggcgatccggccgggtatctcttcgccacccgacttaccggtgaacttgaaaatgcccgttatgatgaactgagattaccggtgagtccggagcaatatgctgccctggagaaggggcttgttgagtatattgtgaagtgggggcaaaaacggatcccgcgagggatcacccgcatcgctattgaactatcctttgaacaggctttaaatgcggtatcgttcaacatgtccggcctcttccggctcccctataaggtgctgaaggcctcgataaaaataccgtacaatgttaataaggttaataattataccatgcccggtcatgataagccttataaggcgatttatggcttgctgggtaaaaaactaaagcaacttggctttaatctgctgacggcgcccgtacctggcgcggtcaaattggcagccggagccgggctaactgcaggtgcggccctgcacaatatatatgtcgggcgcagcgagaacaccttcagcgcggtttatcaacatgtggcggaaggaaagcaaagtgaaaaaataaaaatgggctcagtggggggaatggtttttgatgcagtactcgatactgccgctacggtcgcttttaaaggggggcaaagcgcctggcaatcagggcgaagtgaagataacgctacttccggtaatgcgttcgttagcaaacaagctgctgtaagcaatgaagaaacgccccgacaggcgcaacggaacgaaatggcagccggaaatgataaccctattcaagagaatgctgcggcagatgaaagagaaggcataccggtgagtcacgcctcgctattacagtcacaaacggatgctgagccgttgtctgatgagcatgatccagattctgtccccccccgtgtcaaacgtaaacgggcattggcgaacacagcaccatctcctcagtggcataataatatcccgtccggtgcgtcgttacagtcagggcatatttattttgatcgagacattcgttatcagacgctctctgttgctcagaaaaaacaaacttacttacatggcattcaatttgtattgcttcagatagaaaatgatgaatgctttacaaaagaaatcagggagaatgcgtggcttgccagaataggtgccaggctcctcgtttctgttgatataggaggctgcaggcttaataatacgatattcctccctgacagccaaggcgccaagaaaggcgtgcttatttgtctggacgctgaagttccttattactatgttgatgaaggaaaagacctttcaaaggatttggtaagggactttccttactattctcatatacgatggcgccgtcaggagatagatagccttggcgatattatagacatcacttatcccagtggtattgaaacatttaataatattagggccggaaggggtagtttcgaaaagaactttaattctgttaatacggatccgatggatatagcgagactctcggcaaaactcgctgatacgatggaaattgattatgtgattaaaggaaaaccgatcatcaataaattattaatctccagagcgattgctggtgcgcacatccctgcccccggggtaagtgtatccgaatcaaaatatcatctcgaattcacttgggataatttgtcaccggcagagtatctgaggtcattttcaaggcccttctctaccctcagtggagaaatgcagttagtgtccagctccattaacggagaaacgatacaggaaaccgaactgcatgttcatcaggctgaatatataggaagctggattgatgctaccttcggggccatcacctcattcacgccggtggggcgggtgctcaataccacacaatccgcagcggacattgctgctgatttaacaaaaggtaaggagcccgatccactgtcggttgccggtcttgtgacagggtgcattccgggcggtcgaattgctgctaaagttggaaagttcacccggattggcggtaaggctgttaaatacgggtttaagattggcaataaagctgtcgacctggccatcgtcgggaggagcattaagacagccgtagacacgggtgaacctcttgccatctaccaggcatttttggccagcggtatgagtgctaaggactcctatgacataacaaggagtatgtcatcagcgctaaaactcggcaggacaatagaagaaagcgcgtcactggaagagcttgaagcacttcaaaatgaggctccggagtattccatcgctaaaccggtggagcgtacattcagagtaggctcgagagagatactcggtagagcagtgaatggcgaaattgagatattcagtgagaatacccgcacctgggagaaggggagcaaacttcacctgttagcgttcaggctccagaatgccggcgggggaatacggcttcctgcgttattcaggaataaaatcgttatcgggaaacaaacatttaaacgtgtcaaatatagtcaggataagttaaatgaaatgatgcggatcgctcagacatatacaccgatatcagacagtacagcacgtattgcaaaaatccagcaagattacagggcggggaaagaaataagtcattcccctcagtacgattgctacaactgcttatccctcgatgaaaagcttgatttatttaataaaccggatacggatgcattaacccggggagttttagccgggaaaataaatggagccattgaaagtatcaatttatatgaaacagctaaggccgctgatgactggaaagcgtcggcaaaaaaagcaacggatgttgttcttttaccgcaggggattttcttaaaaggacaggcgggtgagtgcctgcctgagtccgtactcatgggtcgagctttacaaagtggacaggatgccaggttagcgcaaagattgatgagtctttattcatcacccaacgtaacggatgctcctttgtatcagtcactcgtcgggttacatgctgatggtaatgcatctaaatttaatgccgctgccatcgctgatgttaaagtgaaggcgctggatgaagctgaattaaaactatttccaggagaaaactcttcggtcagggttgatatccccaggcatactatgttgatatccagggtaaaccaggagggtaaagtaaagtatgttttctatgacccaaattatggtttggcttattttgataagtataaggatatgtgtgttttttttaaaaagaaaatcatatcgtataatgtacctgaatactcgattaatttccgtcatttagattactcccgacttctggacattaaaataaacggaagaaacctcgatgaaattataggtgatgaaataccacccttatacaatcaagagcgtattaattttcagggaaattctgaggcatctgaaacattcgagccgactatcttcagacaagcattgacggaatttttaaatcaacaaaccgctcaggggccgagtgatccagcttatatgccctatctgtcctcgtttaactcactgccggaaagcaaggagattactttgcagcaggtgaatgacctgaaacacgcgttttacgcatccggaaacaacctgggggcccaggctaaatatcagtatgcattactagcatatttgtccggtccggaagggataaaacttcctgtcgatacaactgatattcgcgttcgcattgtgcaggaaagagaccatgctgagtacgtgtatgaatggaaagtgaaggagagggaccgattcagggccgagttaaataagaagatagcagagccaccaaaaataagaatcctatctacaggtaccatgcgttctcaaatggataattacaagagggaagtggttaacttaagaaatgtagtcgctgacaggaataaacagatgagtgaatgggcgagtaagaaaaggcaggctacattacggcttgatatgtggaatgcctcctggaatgagtttttttattaa

SEQ ID NO: 104543 - DNA, 936 bp, Enterobacter aerogenes
atggctgtgagcatcgctggttcgaggatcgtactgctcgtttacgttgatgatgcgacgagccggctgatgcagcttctgttcgtcagttctgagtccactttcacctattttgaagccacccggggctatctggagcgttacggtaagcctctggcgttctacagtgacaaggccagtgtctttaggatcaacaacaagcagaccaccggcggagatggccagactcagtttggtcgtgccatgaacgagctgaacatcaccggcatctgcgccaacaccagttcagccaaaggccgtgtagaacgggctcacctcacgttacaggaccgcctggtcaaggagctgcggctccgtggtatcagtacaccagaggccgcaaacgcctttgccgaagagttcatggctgactacaaccgccggtttgcaaagtcacctcgtcacgatttcgacgttcaccgtccgcttgagaataatgaaaacctggaggcaacattcacctggcgtgaactacgtaaggtctcaaaaaacctgacattacagtacgataagaagctatatctgcttgaagataatgaggaaaaccggcgttttcaggggaaatacattgatgtctggcagtatccggacggcactattgagctccgggctaacggtacttccctacccttcatcacgtacgaccggctgggagaactggaccagggagctatcgtcgataacaagcgtctgggacgagctctggagatgataaagctggttcaggacaaacgggacaacacccgctcgcaggccctgccatcacttgacggccagacctcacgcagaaagaagcaacccggaaagaaatcacaaagaagcctgaaccaggacgacatgctggaagctctgcagcaactccagacaagaagccaggaaatcttcggcaaaggctga

SEQ ID NO: 104544 - DNA, 429 bp, Enterobacter aerogenes
atgacggcatacggaacggagtttttctcaatgaacgatgtaaaccgactcaggatccttcaggacgttatcgaccgccgtcttaccacacgtcttgcagcaacccggcttgagatatctgacagacactgccgacggttgctggagcgctatcgtgaacatgggccgctttcacttgttaaccgtcgtcgtggccagcccggcaaccggcaactcatgccgggcctcgctgaacgagcactgcgtattatccgcgaacgttacgctgattttggcccgactttagcctgtgagaagcttgccgaggttcatgggctgtatctggccaaagagacggtacgcaagctggatcccccgcaagttgcggccgccgcgtgtacatcagccacgaccgcgtcgggcctgcaccggagaactcatccagattga

SEQ ID NO: 104545 - DNA, 531 bp, Enterobacter aerogenes
atgaataattcaacaaagcattactgcaagtcagtatcaggcaagaagtggtcactaagcatgttcactgagttttatgagcgcgtactgggaccccggttattcggcccctacggagaattgcttgttagagaaatacgacaggacattgatgtaggggcaccacctgcgcgtatcctagaagtcgcctgcggaaccgggcgtattaccacctgcctctatgacggcctgacaagccccctgaatatacagctcaccgccacagacctgtcgaggatcgcgattgatatggcccggaacgtggtcagcgaggagctcagacgtgacgtcacttttcaggccgatgtggatatggcagacatgccattctcggacgacagcttcgatattattgtctgtggctttggcctgatgtttccgcctgacaaagctcgggtcgcccgggagtttaagcgagtactgcgccccggagggaaaatttacggtaccgtttttcactataatgaattgttcgacttggcacgatgctaa

SEQ ID NO: 104546 - DNA, 1866 bp, Enterobacter aerogenes
gtgctcatggatgcagccctcagcctgagcgatcacaccccgatcaccgacgcttttgtccttgaagggctttgtcaggatatcaccagagacgtcacccagtgtcctcttgtatttcatcttaacgatgacgatacgcgtgagtttcttttcaatgcctgtattctccttgaagaattcaaccagtgtaatgcttctgaccaggaaaaatatttaaactcaatgctccgcaggtttcatgcacaggtgccagaccagaactaccgggtcgaagcttggcttgtgcgcgggcaggtcagcaaggctggcaaagtgccgggagagaaaatcccggagccagaattttctgagctgaatgcgttttatcagtcagccccggaggagaatgaggataaaacgaaggaactgtgtctgctccattatcagtccgtgcggcacctgtttctggacgggtatcctgcctattccatagctggcactgaagctcttcgcaagcgagacttctctcgtctggatgtccggggaatagtgtatctggatcatgtcggtggaacgcttgctcctgatagtcttattgaggttgactatcaagccatcaggcatgccattctcggcaacccgcatagcggatccagaacatccggagaggcatattcgaaggcccgccaggctatttatcatttcttccggtgttctgaggatgaatatgaaatcatctttacctccaacgccagcagtgctattcgcctagtggcggaatcgtgtccctttgacagtggctctgaagtactgctgaccaaagataaccatacgtcggtgcacgggcttcgggaatatgcgaggcaaaaaggtgctgcggtgaaatacattccgcttgatcagagcctccagctcccttctgctgcaatgcagcgtgctctcgataatctgtcttccggatctgagcatctgctggcctacccggcgcagtccaacgccaccggcatcaggcacgatctggaatggatccatgcggcacaagaaaaaggggcaatggtcttgctggatgtggcggcatttgttccccaatccgggctggattgttcggtatatcagccggactttatggctaagtccttttacaagatgttcggctacccgaccgggtcaggatgtcttattgccagaaaatcctcgctacgcaagctgacgccgaatgcattcgccgggggggcggtctgctactactcgggcccgtggtcaccgactgagcgactgctgtaccgcgaagacggccggcaatttgagattggcacgccaaattatgcctcattccacgctgtcgcgcagggatttcagtttctttctcaacaggggcttgagggtatcagggaaagttcaacggcgcttgcccggtggcttgaggtgcaactgtccacactgcggcacagtaccagacttggtacgcccctgtgccgcgtttatggggtttcggccggcaaccggggggcgacggttatgctgaactttttcgactgctacaacgcggttttcccgcacgcacttgtccagcgttctttagaccgctttggtatcatcgtccggaatggctgcttctgcaatctgggtgcagttcagcaggcaacatacaccaccgcaggggcagagcactgtgaactcgacaaaacagaaaaaatattgaactgcagggattttgacgaacacattctcaacaagggtaactgcggggccattcgtgtctcgtttggtctcggttcgaatttccgtgatgcctactgtttttatctgttcgcaaaggggcttcttaacactgaggctgctgggctcgaaggtagcttgagtggtttaaaggagacttcatactga

SEQ ID NO: 104547 - DNA, 249 bp, Enterobacter aerogenes
atgtgcagctttaagcacttcaaatacacgtttctcaccggctcccatggtgtgctcagcataggagataccatttttggtaaatttatagaatgtgtagcccttttgagtagtacagaccatcaaatcggagtaatcagcttcaagaacccgacacatagaatcaagtattttttgtttgaggtgtgcagggctgaaaacatgactaacgtactttgcatgacgggacgcagcgagatcatcagataa

SEQ ID NO: 104548 - DNA, 876 bp, Enterobacter aerogenes
atgccggcagatgggaccgtggtcccggtcgacacttataccaccatgccagtaggtgggaccgtggtcccggtcggcactcataccactatgccggcagatgggaccgtggtcccggtcgacactcatattaccatgccagtaggtgggaccgtggtcccggtcggcactcataccagcatgccggcaggtgggaccgtggtcccggccgatactcataccaccatgccggcagatgggaccgtggtcccggtcgacactcataccaccatgtcagtaggtgggaccgtggtcccggtcgtcactcataccaccatgccggcagatgggaccgtggtcccggtcgatactcataccaccatgccagtaggtgggtccgtagtcccggtcgtcactcataccaccatgccggcaggtgggcccgtggtcccggtcgtcactcataccaccatgccggcagatgggaccgtggtcccggtcgatactcataccaccatgccagtaggtgggtccgtagtcccggtcgtcactcataccaccatgccggcaggtgggcccgtggtcccggtcgtcactcataccaccatgccggcagatgggaccgtggtcccggtcgatactcataccaccatgccagtaggtgggtccgtagtcccggtcgtcactcataccaccatgccggcaggtgggcccgtggtcccggtcgtcactcataccaccatgccggcagatgggaccgtggtcccggccgatactcacaccaccatgccggcagatgggatcgtggtcccggttggtattcatacccctataccggcgactgggaccatggtcccagtcggtactcaggaactatctaaaaagctcgaaccatag

SEQ ID NO: 104549 - DNA, 2988 bp, Enterobacter aerogenes
atggcaaggaggcagattcttactctgtcggaaagagaatcattactggcattgccagacgatgagttaacgctgacccgaatggcctatttcagtgagcaggacctggtttttattaatgctcatcgcaaacctgccagccggtttggttttgcagttcttctctgttatctgaaaagcattgggtttgccccggataaaaaatcgtcaccacccgcagaactgctcagaattatcggtgcccgacttaaactttcagcagaactctggcaggaatatgtttccggccgtgatacaacccggcgtgagcacctgggggaactttatcgttatctggaactgaaagcttttaatggggcacttcagaaagcatgcatccagtatctgcttcctctgtctaccaggactgatcggggcatacttatcgcagaggaattactgaaacatctgcatcaacagcgaattattgttcctggtattgatgttgtggaacgtacttgtgctgaagcaatgacactgggtgataaagcggtttacaccacgttgaatgcacaccttggcgtcacgcataaatcagcgcttgattcactactggtgacaactgaaaaacaaatctcccgtttgacgtggttgcttcagcctccggggaagatcaatggaaagaatgtcctgcaacatatagaccgacttaacgctattgaagctctggtgctaccggaaggtgtggggagaaccgttcaccagaaccggttgctgaaactcgcgcgggaaggccgcaaaatgagcagccgcgatttagctgattttacctctgcacgtcggtatgcaacgatggtctgtgtactgactgaggccagagccacaatcattgatgaaattatagagctgcatgaacgtatactgggcagtatgttcagccgggcaaaacgtcagcaggccgaacgccttcagaaaacgggcaagctgatacagcagaaattacgtcagtatgtttccgttggacaggctatcttggatgcacgcaacgcaggcgaagatcctctgtctgctgttgaacggatattagcgtgggaagattttgccgccagcctggaggaaacccggcttcttgcacgcaaggataatttcgaaccgcttcatcttattaccgaaaaattcagcacgctgcgcaaatattcttcccggttgttatcggccctgcaactgagggccactccggccgccttaccgctcaatgatgcccttgatattatccgcgagatgtaccgtaaacagctaagaaaggttccttcatcggcaccgctcgattttattcctgaaagctggaaaaagatggtaatcaccccttcaggtattgaccgacaatactatgaaatttgcgcaatgaacgagttgaagggggcgctgcgggctggtgatatctgggtccggggctctcggcgctacaaaaattttgatgactatcttatgccacgcggcgatttcgaaaaattgttaaataataataagttaaatatacttgtcgaaactgaatgcggagcttaccttaaggccagactgacgctgctggcttcccggctggaggaagttaacgcaatggccgtcaccggagatcttcctgatgtggatatttcagataaaggtgtaaaaatcaccccgctggataacagcgttccttccacaatctcacccctggctgacttgatttacaacatgttgccgcacccaaaaattacagaaatactggatgaagttgaacgatggactgccttcacgcgacattttacccatctgaagaacccgcttacccgcccgcaggataaccgtttgctgctcaccaccatcctggctgacggcattaatctggggctgaccaaaatggctgagtcttgtccgggaaccacacgggcttcgctggaaaacatgcaggcgtggtatatccgcgatgaaacctacgctgcggcactggctgagctggttaatgcccagaagtcgcgtccgctggcggcattatggggagacggttcaacctcatcttctgatggccagaatttccgggttggcagccatggtcgctatgcgggtcaggtaaacctcaagtacgggcaggagccgggggtacagttttatacgcacatttctgaccaatacagtccgttttacaccaaagtgatcagccgtgttcgagactccacccacgtacttgatggtctgctgtatcacgaaagcgatcttgaaatcacggagcattacaccgatacggcaggtttcacggagcatgtttttgcgctgatgcatctgcttgggttcgcttttgcgccaaggatccgggatcttcacgacaaacggttgtttattcaggggaaggcttatagataccctgctttacagtcaattatttctacaacaccactgaacatcaaggagatagaaacccactggaatgaaattctgaggctggcgacctcaataaagcagggaacagtgaccgcctctctgatgctgaaaaagctggccagttatccaaaacagaatgggcttgctaaagcactgagggaaatcggccgcattgagcgaacactgtttatgctggactggttccgcgatcctgcactgcgtcgcagggttcaggcaggtctgaacaaaggagaagcccggaatgcgcttgccagagccgtctttatgcatcgtcttggcgaaataagggatcgaggcctggaaaaccagagttaccgcgccagtggacttacgctgattaccgccgcgatcacattgtggaataccgtatatatagaaaacgccattaacctgctgaaaaggaagggccttcatctcaatgagcaattgctgtcacacttgtctccgctgggctgggagcacattaatctgacgggagactatatctggcgaaacaataaaaaactggcagaagggaagtatcgacctttgcggccagttgatatcagccagtacaaaaaacaaccttaa

SEQ ID NO: 104550 - DNA, 789 bp, Enterobacter aerogenes
gtgcaggacttacattttcaacataagaatcttacgacggcagaggtttactccagtcatcagcaccgcttgcatcgtgttaagcttttttcagccgcaatttgccatatcacgcagggtagtaaagtgattattcaggatgatagtcgcctggtggccactcctgatgaactcattatcattccggcaaatacagacctggaaatagttaatcaacctgcacagggggcttttcgctccgatttgctgctgttatcccctgagcttctttcagagtttaaatctcaatatattcaggactacccgcccgccagacttacgtctttatgtgcgccaatgagcaaagggctgacgtttatgtgggacaacttgttaaatgcggtgcgcggtgatttgcccgcaaaattacaagaacaccaggctctgggattgctgttggcacttcattatgaccgattaacagggccgttgttgattgagcgaagcttcagtctgactgagcaagttcggcaaattattatgatgtcgccagcaaaactctggacagcgcaggatatagcaggacaattgtcgttaggaacctcgaccttacgcagaaggctgcaactggaatcacaaagctataggcaaattattgaagaagtacgcatgtctttcgcgctgtcacagttgcagacaacagtgctacccattggtgaaattgcttcacgttgtggatatctttctagctcaagatttaccgccagattccggcaacattatggctgtttgccgaaaaacgtccgttaa

SEQ ID NO: 104551 - DNA, 552 bp, Enterobacter aerogenes
atgaaaagaatcggagccatagtcattttggccacattaagttttaacgctttttccgcgcaaacatttcacgtcagcagtatagatattccacagagtaatcagttaactgagaaacaagttttccaagggtttggctgtagtggtggtaatctttccccgcaactggcgtggcagaatccgcccacaggaaccaaaagttttgctattacggtctacgatcctgatgcaccgaccggcagcggttggtggcactggactgtggtgaatatcccgacttcggcaaaagctattcctactggcgcgggagacgcagctaaaaagactctgccagagggtgctattcaggggcgcaatgattttggctattcaggatttggtggagcttgtccacccccgggcgataaaccgcatcgctatcagtttaccgtttgggctctgaatacggataaattgccactcgacagtaatgcgagcggcgcgctggtcggctatatgttgaacagcaacgtgattgccaaaactgaattaacagcaacatacggaagataa

SEQ ID NO: 104552 - DNA, 612 bp, Enterobacter aerogenes
atgaagtcattgcaatttctgaaatcatttttattcaaaaactctaaaaatattccagtcacgtttattgatagaaacgaaactagagaattacctgagatccctgattacattgtcgaagaatgccagtcacttcagctaaaactgaacactactaaaaatgacccattttcaagcttacgattaatctatgattttctggatacatacagcaagtttgcctccatatttacggtatgtagtaaaggttgtagctcatgctgcaaaatagctgttaaaatgacagcgcttgaggccagctacattgaaaaatgcacgaaccacaaaataaaggaaaataaaaaaagaaaagcaaagtccaacacagattgtcctttcctgatgtccgacgtctgctctatatacgaatacaggccatttaattgcaggacatttttcaccattgacgatccaaaatactgcaaaacacctgatgagccgcacaaggtatacggcacaaatggcggtgagggcgttgctataatccatcaattcaggaaatacattgaccagttgaatgggaaaagaacggtgaacgacattaggaagttttttgaccgtgaagctaattaa

SEQ ID NO: 104553 - DNA, 333 bp, Enterobacter aerogenes
atggcatttatacgtaattcacaaactgttctttcagttcaaaatattgaattagtaaatgaacaggaatttaatgagctggtgacagaattatcagtgcagggattcacacatagctcggaggtttccgaatatattgttaagaataaacttggcgctaaatataaaaatatatctggtgttcttcagatgaagaaacgtggtgatgaatggttatttgagggaggttttcctcctgatatttatgctcggttatgccaaaaactaaagcttaaaaataaaggatcacaagctcgtccgggagaatttactccctataaaaacgtcaagtag

SEQ ID NO: 104554 - DNA, 357 bp, Enterobacter aerogenes
atgaataatcgctccgaatccggtaccaagccggagaatcccaccagcccgcaatgggggctagtacgcactattacaccctgttttggcgctcgtctggtacaggaaggcagccgggtacattttctcgctgaccggtccggattcaacggtgttttcagcgacgatgacgcgctacacctagatcaggcctttccgttgatactcaagcaactggagctgatgctcaccagcggagaactctctcctcggcatcagcactgtgtcaccctatatcacaacggacttacgtgcgaagccgatacgcttggaagttgtggttacgtatacatcgctgtttatcccactcaaggttaa

SEQ ID NO: 104555 - DNA, 222 bp, Enterobacter aerogenes
atgaaaatcatcagtaaacgccaggccatgaccctgtaccgacagcatcctggctcccgactgtttcgctccagtacgggcaaatataaatggactggcagtgtctgccattatgctggtcgcgaggtgcaggacataggcggcgttctggccgtattcgctaaacgccgtcaggaccacaatggtccctatgtcattcttcgaagcgtcactctcaattaa

SEQ ID NO: 104556 - DNA, 444 bp, Enterobacter aerogenes
atgaatacacaaaaccttgagtttgctgagcaggcagcaattactgcctcagtggtcccggacgagttacgcatcggcttctggccgcagcactttggctccatcccacaatggataacccttgaacctcgcattttcgcttggatggaccggctgtgcgtcgattatcacggcggtatctggcgcttttcgacgctcagcaacggcggtgcttttatggctcctgaggctgagagcgatgagaaatggacattgttcaacagtatgaacggcaacggtgcggaacttactggcgaagctgcggggatagtcgcttgtttgatggcatacagccaccatgcctgtcgtaacgaatgtgacgcaatgactgagcactattatcgcttacgtgacttcgcgctgaaccatccggaatgcagcgctattatgcatctcatcgactga

SEQ ID NO: 104557 - DNA, 822 bp, Enterobacter aerogenes
atgaaattagccagccgctttggccgtattaaccagatacgccgtgaccggcctctgactaacgaagagctgatgagtcatgttcccagcgtattcgggagtgacaaacatgagtctcgttcagaccgttatacctacatcccgaccatcaccatccttgaaagcctgcagcgtgaaggttttgagccgttcttcgcctgccagacgaaggttcgcgaccagagcaagctggagcacaccaaacacatgctgcgcatgcgtcgttccgggcaactaaccggccatcaggtaccggaaatcattcttctcaacagccatgacggctcatcaagctaccagatgctgccgggactgtttcgtggcgtctgtaccaacggcctggtctgtggtcagtcattcggagaggttcgcgtgccacataaagggaatgtcgttgagaaggtgattgaaggggcttacgaagtgctcggtgtgtttgaccgggtggaggaaaaacgtgatgccatgcagtcgctggcgctgccagcacccgcctgtcacgcgctggcgaatgccgcactgaagtatcgatttggtgaggaccaccagccggtcacggtatcgcagttgctgactccgcgtcgtcgggaggactacagcgatgacctgtggaccgtataccaacgcgtgcaggagaacctgatgaaaggtggtctgtcagggcgaaccgcacaggggaaaaacaatcgcacccgtgccgttaccggcattgacggcgatgtgaagctcaatcgtgccctgtgggttatggcagaaaacatgctcgaatttttcgggcgttaa

SEQ ID NO: 104558 - DNA, 465 bp, Enterobacter aerogenes
atgatactaaaaccttgcatcccacttgctctcgctcttcttttatccacccaggcaatggcatttggtagccacgatgcctggaccagcggttacgctcagggcaccgctgaatacaccatcctcggtaagggacagtcacagttatacctcgcctgcgaaagcactggttcacaggcggcgaccattatcttcaccgacgtaaacggccatcgggtaagcatggacggcgggcagaagctgaccgtgaaaattgataacgaagaagaagcgaatatcagcgaaagcgaatcccatgtgggttcagacaacgtgatgtgggcatggaataaattacgtagcggcaagcgcgttactgtctcgggaagcggcgcaaaaccagccgcatttacgctcaacggtgctgcagccgttattcctgaattcggcgataacggctgtgtaccgaaatttgcccttccgtaa

SEQ ID NO: 104559 - DNA, 402 bp, Enterobacter aerogenes
atgaaaactctttatcacgtcaccgctgccatatcactactggcagctcttctgtctgcgcctgtcggagcggctgaaaatgatgttattaaactcgatgttcagaaaagtggttttgaactgcttgtcactgttatcgccaggactgacagcatccagatcaagaacattgacgtaaaccggggtagatgcctgctgctggcaaaaggcaccgtcacctatcagggcatcacggttgaaggctgggtgcccaaaaagggggaattcacccccactactatgcaatttgctgatggcctgacctggcatttcggcaacccactccagcagaagggtattaactgcagcttcgttgaagcccgtgtgtttaccaacaagggaaccttcactatcagcgaatga

SEQ ID NO: 104560 - DNA, 888 bp, Enterobacter aerogenes
atgagaaatccttcaggatatgccctagttcgtcgccatctgcggcgctatcctcgctctgtacgtcaggctttaattcatgagcttaacaagcttgtgacctatgagccggttatcggcatcatgggtaagactggtgtcggaaaaagctctctctgtaacgcactgtttcgcagtgaagtctgcgcggtaaatgccgtcgaagcctgtacccggacacctcagcgcatacggctgcgttttggcagccattttctgacgctcattgatttacccggcgtaggggaaagccagtgccgtgacggtgagtaccggaagctataccgcgaactcatgccggagctggatatggtcctctgggtgcttaaggctgatgaccgggcttatgcggctgaagagcagttttatgaagatgtgtttgttcagtactgcggctcgttacctcccgttctgtggctgctcaatcaggtggataaaaccgaacctgctgagcagtggaaccgggcatcagcacagccttctgcgttacaggcggagcatattgtactgaaacgtcaggccgtggcccgtcagcttcccgtggcggcggacgagattctgtcgatctcggtcaaaggccgttatcaactggcaaaagtggtggaggccatgatcacccgactcccaaagcaggcccgcagcccactagtacctcatcttcacagcgcttaccgcacggcttataccaccagcaccgcccgcgacagcttcgcagagctcgtggcaggcaccgttgatcacgtcatagatctgatacctatgcctcaggttgcccgcaatgctcttcacgccgtaactcataccgtagctcgtgttgcacgtagcgtctggtcgttctttttcggttaa

SEQ ID NO: 104561 - DNA, 774 bp, Enterobacter aerogenes
atggcttttgatgctaaggttattaaaatattaattgcgagtcctggtgatgttgaagaggaaagaagcgttatcccggaagtaatctcaagatggaataatattaatgccgaaacctcaagcgttgttttacttcctgttaaatgggaaacacattcagcaccaaggctaggagatcgtgcacagggtatcataaataatcagttagttgattcttgtgacatggtcattggggttttttggactagattaggttctccaacaggtgttagtgaaagcggaactgctgaagaaattgaatgtttcattcaaaaaaacaaaccagtaatggtttatttttcttcaagagctatagacccaaagaaaatagatttgaagcagtatcaggcattaagtgaattctctgacaggctgcaatcaatgggtctgactggttcttattcaagtattacagatttatcggatcagctttttacccagttaactattaacgtaagagattttatctctggagctggatacacaccaccatctagaaaagaagttatagaaaaccaagaaaccttagcaaagatactaaaaaaggattccgtatatattgaagactatgaaaaaaatggtgaggtgaaatcatttttagttaagggtgataccaaagaaattaaagatgaaataaaagagctgggtggaaaatggaacagaagtttgagcggatggctgttccctatgagtaagaaaatagaagtagcagcttttttaaagaaaagattataa

SEQ ID NO: 104562 - DNA, 549 bp, Enterobacter aerogenes
atgcaattgtctgtaaggaaagagttttctattccatttgcaattctgtgttttttcattttgggtcgattatttaataatgacttcttaagtaattcagttatgtttgaattcgttcttggtgttttttcatatgttttatataaagaattgtctttcccaagaagtgcagtagttaagtttttaatgatctttatctctgtgagttggatgtattactctccagtaggcattcgtttttttgacttgggtattcccagttttataatatttaattcctatgtgagtttgttcaagaatgcaggggcaggcgtgctatctactataggtgatgcatcatattctatatatctgacacatcttctctcaattagcgccatttttttaattggacatagattcttagggttaaataaccctgtcatactttatatattaatgcttcttcctgctttagtcttcggtattattttccatttgtttgtagaaaaaccaataatcagttatttaaattctaggacaaagcgattagttattaaaaatgtctga

SEQ ID NO: 104563 - DNA, 180 bp, Enterobacter aerogenes
atgtgtaaagcacgattcactgaactccagagcatcgccattctgaagtccgttgaagccggacgtatcgtcaaggatgtgtgccgtgaggccgctatttcggaagccagctattacaactggaaggctgaatatggcgtgatggaagcggccgatattaaaaaaaatcaaagaccttga

SEQ ID NO: 104564 - DNA, 828 bp, Enterobacter aerogenes
atgagtttaccccaggcctgcaggacgttatcgctgagcaggacggtgtatttttatcagcctgatacccggcgtgaagaaccggtgagccatacgctgactgaactggcagaacgctatccgcgctacggttttaagaaactgttccagctgctgcgtaggcagggtaatacctggaaccataaacttgttcaccggatttactgtctgctgaaactgaattttcgtcgcaagggaaaacagcggctgcctgtgcgtaatccagcaccactggcgacaccgcaagcgttaaaccagagctggcccatcgattttatgcacgacgcgctggtctgcggcagacgcttccggacctttaatgtggtggaggattttaaccgtgaagcactggcgatagaaatcgacctgaatgtcccggctcagcgggtcattcgggtgctggacaggatcgcggtaaaccgcggctacccgctgaaaatgcggatggaaaacgggccagaactggtctcgctggtgctggcacaatgggccgaagagcatggcgtgcagctcgaatttatcaagccgggtaagcctacacaatatccttttatcgaacggttcaaccagacataccggacagaaatcctggatttttacctgttcagaacactaaatgaagcacggaaggttaccgagcgctggctgatggaatatagcaacgagcggcctcatgaatccctgaataacctgacgccggaagagtaccgcctgatggctgaaaacccaggaactttcaaaaagtgcatggaactgaagctaggatgcttacaatatggtttagtatga

SEQ ID NO: 104565 - DNA, 3516 bp, Enterobacter aerogenes
atggacagcaatactcaaggattcacttcatactggcgtaataccttagctgatgccgagtctggaaaaggggcatttgagcgtaaagatgaagattcattcacacgatggatggaagtcgatcggggaagactgggtgaagagatcgtgcaatcgttcttcgagggcgaagacgagcaggttaaaaccgtcgaggtgttgttacggccgcaggtgtggatccgcctgttaaagcatggcaaggaacgtacggcaggcgcaccaagtatagttacgcctctggtgacttctgcactgttgaaccgcgaaggctttttattccctacatcgccagccaccattccccgtgacctgctcgaacctctccctaagggtaccttttctattggtgaaatgccggaatatgacaagtacaaaaccacgcatgattcaattacttttggtcccagtaatgaggatgagctgcttgttgagactgatgatcaacgagtggaacgatatgctcgttatcagcagttgtggcaaaagtaccttaaagacactgatgaacttttaaaaaatgttgctggcagatggctcgcatcacctgagcaatatgaaccagctggatatggctacattattaaagccaaccagcctggaggggccagcctccatatcctgcctatgtacgatcatctgctgtcgtgcaaaaaagaggtgccattgctggcgcgctttgcctcgaaagataagtttcctgttgagccgctccttgccagtaatgccatgttcagtgagcgtctggggcattctggtgataaatttccgctggctgtggcgcagcgcgatgcccttagccattacctcactcaacagccgggcgatattcttgccgtgaacggtcccccgggaaccgggaaaactactctggttctttcaatcattgctactgagtgggcgagggcagctttaaacaaaactgaaccgccggtggtgattgcgacatcaaccaacaatcaggccgtcaccaacattatcgaggccttcggtaaagattttgctaccggcactgggcctatggccgggcgttggttacctgaagtaaaaagctttggcgcttacttcccgtcttcgggacggagagccgaggcggtaaaaaaataccagacggaagacttttttaaccgtgttgaatcccttgaatatgttgaagatgcccggtgcttcttccttgaaaaggcaagggcagcttttcctagtaaggaatgtcattcacctgaacaggttgtggatctcttgcatcagcgtttggttgaaatctctgcagagcttgagcaaatcgagcctgcgtgggatgacctcaacgcaattcgtcaggagcggcatgccatcagtgacgatctcgaacagtatattcaggataagagaacgttactgctcaatagcacaaatgaaatctcgctattaacgcaaggcaaaaaacagtgggagcaatatcgagccggtgagtcgatcatgtacactctcttctcctggcttcctgccgtgcgtactaagcgtcactatcaaatgaagctgtttttggaggctacgtttggcgaaagaatgacagcattccagggatctcagcctgatggaattgatgcctttatcgatggattgattgaacaagctcataaagagcaggctgggtatcaacagcaaattgatcttgctgaggacatttcccgacgtgaaagcgaagcagctatacgctggcacgatattactcactcactgggaaatccgggcgaaacagagttgagtctgcatgaagccgatgagcttgcagatacacagctccgtttcccggcgtttctgctggcgacgcattactgggaaggccggtggctgatggatatggctgctatcgataaccttcaaaaagaaaaaggtcttaaaggggcgaaggccattaaagcccgctggctgcgtagaatgaaactaaccccttgtgtcgtgatgacctgctttatgcttcctcaccatatgctcatcagggagcatgttggcggcaagaagtttgatgatggctatttatataactttgccgatttgctgattgtcgatgaagcggggcaggtgttgcctgaggttgcggcagcttcttttgcactggcgaagaaagccctggtgattggtgacacagaacagattgcgcctatctggaatagcttgcccggtattgatatcggcaatatggttgaggagaacattcttccgggaggtacgcaggaagaacttactgaagcttatgccctggtgtgtgactctggaaaaagtgctgcatctggtagcgttatgaaggttgcacagtttaattcccgctaccagtacgatccggatctggcgagagggatgtacctttatgaacaccgtcgttgcttcgataacatcattggctactgtaacaccctctgctatcacggtaagttgcagcccaaacgaggggaagaaaaagagacaatatttccagcaatgggatatttgcatatcgatggtaaaggtatgcaggccaatggtggaagtcgctataacgactttgaagcgaagacgatagcgacatggcttgcagtgcacaaagaggaaatcgagcgtcattatggcgaacctctacataaagtagtgggggttgttaccccattttcggcacaagtcagtacgattaaatcgtcattacgtaagctggatatcaattgcaatggtgacgaaaacttgctgacagtaggtacggttcactcattacagggagcagaacgggcaattgtgcttttttctcccgtgtattcgaaacatgaagatggcggatttatcgacagcgacagcagcatgctgaacgttgccgtttcacgagctaaagacagcttcctggtctttggtgatatggatctgtttgagatccaacccggatcgtcacctcggggattgctggcgaaatacctgtttgcttccactgataatgtattgcagtttgagtttcaggagcgccaggatttaagtacctcacaaacgcagatttcaaccctacacggggtggagcaacatgatgcgtttctgaatcagacttttgatgccactaatcagagcattactatcgtttccccgtggctcacctggcaaaaactggaacagacaggttttctggcatcgatgtctcaggcgcgcacccgtggtattgatatcactgtagtaacggataaaacgtttaatacagagcatgcagattttgaaaagcgcaaagaaaaacatcagcgcctaaatgaagcattggaaaggttgaatgaaatgggcgtcacgacaaagctggttaatcgtgttcacagtaagattgtgattggtgatgaggggcttctctgcgtcggttcctttaactggtttagcgctacgcgcgatgagagatatcaacgatacgatacgtcgatggtataccgtggcgaaagtttaaaaagcgaaattaaaacgatatattctagcctggaacaacgtcagttgtaa

SEQ ID NO: 104566 - DNA, 936 bp, Enterobacter aerogenes
atgaataataaaatcgacgttagcatcattatccctgtttacaacgcggctgcgaccattgattgtctgatcaataaaatcctcagcgaaacccacgtagctattgaacttatcgttgttgacgacggttctaccgatggtaccggcagcattatccgtcaaatccacgatgaccggctcattctgatcgagcaggccaatcaaggtgtctatgctgcccgaaatgctgctctagccttgcaccagggagagtgggttatattccttgatgcggacgacgatatagcagatgggttcattgaaaaaagatggcaagcagctagtgcgttgtatgccgacgtcatgatctttaatggctggcattctgatgctgaccaacaccatcgaagagcagtccaccgaaagcagccatatggggcgaccctgtcaggtcatgagtgggtcaggcactgcgttacacgccgtgaatggccacattacctctggttgcagatggttaagtcagcctatatcaggcagcattcactgcgcttccaccccggcaggagtcataaagacattctttggacggttcatcttgcagcgagcaatggccggttctgcgtgttggatgttaaggactatatctatatcagtactaagacctctatcacgcaccgaccggattactatgatgttcgtgctataagctatgttgaagtgatcgcggaaatcatccagttagcggaacaaaacaaaaaaataaaggtatttttgtaccggcatgcgctggtggaggctcgacactttttggggctttaccgaaaaaaggtttgggataattccaacgttaaaaccagtttcaacacgaatatatcccttatcaatttattacaaggtattagcagcattagtgacatatttttctttatcaagctaatgcgtaaaattttatag

SEQ ID NO: 104567 - DNA, 168 bp, Enterobacter aerogenes
atgaagagatgtgcacgttgcaacaaaaaaagaagtgtccttgagcgatggctctcactcgataaagaattttgcgatgagtgcttatttgatatcgaccaggagatcagggaaaaacaaattatcccgatcaagcgtcagaacgacggtaacgaaaggaagtcgtaa

SEQ ID NO: 104568 - DNA, 369 bp, Enterobacter aerogenes
atgcggattttaaaatgctatctagccaacaatgcccggaacaaatttgttaatgcaaaagaggcctctgacgaaacaggaggccattggacctgcgccagctgcggctgcaggcttatcttgcataaagaggatgagaaagaaggcccctggtttgaacatgtccagcactcaatatctcaccacgaactgatgatgtgcgcctgggtcgacccgctggagaaagaagctacccgcatcagaaaactacggcaggtcacttatgcaatcgatacatcccgcaaaccgcttactcactggcattgcgtactctgcagcgaggattacgttggcaataagcattgtataaattgccattctggaatctag

SEQ ID NO: 104569 - DNA, 207 bp, Enterobacter aerogenes
atgaccaacccagcaagtattctcagcgacaaattcgtcgatatggcgtttatcacccagctcacaggcctgacgcatcaatggttctacaaattgatacaagacggtgagttccccaagcccataaagcttggcagaagctctcgttggctacaaagcgaagtagaagcttggctacagcagcgtatcgaccaatcccgccagtaa

SEQ ID NO: 104570 - DNA, 588 bp, Enterobacter aerogenes
atgtcataccgcgacactaccgacatcaaccttagctacgttcagcacccgaccctgaatcgaaagctgcgacgtcatcagaaccaattatttgagcgttattccaagctgctgatgctacgggtggatttctcttacctgcaggacagcgattcacatggtgatggggatattcactctacagtggcagatatcacgctgatgctgcaacgcagtggggagatcaacgggctggtgggttacgcatgggtattggagcataccgagcggcatggctatcacattcacgccgcattttacctgaacggccagaagcatcgtcaggcatggacggtctttgaagcgctgagagatacttggaaatacgtgacctgggaagaggggcatgcgcaccggtgtgagcccaaggagcattataaagttcggggagaatgggtgacggcctatgacgatattaagggccgtaagaacatgcagtacatactgagctatctaagcaagcaggagcagaagactctgggcgttatctgccagttgagtgatatcccagacccaccggtagcgggtagacggcggaaagccagttaa

SEQ ID NO: 104571 - DNA, 1206 bp, Enterobacter aerogenes
atgacgagcttgtgggatgacttccgcgtgtttggtctgcgccgtgaagaccttgcttatgagagcccctgccaaaaatggatcgatatcagcagacgctacttcttcgttggattcaagcccataaagtctgacgaactgcccagaaagaacgataaggccagtccgcgtttcataatgttcgatctgctggacaagctgtaccgaagtcaggcgaccagcgatgggcgagagttcagaaggccaaatctgaagcttcgtgattctcagccaatacgaagtgaacgtatagatgaagaatggatagacgttctggggaaggggatatttgaaaaagaaaaggcattgtcttatctctgtgaaagctatcgtaatgttgtaaagaagcatcgcaaggtcgaaatgttgacaatgactttccatttaccccctgaggcgagtgaggcccagtcggcacagaactttcggaatgaaacggatgactctcgtttcaggctacagctggctgtacttgaacgacgttttactttgttgagaaaacggataaacgcggatccgctctacaaagcagcatgtggttattcgcggatgatactgataaacgcgaaatttgaaccttactatctggttaatttcttctttaaaaaacatcctgtcagcccaattgacagcttagtcccaataaatatttataagaaatggattagggcagttggtgatgagccccgaattaacagtagggttaagtactactgcttatatggagcttcccgaccatatgtaacagacgacagttggctattagtccgtaagccagaacgaatgacggatgttggtcaattttcggaccctgtctcgttagtagtgttagaagacaaaaagtttgataacaaccgcaaaggttatctggctctctttcgacttcaggcccaaatctacaacgtcattcctagagcccgcaccctgacatgttccgatgatctcacctatatcaacttagccgagaagaaacgccgaaaggttaagaaaataggcgcgaagaacaatataaaaatggcattgcctgaagttgtgagttcagactcatcagatcattatgatactgatagcgaggcgaccgttcagttggaatatcaggattccagatgtgaaggtttcttacctacgaatctcgaggagcattttgagtatgttgtgaagaagtag

SEQ ID NO: 104572 - DNA, 2772 bp, Enterobacter aerogenes
atggtatttagaaatctcaggccatctcttgttgagctggttaataacagtgaaatgagtataaagttagacgttagtgacggtagtaaaaaagaatttgatgcgacgacgtggtttggtggaaagccaaatgttattattggaaataacagctttatcagtaagtcaggggtattggaaattgatattcccatagactcatttattcaacacaatgatcttacactggatatcacgctagcgattaagaacaaatctaataatctaatctcttcatattactttacctatgatatcgctaaattgggtgaaaatggcgtgatagcgcttaaatcaaatgatcgtggtgcgcaatacttatcgatgcagctaaacaaagcggattctccttgtcttgttcgcctaaataccctctttgctcgccagcttgttgctcgagccaatactggcattgataccattctatcactgtcgacacaaaacctgcctgaacccaagttggaaggcagcggggtagaacctatggacttctctggcgctaatgcgctctatttctgggagttgttcttctataccccaatgatggtggttaataccttgctgcaggataataactttactgaagcaagacgctggctgaagtatgtttttagtccgaatggctatattgatagtggggtatacgatgatcgaaactggaacgttcgacctctactagaagacaccagttggaatgaagcccctcttgactccaacgatcctgacgccgtagctcaaaacgatccaatgcattataaagttttcgcctttatgaagatgattgatcttattgtgatgcaaggtgatattgcttaccgccggcttgaacgtgatagtttaaacgaagctaaaatgtggtatatgcaggctatctccctattaggtgatgaaacaccggttgcctctaattctaattggggtaatcccgtattaggagttgctgccgatgccacaacacaaaatttttaccaacacgttctcatggttttagatgccgaagcagatatagagactccatttaatgccaattcactttcctcgctctttttcccacaactcaatgagatgctcgatagctacaggaaaacgctaatccagcggatctataacttacgccataatttatccattgatgggcaaccactctcgttgccgatttacacaaccccatctgaccctaaagcactgttaactgcggcggtcagttcctcactgaatggtggtggtaacagcatcacaactgtaccactgcatcatttttcaacgctactcgataatgccaaaggcatggtaaatcagttgattcaatttggtaatactctactttcgctgtgtgaacgtcaggatgcggaaggattagctcagcttttacagactcagggaagtgagcttattttacaaaatattgcgatacaaataagcacgattcaggagctggatgctgagaaagaaacgctgctggccagccgtgaagcggctaacattcgggcggagcactacgggaaactcttcgatgagaacattagcgccaatgaatcccaagcaatggagctctattttggctcatccatcgcttcttccaccgctagtggtctttatatggggggggctattgcagatttagctcctaatatcttcggtgttgccgtcggcggatcccgctgggggggcatatgcaatgcgatcgcaatgggaatagaaattggtgcatcagtaactcgtatctcagcggataaaattagccagtccgagacctatcgtcgtcgccgagaggaatggatgttgctccgtgatacagcaacggctgaaataaaacaggtagatactcagttaaacgcactgagtattcgtcaggaagcggctaatatgcagaaggtccttctggaaacccagcagtcacattctcaggctcaacttgcttttttacaaacaaaattcacctctcaatcgctctatagctggctaaggggtagtcttatggcaatctactcccccttctatgatctggccgtatcccgttgcttaatggtggagcaagcttggtgctatgagttaaatgaagcacgaacatttgtcagaccaagtgcctggcaaggtacttattcaggccttcttgcaggtgaaaatcttatgcttatgctggggcaaatggaaacagcctatctggagaaagataaacgtgcactcgaggtcacacgcaccgtctcattagccagcgtttatgctggtttagggaatgataaagcctttaccttcgatgatattaccgatctagttaataagggcgcaactggaatgcttggcgataacaacaacggggtaaatctcaatacagaaacaaaaacactaaatttcacttttaaactcgatgggttagaaattcataaagattatcctcagcaactaggtgatgccaggcgcatccggcagattagtattacgttgccaacattactggcaccttatcaagatattcgtgccattcttagctatggaggtaacgaactgccagccagccagggccgtgaacatattgctatatctcatggtatgaacgatagcggccaatttcaactggactttaatgatacgcgctacctaccgtttgaagggctccccgtcaatggtcagggtacctttggactacagttccctgatgccgtcgatgggcagaagacgttattgcaaaatctaagtgacgttattttgcatattcgttacacaattcgttga

SEQ ID NO: 104573 - DNA, 4308 bp, Enterobacter aerogenes
atgcaatattcccaaaatgtacaattagagcccccttcattgccaaagggtggcggagctataaccaacattggagggaaagtaggcgcagttggacctgatggtgcagcgacactcgcattacccttaccgattacaacaggcagaggttatgcaccttctattagtctcaattatagtagtcaaatgggcaatgggccgttcggtataggttggttcattggcctaccctcgattagccgtcgcactcataccggtgttccaacctacggaatttcagacgagtttgttgcgcctgatggtgaggtgttagtacctttattagatgacaaatctaatcctgttgttgagtccagggtaagtctattagaagccactctgagtacctctttccgtgtaacaacttaccgttccagagtagagcgtgattttagccgtttagaatactggcaacctgaaaaagatgaaaatgtcaatgatttttgggtgtggtaccacccggatggtcaggtccacttgctgggttatgaaccacaggcacgaatagaagcctctgctgataatactcatacggcacagtggctactgaatgcagcggtgtctgcaacgggtgagcaaatttggtatttatggcaatcggaaaacgaagacaattgcagttcggaagagaaaaatgcacacaaaaacgcgattgctcaacgttacttaagtgaagtctattacggtaatctaaaggccggacggacatttccctgtttaaatggacaaaatgcacttaaagctggctggctgtttatcctcgtctttgactacggcacacgtagtactgccgtcactgatattcccgtctttacagcttccggacaatggccttgtcgtcaggactgtttctctgactatagttatggttccgatcttcgtacccggagactatgccggcaaatcctgatgtttcatcggttggagacgttagcaggtaaagcctccggtgaggatatgccggcgttagtttcgcggctgctgctaacttataatgaatcgcccttcatcaccacattagcctctgcccgccaaatggcatttgagggcaacgataaaacatatccattgacactaccgccactgacactgtgctggtctgcgtttgatgaaacagcaatttcaccagactggcaaagcctcgatcttaaacacttaaatccgctgcaatcctggcaataccttgatttatggggagaaggcatagcgggaatattataccaggacagtggtgcatggtggtatcgtgcaccggagcgtgacagcgaaagcaataataatgcagtaatatggagtgaggcttaccctctaactggcattccttcactgcgttccggctcgatgctaattgatctaaatggtgatggatacctggaatggctggttacacatgctggcgttagcggccattacgatcgtgacacgaacaatgctgaacaatggctgcaattctcgcccctatccgcgttgcctgtagaatttagtcatcctcaagcccagctaaccgatattaccggcagtggaatctccgacctggttatgattggccctaacagcgtcagactctatgttggccagggagaaagctggctggcaggtcaaaccatcctccaatcaggtagtatttccttaccggtacctaacgccggtcaaaaaactctcgtcgcttttagcgaccctcttggctctggtcagcagcatcttgtccaggtggatgccaatggtgtcacctgctggccgaatctgggacatggtcgcttcgaccaaccgatcgtcctacctggatttagtataccagagcaggactttaatcctgatcaagtctatcttgcagacgttgatggaagcggggctgttgatgtgatctatgcttatcctgacaggcttgccattttccgaaaccagagtggcaatcagttttcagcgccattggatatcgcattgccgcctggtgttcattacgatcgtacgtgtcagttacaggctgccgatgtgcagggattagggttagccagtttgttgcttattgtttcccatatgaaaactcagcactatgtactgcatcttacaaaggagaagccctggctgctcactgaaacgagaaataatatgggagcagttcaggtgttgaaatatcgcagttccgcacagttctggctggatgaaaaagcagaggcaaaggaacatagagcttcgccaccttcctgtcatcttcctttccctttacacaccctatggcgcaccgaaacgcatgatgagatcactggcaaccatctggtgagtgaaatcacctatcgccacggttcttgggatggaaaagaacgagaatttcgaggttttggctatgtcgcggttcaagatactgactacgttgccaccagtgatgacactaataacgtagtattcccgtctttaacgtgcagttggtatgccacaggtatcgatgtaattgacaccgcatgtatatcctcattttggtctggtgatgataattcgcttacagcgttcactccccgttatacatcgggtgaaagcgatgatgaagctgaatgctccgcagaagagcaacagcaatatgcattctggcttactcgtgcgatgaaaggtttactgttacgcactgaattatatggccttgatggcagcgagttggcaaagataccctatagaattaccgagcaacgcttacaggcccggctgattgaaaaaaaaggaagaatgccaaccgtctggccctccgtaatcgaaagtcgcagctacctctatgaacgtgtagccgccgatccacaatgctctcagcaaatcacgttaagcagcgaccgatatggtcagcctttacgggtggtaaatgtcaactatccccgccgaatacgacctgctatcaatccttatccagatactctacctgagactctatttactagtagttatgatgagcaacagcaaaaattgtatctgcttttttcacagtcctcttggtatcatttggataatctaccaaaaggtgaatggattactaatctgccagacaaaactcgcagcgatatctttactgtcgaattagataagctaccctctggggggatgagtctggagattttgaacagcgatgatagccccattgctgatagcaatccttattcattagcaggacaacaacagacttactggctggatataaacaacacaccgatggcaacaataccagcctttcctcctcgtgtagcctttagtgatacagccactttcgatgaggaaatattgcaacaattacaaatttcattacctgatgatgacattttcgaacaacttttaaaggctggttatcgacaggccgattacctctttacgcgaaatactgaaaaagcgaaaaaactctgggtcactcgttcagggagcactgattatgccgataaatctctattctggcatcctctcgcctatcgcaactcgccgttaactgggaaaaatacgcttacctgggacccgcacagttgcgttattacccaatccagagatgctgcaggattaaccgtcaaggcgcagtatgactggcgattcctgaagccaactcaaattacggatattaacaataatatttacagcattacgctggatgcactgggccgggtgaccagtagtcgtttctatggtacagagaatggtgccgtggcggggtacagtgacaaatcatttactgtcccagctaatgctgaagatgtattagcacttagtgctccactccctattgcgcagtgctatgtttatatttctgatagctggacatgggagaatactcccaaattacctcctcatgtcgttgcactcaccaccgatcgctatgacagtgattcaaaccagcaaattcggcagcgtgttgtattcagtgacggttttggtcgggagttgcaaagctctgtacatgttgaagctggtgacgcctggcaacgtaccgatgaaggggtattaaaagtcggtgctgataatttacccgaagcaagatatacgaattcacgctgggtcgtcactggtaaaactgaatatgataataaaggtcaaccaattcgcacatatcaaccctattttcttgatagctggaagtatgtgagagatgactctgcacgaccagacctgtatgcagatacgcattattacgatcctgtaggacgtgagtggcaagttaaaacagcaaagggagggctacgccgccagttatatacaccatggtttacagtgattgaggatgaaaatgatacggcgggtgaatag

SEQ ID NO: 104574 - DNA, 159 bp, Enterobacter aerogenes
atgagtaacaagaaacaaaaacgcgccctcagcactcagggagacaccccgctacagggcaatcattcttataacggacatgttgtctacttttccaaccccaattacgaagggatggaagagggctggagtatgggtttcgctaaaaagatagattag

SEQ ID NO: 104575 - DNA, 1641 bp, Enterobacter aerogenes
gtgctgggtaccctgattgacaatccggcagaggtaaatacgctgttcacagcaggcggacaacaaaaacaacttcagccgggtcaaaacctcatatggacaccacgcaatcaactgctgcaggtgatgccggtggtgcgtgagggcggcgctaacgacagagaatgttatcgttatgacgcaagcagtcaacgcgtgctgaaagtgaatacccagaaaacaaacgccctcatgcaaacacgaaggataatatacctgccagggctggaattgcgcgcgacatctgcaggtaatacagaaacggagagcctgcaggtcattactgtgggtgaggccggccgggcgcaggtgcgggtggtgcactggacatcaggcagaccggatagtatcagcaatgaccaggtacgttacagctacgataacctgacgggcagtagtcagctggagctggacggcgacggcaatatcatcagcatggaggagtattatccgtacggtggcacggccatcctgacggcacgcagccagacagaggtggaatataaagccatccggtactcgggcaaggagcgggatgcaacggggctgtattactatggttatcgttactaccagccgtgggcgggcagatggctctccgcagacccggcgggcacggtggacgggatgaacctgttcaggatggtgcggaataatcctgttgcgtttattgatagtaatggccttaattcagaattgttatattctccggcattcaaacggacggcaaagaaatataacgtaattattggtataagggatccgaatcctttgggtgaaactttattaaaagaagggttcccatcaaagaatttccatatgaaggcaaagtccagtccaacaggaccaaccgcaggttttattgcagaagacccgatttactctaaggtttcaccttctgaatataaaaaacagaaagcatcaattgataaggcaaaagctttgggctcgaaatctatatctttatccatcagcaactcacgagttaatgagttaattgacactgggaatttaaatgctttaggcggaaatcgttactcagcgaagtatccgagcggcactcaagaatttaagattgaaaataatggtgggattttaaattcagagggaaaacctgtaaaagtaatgactaatccaccggaaattggaggagcgaaagccaatagcttacccataacagccgattacgatttatttacaattataccaagcatcaatcagtcctataatgaaaggcccctgacagtgcctcaaaggttgttacgtggtaatttttctctccccttcataagtccaaaagggaaaaatggcatgagtgaagatgtaaacatggggaatcttcatcattttgggaaagtgattatcggcaatttaaataatgagattaacgcagagggatatgctggaggtaaattggtctggcataacgatgaaacagggaatccatttagccctgggtttgatgagaatgataaaccaattttctttctcccatcaggagatacattccaggcgaaaaataaaagtgaactgcttgaattctattccagattgcggagaagtggatacgctccagagtatagtccaatttttggtttttaa

SEQ ID NO: 104576 - DNA, 381 bp, Enterobacter aerogenes
atgcttcatcagcagggtcagtgcggccatccgtcggtggttcattatctcatcatcatcaatgacggtgacatcaaccagcgggaatcctttcgagtatacctttccggcctgctccggattactgaaacaatccagccagttagtggagaacggatacgggctccggctaccgtggtaaaacaataccgggatgaccagtggcagttttttatgaccagcttcaagatgacgttgcatggcggcgacagcatatctgagctggcgaaaggccatatttttatccgccgaactctggtgttccagaagcagatggatgtatccgtcatcgccggtggtagttttcatactccagagaatgtcactggcgtactgacgtaa

SEQ ID NO: 104577 - DNA, 234 bp, Enterobacter aerogenes
atgcaacctttcaggctctgttgcaaatttagtgatgaggcaaccttttgtgttattgaaaagccttacatttcaaaaaaccggcttaccagacacatcctgtttcatccactcccgggcggcttccggaaccaggacaagcggccgccgatcatgtatatcaacgaggccttcatcagctgcggccgtaacaatcagaaacccttcagcctcatgatttataataaaatatga

SEQ ID NO: 104578 - DNA, 1635 bp, Enterobacter aerogenes
atgctgagcacgcagacggaaaatccctcagacgtggacgcgctgttcacggcgggcggacagcagaaacagctgcagccggggcagagtctcgtctggacggtgcgcaacgagctgctgaaagtgacgccggtggtgcgagagggagacgcggcagactatgagggctacagatatgacgcgggcagccagcgactcctgaaggtcagcgtgcagaaaactggcaacaacacgcagacgcagcgggcgctgtacctgacggggctggagctccgaactatggtcagcggtaacacaaaaacggaaagcctgcaggttattacgacaggtgaagctggccgggcgcaggtgcgggtgctgcgctggacgtgcggaaaaccggacgccatcagcaacgaccaggtacgttacagctacgacaacctcaccggcagcagcagcctggagctggacggtgaagggaacgtcatcagcatggaggagttctatccgtacggcggcacggcggtgtggacagcgcgcagccagatggaagcagactacaaaacggtgcgctactcgggccaggagcgggatgcgacgggactgtactactacgggtaccgttactaccagccatgggcgggtcggtggctctcatcagacccggcggggacggtggacgggatgaacctgttcaggatggtgcggaataaccccgcaacccttttagatagtgacggaagacttccttcctcactggagcaaaatgagattgacgctcacgccagacgtgctgggctccagccgtcaatacagaattaccagcaagctttgcacggggtatttcacgcacatggcaaagatgcttataacgaattatggatttcacttaatcaaaaaatccctttaaatagtactgataacatcactcataaacatatggcgagtattgctgactttgttgaaaaaagaaaaataatttcagggatgatttattcaagtacaactccggccaatatggatatcgatataactcaggtcaggtttcatcttcagaagataccattaaatgtattaaaaaaagcgaatgatttgggacagtttattactgttaccaacgataatataactaatcatccaaccagaaataatcttaaaggtgtcacgcccagaggttggaacaatggtctgacatgggaatctgttcctggtgttggagctatggggaaaggcaccggtaataatttacatcctgatgaaaccgtaattgccttaagaaaaaatgctgcgcaagaatggcagatagccaccggacacggatcaacaagtttagttcttcatgaatacgcacatgctatagaccgaagttttggagaaaaagcaaatatgggtgacacgggatcaggcgaacaaggggactttttgagcagaaggagaagtttcagagtcgcatgggaggctgatttgaatggaactccaaatacagccagtgattactattactggcagggaggaaacgatggtggtgcagaggaggcttttgctgaaggcttcagcgatatttatgccgagacaggtaggtataactggataaatataaaggcttatatttacaaaaaaatgaaatcaattggcacttatcaatctggataa

SEQ ID NO: 104579 - DNA, 456 bp, Enterobacter aerogenes
atgggctttgaaaggcttgagcggagtgcggtgaaagctgcacgctccgttcttaggggaggatggatcagtaatggtctgtccttacccgactcctgcacaggtgagttatccgagcagaacgacctgttccggctgacctatgcgctggaaaccgcgaaagacatgagctggaactaccgtctgctgagcgatcgggaatggtccggccggaatgccgtgccgctcagtgcgagcgtcaatgggatttatctctcacgggccaacctcgatgtcgcttttgacgacaccggccgacagataaatccgctgacagcgcgtctgacggggaacgtagcaggagtgatgaagctgtttaatcactgtggctggcaggcagagtctaaaggggatgcctccctgccccaccattttacgctgatgaccggacagggagtgacaggaaatgatgattag

SEQ ID NO: 104580 - DNA, 1695 bp, Enterobacter aerogenes
atggctacgcaaaatatttgcgtgggtgcgccctcacacgaatcggttatatggcccaatattaactgggagaaatgtcaccgtgaagtgcgaaagctgcaggtgcgtattgcaaaggcgacacgggaagggagacatgggaaggtaaagtccttacagtggatcctgactcactcgttcagtggcaaagcattagctgtcaaacgagttactgaaaatcagggtagtaaaacaacgggtgttgacaggataaaatggttaacacccgaagccaaatctcaggccatattgtcactcagacggcacgggtactcccctttgccgctgaaacgtgtttatattccaaaatccaacggaaaaagccgacctttggggatcccaacgatgaaagaccgcgccatgcaggccctctacctgctggctttggaacctgtcgcggaaactacagcggatcggcgctcattcggatttcgtaccggaagatgcacggcggatgctataggacaatgtttcaacagtcttgccaagaagaactctgcacaatgggttctggaaggtgatataacaggctgttttgacaatatcagtcatagctggctcttggccaatattccgacggatcgcaaggttctggagatgtggttaaaagttggttatatcgaaaatcagcaattctttccggttcacgcgggtacaccacagggagggataatatctcccactctggcgaatatggttcttgatggactggagtccatactggatctcagttttggcaaggtaactgcccgtcccggtaaaaaggtgaactatatccggtatgcggatgatttcatcataaccggagactcgaaagaaactctggcaaatgaagtcgttccacttgttgaacggtttatgcgggaaagaggtcttgctctgtcaccagagaaaacccggatagtccacatcaacgatggattcgacttcctcgggcagaatattcgaaagtatggcaacaagcttctgatcaagccatctcaatcgaacactgctgattttctggctaaagtgcgctcaacgataaagggaaacaagacgaccagccagcgaaatctaatctggctccttaatcctataattcggggatgggcaaactaccatcaacacgttgtctcaaaggaaatcttcgaacgtgttgatcatgagatctggcgtgcattatggcaatggtgcaggcgtcgacacccacagaaaggtaaacgatggattaaagatcgctattttcgtaacttgaaagggcgtgattgggtctttgcagaaaaagtggtccaggcatcctctggtcccattttgtgtctgggtaaagcatcggatacgaaaataaatcggcatatggtgctgaagctggacgcttgtatattcgaaccacaatgggagatatattttgagaagcgactagccctcaaactactgaactcactgcaaggtcgaaaaaaactgctgagcattttgttacgccaaaatgggaaatgttttgtctgtcacgaagtcattacatctgagagcggatgggttgttcactatcttgttcgacgagttgatggaggaagcgacaaaagtaccaatcttgttatgattcatccagattgccatcaccaaattcatgccaataccctgacggttgtagaaccggcccgcgtcaatgggctttga

SEQ ID NO: 104581 - DNA, 948 bp, Enterobacter aerogenes
atgatcctgctatggcggatgatcaaagcgggccacgtcgatgccgggcttttccgcgctgccagtgaaggggtaccgcagggaggcgtcatatcgcctctactatcgaatatcatgttaaatgaattcgataaatacctgcataaacattacctgagtactgaaagcaggaaagagagagaaaagtggaaccggtctgtccgtaatgggcaagctgtagcgatactggagcacaggcaactcaggccagccgtttcatattgtcgctatgccgatgattttgtgatcatcgtcaaaggcacgaaaacagacgcgctgaccatccgggaggaatgccggtatgtgctagaagatagcctgaaactcaggctaaacatggaaaagacaaaagttactcatgttaatgacggctttgtttttctggggcaccggattatccgcaaatgtagccgctatggcaaaatgcgggtagtcaccacgatccccaaagaccgggccagaaacttcgcagcatcactgacggcactactatcaggtaactacagtgagagtaaagtcagtatggttgagttaatcaaccgtaaactgaagggctggagtgcgttctatcaatttgtggacttcaaggccagaatattcagttatattgaccgggttgtgttctggaaactggcttactggctggctcataaataccggaaaagtattaagcaactgatgcgcatgtggtgtaaaacaccaaagccgggcatgagcaggacctggattctgtttggcaaggctaacaatggcagcctctgtggtgaaatactgtaccgtatggtcggacaaggtaagaaaagcttccggtggaggaatcccgaaggtaacccttatctgaggactgaatccagaaatacatggacctcgcgctacactgaagtggctatggcactgaacagcatttag

SEQ ID NO: 104582 - DNA, 252 bp, Enterobacter aerogenes
gtgtccggaaagacggagtacgacaacaaggaccagcctgtccgtacgtaccagccgtatttcctgaacagctggaagtacgtcagcgacgacagcgcccgtcaggatctgtatgccgacatccattattacgacccggtcgaccgcgagtaccaggtgcagactgcgaagggcgggcttcgccgcaaccttttcactccgtggtttgtggtaagcgaggacgagaacgatacagctgaagaaacacgctga

SEQ ID NO: 104583 - DNA, 1317 bp, Enterobacter aerogenes
atgcgtaagatccgattcactgaacaccagatcatcgccgtattgaagtccgtcgaagccggacgtaccgtcaagaatgtgtgccgtgaggccgctatttcggaagccagttattacaactggaaggcaaaatatggcggaatggaagcgggtgatattaaaaaaatcaaagaccttgaggatgagaatcgacgtctgaaacagatgtttgctgatctcagccttgagtgccgggcactgaaagacgtcatcaaaaaaactttaaaaccagcgataaagcgtgaactcgtcagctatctgacggcacaatttgccatgagtttacgccaggcctgcaggacgttatcgctgagcaggacggtctatttttaccagcccgatacccgacgtgatgaaccggtgatctgttcgctgactgaactggcagaacgctatccgcgctacggttttaagaagttgttccagctgctgcgcaggcagggcaatacctggaaccataaacgcgttcaccggatttactgcctgttgaaactgaattttcgtcgcaggggaaagcaacgcctgccggtacgtaacccagcaccactggcaacaccgcaagcgttaaaccagagctggtccatcgattttatgcacgacgagttggtctgcggcagacgcttccggacctttaatgtggtggatgattttaaccgtgaagcactagcgttagaaatcgacctgaatatcccggctcagcgagtcatccgggtgctggacaggatcgtggcaaaccgcggctacccgctgaaaatgcggatggacaacgggccggaactggtctcgctggtgctggcacaatgggccgaagaacatggcgtgcagctcgaatttatcaagccgggtaagccgacgcaaaatacgtttatcgaacggttcaaccgggcataccggacagaaatccaggccaatttcggcacagcctcgcagttttggctgccgcagacctggcgtgacagtctactgatcggctgccaacgcgtgacccgcgaccggtatcactgcgtgatgtgcagcatcagaatgcgccggactgaccgtcagcgcggaatacgactggcgcttcctgacgccggtgcggctgaccgacatcaacgacaacacccactgtatcctgaccgacgccctgggccaggtgcgggcaggctggttcagtggcaccgaaaatggcgttgccgtcggcttcagcggtccggcgggcttctcgctgccgggctgtgcggacgaggcgattatcctgaccggctccctgccggtcgcacagtgccacgtgtatga

SEQ ID NO: 104584 - DNA, 840 bp, Enterobacter aerogenes
atgattgctgttttaattatcctgtatgataaagaaatatctgagtcggcaacagtttcctctcttttgaaatctggtttgataggggcaaaagttgttcttcataataatgggccttgtgaaattagtatatcagacgagcaacaaaagactttcgatgcaagtggcaatgattttgtgttagttaattgcataagcaatgaacctctttctgttgtatataatgatttcgttagagacaactctcattgtgatgtgttctcattttttgacgacgactcaactatacctgagaaatattcaaccgtcattggaaagaagggggttgaaatcgagcttcctaaaataatgtctcgaattgacaataaaatctactatccacttgtcgatgaaggcgtgtttaatgaagatggcttaatattaggtggtaatatcttctccatcggttcaggattaacactcactaaaggtgttgttgcgaagtttataaagaacaaaatggatttattcgatgagcactatgcattgtatggggtcgattttagtttttttagacgcttgcatgctctacaagtaaaaggtgaggttttttctatatcctctagttttactttgctacattcgttatctaagatcgaatccgtacagtctaagttcagacataatgaacgtttaattgactttgcattgactgtcagacattatcctagcacgcgcttatatttagccttcatcaaaaaaatcattctatgtctttttaagttaaatgttaatgattgtattttattgttgaaaacctttttgatgggggcacacccaaggtgtgaaaaatataagtga

SEQ ID NO: 104585 - DNA, 930 bp, Enterobacter aerogenes
atgaatctgttcagaatggtgcggaataatcctgtatccatgaaggatgacgatggactgattggcagaaaagtttctctccgtttcggatcagataatacgcagctgcaaaagggaaatattactccactacaaaatcgtggattgcttgtaggcagtaatagtgctgaaactacattgccattcgtcatcaatagatttgattcggttgaacataatccagaaccaagagagtacagtccgcagttattggaaagtggtggtgatttatacaatgcggttgttgtttttcgtggttctcaggcttcatccagtgagtttggctctggaacaatagggactcattggggccccaaaacactttctgataatattaccggtatcaatgttgtaaatggcatgtctggctcagtgggcatccgtatccgaatggatgatattaaagtaggagaacctattataattacttcaggagccctgagtggctgtacaatgctatacgccatagataaagagcaattctatgcggttcataccggacaaaaaccaggtgataaaaactggaaaaccggtattcagggggtgagcacaacacagctcagtttaagagcactgtcaggtaaggttttaccggtagcagggagtcataataatgacttgattgatacattaagtgagtttgaaagttctgcgataacttattttggaaaagaaggaacaaggattgatcaaaatcgagaaaatatctccacatttgattataatcaggctcaggctccccgcttagctatcagggctggctatagttacgctctattagcaaaaagcgcagggaaagtcaatgtgaaagtattgtcggaggatgtgactatcaatctgaatactaaaaaaattagtgttattaactcaatgaagacccgcttgcattaa

SEQ ID NO: 104586 - DNA, 201 bp, Enterobacter aerogenes
atgatattcccgtggcacagtaatatcctcatcattcagcgtttcgtcctgactccgaagatgagcaaaagctgcctgtatataaatcctgttccacttcgggaatggagtattattgactttggctcacagaattatcgcagccaagtgggcggtaacgaattacttcagggaaagagcgaacatgtccataactattag

SEQ ID NO: 104587 - DNA, 786 bp, Enterobacter aerogenes
atgagcgtaagagaagccggcatttatactatttcagcattgggtgaaggtgccgcagcaaaaggccacaatattcttgagaagactattaaacctggttcattaaaggctgcttatggtgataacgctgaatctattcttgagctggcaaaacgtagcaatttagttgggcgagtaggtcagtgggatgcatcaggtgtaaagggaatttatgtgcacaacagaccgggaggtgaagatgtggcttatccagtcagtctgcaaaataattctaataatgaactttttaatgcatggataaaatttaaaatcaatacgccctatactggtgattatgacatgcacgatattattaagttctctcatgggaaaggacatgtgcccactgcggaaagtagtgaggaaagaggaataaaagatctgattaataaaggtgttgcagagatcgacccttctaggccctttgattatacagcgatgaacgttattcgccatggtcctcaggtaaactttgttccctatatgtgggaatatgagcatgataaagtcgtaagtgataatggttatctgggagttgtagcacgtccggggccattccctgtggcaatggtacatcagggcgaatggactgtttttgacgatagtaaagagctgtttaatttctataaatcaacaaacacccctcttccagaacactggtcccaagattttgttagcagaggaaaaggaattgttgcaactccccgacatgctgcaatgcttgataaactgcgaagcatgcattaa

SEQ ID NO: 104588 - DNA, 363 bp, Enterobacter aerogenes
atgaaaacatatcattttttttgtgtctttcaaaaaacggttgtggttaaacttctttatcaaaaaggtaatttcataatagattgttcctacatgttccaacccagcgagctgttccttaaagcgagccttcattccattggccacaataaaattcctcacgtgaggtttcggaaaaccgtatcgagggtatcgctcggccactgcctgcaacacgacaataacgggttcgtcacgcgtggtaacccgacagttatgggaaaccgttctgctcaggttcagactccggcaggcctgacggatactgaatccaaatgtcgttatcagatgagtgaccagctcacgcttaaaagctggttttaa

SEQ ID NO: 104589 - DNA, 138 bp, Enterobacter aerogenes
atggaagcttctgatattaaaaagatcaaggatcttgaggaggagaatcggcgtctcaaagagatgtttgccgacctgaaccttgagaaccgggcgctgaaagactttatcgaaaaaagttttaaaaccagcttttaa

SEQ ID NO: 104590 - DNA, 189 bp, Enterobacter aerogenes
atgatgacccgcaaaagtatcgataccgtcctgctctccgttgccgttgatacgctctctcagcgtcaatggaactggttcaaactgatgaagcccatggagccgccccctgcgatggtcgccagtgccatactggagcaccgccacgatacggctgcactcacccgcctgcaggacaccggggagtaa

SEQ ID NO: 104591 - DNA, 669 bp, Enterobacter aerogenes
atggataaattccagcagttttatacccatatacaaaaacatccatttagtttggtaaaacatcttattggtttaagcatcaaaaaaaatgagctgccacaagatatttcgctgcaattaagtaagtatagatatacaccgcagtcttttatagacgatcgttcaggcttaacgctaccattcaaacaatttaatgaaaaaacactatatgacataattgaagatatgaatggaaatgaagaattggcatttcattcattagtcaatagtttcggtagctcttatcattttccattaattgattttggtaaagttgacagaggagttattgatgcaaatcctttacgagaattatcagagcactggcaaatgtcatttttcgtctacaatagcggaagatctttccatgcatatggtaatagattaataaaatcttcagattggattgcatttatggggagtctgcttctgttgaataagccaagcggtttcaaattaattgatgaaaggtggataggacatcgtttgatggccggttatggggcacttagatggactaataatagttcacactataaaaagaacccaacatttgtcggttacttaagttcttccggattagaatggatgcaaccagataaaatatcttctttgttaccacaatattga

SEQ ID NO: 104592 - DNA, 216 bp, Enterobacter aerogenes
atgaaagaagtattgcatgatagtgttatttattttgatccggaatgtaactatcagataattaaagctatctcactgcttaatagtgataaagagttaaggggggaactgattgttaaagggtgggataatgtacgtagattttcatggataaattcagccaagaaacttaattttttaattgagaaacttaccattgaaaaatatgttagttaa

SEQ ID NO: 104593 - DNA, 1548 bp, Enterobacter aerogenes
ttgattaacgaaaatctggtcgaccagccgttcctcgataaatactgcatcggctacgatgagaaaaccttgccggccgatgccccggccaacggccactataaagcctatattctcggccagggggacgacgctaccgccaagacaccgcagtgggcctcgcgtattaccggtattcccgccgatcgcatcattaagctggcgcgcgaaattggtatgaccaaacccgcctatatctgccagggctggggcccgcagcgccaggcgaacggcgaactctccgcgcgcgctatcgccatgctgccgattttaaccggcaacgtcggcattaacgggggtaacagcggcgcccgcgaatcgacctataccatcaccattgagcgcctgccggtgctggagaatccggtaaaaaccgccatctcctgctttagctggaccgacgctatcgctcgcgggccggagatgaccgccacccgcgacggcgtgcgcggcaaagagaagctggcggtccctattaaattcctgtggaactatgctggcaacaccatcattaaccagcattccgacatcaataaaacccacgatatcctgcaggacgagagcaaatgcgagatggtcgtggttatcgaaaactttatgacctcgtcggcaaaatatgccgatattctgctgccggacctgatgaccgtagaacaggaagatatcatccctaacgactatgccggcaatatgggctatctgattttcatccagcccgccaccacggcgaagttcgaacgcaaacctatctactggatcttaagtgaagtggcaaaacgccttggcgacgatgtgcatcaacgcttcaccgaaggacgaactcaggagcagtggttacagtatctgtacgccaaaatggtcgccaaagatccggcgctgccgggttatgacgagctcaagaaaatgggcatttacaagcgtaaagacccgaacggccatttcgtcgcctatcgcgatttccgtcgcgaccctgaagcgaatccgctaaaaaccccctccggcaaaattgagatttactccagccgcctcgccgatattgccgcccgctggcaactggaaaaagacgaagtcattaacccgctgccggtctatgcctccacctttgaaggctgggacgatccgttgcgcagccaattcccgctgcaaatgtttggcttccattataaggcgcgtacccactccagctacggcaacgtcgatgtcttacaagcggcctgccgccaggaagtgtggcttaaccccatcgatgccgaaaaacgtgggattaaaaacggcgacatggtgcgcgtttttaatcagcgcggcgaactgcgtattccggcaaaagttacgccgcgtattatgcctggggtaacggcgatgggtcagggagcatggcacgatgccaatatggctggcgatcgcgtcgaccacggcgcctgcatgaataccctcaccacccaccggccttcaccgctggcgaagggaaacccgcagcataccaacctggtcgaaatcgagaaggtttaa

SEQ ID NO: 104594 - DNA, 210 bp, Enterobacter aerogenes
atgcagaaatcaactctattgctggccttcgcgttggcaattagcgccccgtcgtgggcgcaggacgtcaatatcaatggcaccggagttagcctggaagccaataaaaccccgattcatacggcaaaaaatccgcaggcaattgcgctgttgccgaaagatctgcacctggcggtgccggggaaattaccgtcgcggttgcggcgctaa

SEQ ID NO: 104595 - DNA, 603 bp, Enterobacter aerogenes
atgcaagaaattatgcaattcatcggccgtcacccggtcctgagcatcgcgtggatcgcgctgctgggtgcggtactgttcaccacctttaaaggcttgatgtcaaaagttaaagtcattactcgtggtgaagcgacgcgtcttatcaacaaagaagaagccgttgttgtcgacctgcgtcagcgtgacgacttccgtaaaggccatatcgccggcgctatcaacctgctgcctgccgatatcaaagcaaataacgtcggcgagttggaaaaacacaaagcacaacccattattgttgtggatgggtccggcatgcaggcgcaagaacctgccagcctgctgaataaagccggattcgaaaaagtctttgtactgaaagaaggtatcgcaggctggagcggcgagaaccttccgctggtacgcggcaaattatttacccccgcgtcgttatggcgcagcggttcccccgataacctctcaggcggcggggagcctctgcggcgtaaaatccctcggggtaaaaacaggagtgagtcatggccaatattgagatctataccaaagcgacctgcccgttttgcatccgcgctaaagcgctgctga

SEQ ID NO: 104596 - DNA, 2118 bp, Enterobacter aerogenes
atgaaaccatttcgtttagcggcgctatcgttagcgctccttaccgcgatctcattaagcggctgcgataacagcggtgaaccacaggccgtatcggcggccgataaaggcgccgccgatagcgcgaaaaagccggatagcgcgcagctggcgacgttaaaagaaaaaagccagggcaaggctttgacgttgctcgacgcttctgaagtgcagctagatggcgcagcgacgctggtgctgaccttctccattccgctcaaaccggatcaggatttctcccacagcgtgcatctggtcgataagaaaagcggcaaggttgacggcgcgtgggagctggcgccgaatctcaaagagctgcgtctgcgccacctcgagccaaagcgtgaattgatcgtcaccgttgacccaacgctcattgccctcaatgacgccaccctcggcagcccttttgaaaaaaacatcgctactcgcgatatcgcgccgagcgtcggtttcgccagccgcggttcgctgctgccggggaaagtggtcgccgggctgccagtgatggcgctgaacgtcgacaatgtcgatgttaattttttccgtatcaagccggaatcactctcggccttcgtcagtcagtgggaataccgtaactcgttaagcaattgggaatctgacgaactgttgaagatggccgatctggtttacagcgggcgcttcgatctcaacccggcgcgtaatacccgtgaaaagctgctgctgccgcttaacgacatcaagccgcttcagcagccgggcgtctatgtggcggtgatgaatccggccggtcattacagctacagtaatgcggcaacgctgttcaccctcagcgatatcggcgtctcggcgcatcgctaccacaaccggctcgatgtcttcacccagagcctcgaaaatggcgccgcgcagtcggatattgaagtacaactgctaaacgccaaagggcagacgctggcgcaggcgaaaagcgatagccagggccatgttactctgcaaaccgataaagaagcggcgctgctgctggcgcgtaaagacgggcagacgacgctgcttgaccttaaactgccggcgctggatctggcggagttctccatcgctggcgcccctggcttcagtaaacagttctttatgtttggcccgcgcgatctctatcgcccgggggaaacggttattcttaacgcgctgttgcgcgacggcgatggtaaaccgctggcggagcagccggtgaagctggaagtggtgcagccggatggccaggtgattcgctcagtgatgagcaaaccggtcaatggcctgtatcagtttacttatccgctcgacagcggcgcggccaccggcatgtggcgtattcgcgccagcaccggcgataatcaaccccgcgagtgggatttccacgtcgaagactttatgcccgaacgcatggcgctgaatctgacgccgcaggccgcgcctatcgccccggatgccgacgtcgcctttagcgtcagcggcgcttatctctacggcgcgccggccagcggcaatcagctgcagggcaaactgttcctgcgtccgctacgcgatgccgtcgccgcgctgccgggcttccagttcggcgatatcgcggaagaaaacctctcccgtagcctcgatgaagtccagctgacgctggatgaaaaaggccatggcgaagtgaccaccgcgagccagtggcgggatagccattcgccgctgcaggtcgtgttgcaggctagcctgctggaatccggcggccgtcccgtgacccgtaccgtacagcagccgatctggcctgccgaggcgctgccggggatccgtccgcaatttacgctgaaggacgtttacgactaccgcaccgataccacggtgaaacagccggtggttgatgaaaacagtaacgccgcgtttgacatcgtctatgccgatgccaaaggcgagaaaaaagcggtcaccggtctgcaggtgcggctgatccgcgagcggcgcgattactactggaactggtccgatagcgaaggctggcagtcgcagttcgatcaaaaaagatctgcaggagggcgaggagtccctggatttgcaggccgggcagataggtaa

SEQ ID NO: 104597 - DNA, 912 bp, Enterobacter aerogenes
ttggcgggaagtagtcttttaaccttattggacgatattgccacgctgctggacgatatctccgtcatgggaaaactggcggccaagaaaacggctggcgtactgggcgatgatctttctctcaatgcgcagcaggtcacaggcgtaagagccaaccgcgagctcccggtagtatggggagtggcaaaaggctcgttcctgaataaagtgattctggtgccgctggcgttactcatcagcgcctttattccctgggccattacaccgctattgatgctgggcggcgcatttctctgctttgaaggctttgaaaaagtgctgcataacctgcatgcgcgcaagaataaggaagatccgaaattgcgccagcagcggctggaaacgcttgcagctcaggatccgcaggcctttgaacgcgataaagtaaaaggggcgatccgtaccgattttatcctgtcagccgaaatcgtcgcgattaccctgggtattgtggctgatgcgccattgcttaatcagatcctgattttatccggcatcgccattctcgtgaccgttggggtttacggcctggtgggcgtcattgtgaagctcgatgacatgggatattggctggcggagaagaaaagcgcactggcgcagtgggttggaaaagcgctcctggccatcgcgccgcgattgatgaaaattctgactttcgtcggtaccctggcgatgtttctggttggcggcggtatcgtggttcacggcgtagcgccgctgcatcatttcatcgagaattttgcccatgggctaagcggaatgctggcatccacattgcctgtggccgctaatctggtgctaggatttatcattggcgctatcgtctttggcgtcgttaaagctatcaccgcgttacgcggtaaagcgaaataa

SEQ ID NO: 104598 - DNA, 774 bp, Enterobacter aerogenes
atgccgcaaaatttatcccaagaaaacctcctgtctttaccgtcaggggaacacgcgcaggcgttattgcgccagctgatgacgatatatgatgtcaaaactctggtcgcacagctggtcgcggttggcgaccaacactggagcccggcgatactcaaacgggtggtgacggtgagccgtgcggcaagtagattgactaacgcggagtgcgctcatctggcgagcctgttaccggctccgccgcgccatcatccgaactatgcctttcgttttatcgatctcttcgccggcatcggcggcattcgtcacggctttgaagctattggtgggcagtgcgtatttaccagcgagtggaataaacacgccgtacgtacctataaagctaactggtattgcgatccgcaagagcacagctttaacgccgatatccgcgaaatcactctcagccagcgcgccgatatcagtgatgaagaggcggcgaagtctatccgtgaggcgatcccgcaacatgatgtgctgctcgcgggcttcccctgtcagcctttttcgctcgcgggagtatccaagaaaaatgccatggggcgcgctcatggttttgcctgtgaaactcagggaacgctgttttttgatgtcgttagaattattgccgcccgccgtccgccgatcttcgtgctggaaaacgtcaagaatctgaagagccacgatcaaggaagaaccttccgtattatcatgcagacgctggatgaactagggaaggtgcgaacaagttcctga

SEQ ID NO: 104599 - DNA, 426 bp, Enterobacter aerogenes
atgaaagaactcgaaaatccaagaattgaatccaaagttaactcctttgttgaaaaaggaaatgagttgcatgatgacaaaaaatatgcacaggcgttagagcaatatgaaaaagcctggagtattttgccagaaccaaaaccagaatggcaagttgctaactggatttccgcaaatatattcagcgcttattttgaccttggtgattacaatgaggcaaaaaaatggggcgaaatgacgttgcaaacgagagggtcggagatagatacagcgccatcgatcgatctgggtatggtttgttatgagctagagcaatttgatgaagcttacaaatattttaacgatgcttataggtatggaaaagagagagcatttaaaggtagacctaagaagtaccttgagttttttttaaataaaagggtatag

SEQ ID NO: 104600 - DNA, 204 bp, Enterobacter aerogenes; identical to SEQ ID NO: 102187

SEQ ID NO: 104601 - DNA, 1059 bp, Enterobacter aerogenes
atgtacggcggggcgaagctgacgctggtcgccatgacgccagtcattatctgctatgccattgcttttacctggatttggccttttatgacccacggcattagcgccctgaccgggtttatgaagaatgccggcgttgcgggagtgtttgtctacggcttctttgaaaaattccttattcccaccggcttgcaccatttcgtgtggtcgcctttccagctcacgcaaatcggcggcacgctaaatgtcgatggccaggtcgtctccggcacccaggcgattttcctcgcctatatgcgccatcccgatctgacaccggtgatgaacgatgcattacgtttctcgcaacaggggatgaccaccatctttggcctggcgggcgcatcgctggcgttttatcacaccgcgaagccggagaagaaagcgatggcaaaggcgattctgctgccggcgattatcacctcgatgctgaccggcatcaccgaacccattgaattcacattcttatttgtctcgccgctgctgtgggtgatccatgcgacgttaaccgccgcttcgcaggcaatttgcgatatcttcaccgtgcggccgtggggcgcctccggcctgattgaatttctgatctacaacctgccgctgccggtgtcgttaacccgctggccggggtacgtgctgatcggtattggccaatttatcgtttattacgcgatattccgcacgctggtcgtgaagttaaatctgaaaacgccgggccgcgaggatgacgataacgtcaagctatacagtaaggcggactaccgtaaaaaagtcagcggcccgcagtcgatgacggatgaaattattaatggcttaggcggtaaagccaatattatctccgttgataactgtttcacgcgcctgcgggtggttgtccataatatggcattagttgatgatgaaatattaaaaagtactggcgcaaatggcgtagtacgcaatcgtaatgaagttcaggttatttatggcgtcaaagtcgggcaagtccgttcccgggttgatagctggctagcagaaaattaa

SEQ ID NO: 104602 - DNA, 456 bp, Enterobacter aerogenes
atgtctgtaatacgtcaacgtattctggagaatatgcaaaaattctccagggccatgatcggcgcagtattgttcttgccggtcattggattaattctggctctcagttccgtcttaactaacccgactcttattgctgaaaccagtttccttcatcaattagggcaactgcttggcgataccttctggccattattcggtaacctcggattattgttttgcgtgggaataagttacggtctggcaaaagataaaaaaacagaggtcgcacttgtctcggtgatgtgttttatcatgtttctcggcgccaaccattcatggctggaacatactcatgcggtggcggaaaaaattaacggcgaatattacggtaccgggcaaacgcagctattaggctttgtggtcgtcgatatgggagtattcctcggaatcattcttggctgcaccattgcctag

SEQ ID NO: 104603 - DNA, 258 bp, Enterobacter aerogenes
atgaatgaatgttcatcagaaatgccgaaataccagtgccataaaaaagtatgggcgctaaagattcagcaggtttattcggttggtactcaaaacttcatcgttccagccgattacggatacgatgattttcctgtttctcaggaatacattgataagcacaaaccacaggaaggtggttattacgttcagtatgaaggtggctacgaatcatatagcccagcggaagcatttgaatctggttatacgcgcatttag

SEQ ID NO: 104604 - DNA, 1005 bp, Enterobacter aerogenes
atgaccagcaaattaaccagagagcagttaatccaaaaactaaagcaaaggattgcagtcactgaaaaatatccacacctggaagaggcgcagattgactcgcaaattttcaaaatagcgctggccgcaatggacagcgagccggtggaggaaagtgtaacgtgctggtcttgcaggaatgaggttgagatttctgccattggtgatcgtgatgggtactgcccgatatgcgacgccccgattgatctcgatgaagaaccatataactcaccgcagccagcgccggtagtgtcggaaggactcatttcagaactggaacaggttctcgactggatattgaacacgttaccagtgccgacgccgctgacaattccaaatgcccgtcgattagtagccgtgattaacgcctgccgcgccgccatgctccaggctgaacctgtaacgacggctaacaagttgggcacctccggtaattccggattggttcctgttcctgatgagttcctgagtgtatcccaaaatgagcatggcatgtttgaacttagcgaagattgcatgtgtcgtctggcggttgcactctctcagcagaacaaggggctagttgcgccgcccggttacgtgatggtgccgaaggagccgacagacgaaatgatagctgccgccatgaactgcgatgatgtgctgttcaatagcgatgaatcgttctgcgtacagttcgggaatatctatgaggccatgcttgcagccgccccgcagcttcccggcaatgaccacgctaccgtgtcgggtaaatggattccggtaagcgatcggatgccggagaatgatgtagatgttcagatttactgtgctgatacaaaagagcagatggttggctactttgaacgtaacgagcaagagggatatttcagatacgcaacgtggcgaactagagagggtatttattgccggccaacccactggatgccgctgccagccgccccgcaggaggttaaaggtgagtaa

SEQ ID NO: 104605 - DNA, 267 bp, Enterobacter aerogenes
atgttcagcgccgccttcgcgctgctgtcattacgcctgcgcggcattgggctgctggtgctggcggcggcgctgccggtagcatgggcgcgtatttttctcggcgtccatttcccgctggatatgctgggcgcggcgctgatttcagcactgagcctctgcgtagcaaaagtggtctggcaacggctggggcagacgctggtggcgctgtgcgaagcgctgagccgccgtctcttctcctggctgccggcgcgctttacgccgtag

SEQ ID NO: 104606 - DNA, 720 bp, Enterobacter aerogenes
atggcgacaggaaagtcctgctctcgctggtttgcggccgttgcggccgttgcggccatattaatggtggttagcctgagtgggtgttttgataaagaaggcgatcagcgcaaagcgttcatcgacttcctgcagaatacggcaatgcgtagcggcgaacgtctgcctacgctgaccgccgatcagaaaaaacagttcggccccttcgtgtccgattatgcggtgatttacgcttattcacagcaggtcagccaggcgatggatgcgggtctgcgcccggtggttgatagcgttaacgccattcgcgtggcgcaggattataccactcagcgtgagccgctgcggcaggctaacggcgcgctgggcgtgctgagccagcagctggaaaacgctaaaatgcaggcggatgccgcgcatggcgcgctgaagcaggctgatgatcttaagccggtttatgaccaggtgtttaataaagtcgtgacggcgccggcgaatgcgctgcagccgctgattccggccgcgcaggtctttactcagcagctggtgcaggtgggtgattttgtcgctcagcaggggacgcaggtgagcttcgtggctaacggtattcagttcccgacgtctcagcaggcaagccagtacaatgcgctgattgctccgctggccgctcagcatcaggcctttaatcaggcctggacggcggcggttaacgccacgcgttaa

SEQ ID NO: 104607 - DNA, 315 bp, Enterobacter aerogenes
atgtacaagattatgctgtgttgctccgccgggatgtccaccagcctgctggtgaggaaaatggtggatgccgcaaaggaacgcgacctgccggtgcagattgacgcctatagcgttgccgaatttgatatgcagtttccacaataccaggtggtgctgcttggcccccaggtcaaatacatgctgaaaatgcttagcgagaaagccgcttccctgaatattcccgtccagcctatcgatacgatggattacggaatgcagcggggagataacgttctgaattatgccctgtcgctgatcgccgcggcgcactaa

SEQ ID NO: 104608 - DNA, 153 bp, Enterobacter aerogenes
atgcgccgcacttggtcattgaactggattatttattactttattcagatgtatctgcgcgcggataaagatgtaacaaagaatgtctttgatgatcgtaatgacattattcatcgctgtccaaagcaacaaaaagaaattattaatcaatga

SEQ ID NO: 104609 - DNA, 330 bp, Enterobacter aerogenes
atgcacatttcatctgtactggccacggtgtcggtttcgtcacacctgtcgcccgttaaggtctggcagcaactgttaacttatctgctggaacatcattacggtctggcacttaacgacacgccattccacgacaacgcggccattcaggaacatatcgaagcagggataactctagccgatgcggtgaattttctggtcgaaaagtacgaactggttcgtatagaccggaagggattttcatggcaagagcagaccccgtatatttccgtagtagatattctgcgagcaaggcgctctaccggattgctaaaagctaacgtgaaataa

SEQ ID NO: 104610 - DNA, 324 bp, Enterobacter aerogenes
atgcaaaattcatggggactgaagcgcgacatctcgccgtgcttcggtgcaagacttgtgcaggaaggttgtcgcctgcattttctggcagatcgtgcaggtattagcggtacgtttaacgaggaggaggcgctacgtctgaataaggcgtttccgctagtgatgaaacagcttgaattgatgctgtcatccggtgaactgaatccgcgccatcagcattgcgtcacgttgtatcataacggactcatctgcgaggctgacactctcggctctcatggctatgtttacatcgttatttatcctcaagcatctgcaaccaagtaa

SEQ ID NO: 104611 - DNA, 222 bp, Enterobacter aerogenes
atgaaaatcatcgataaaaaggccgcgatggcgattcagcgacagcatccggattcccgtatctttcgctactgcacaggcaaataccaatggcacggcagtgccagtcattacaccggtcaggatgtcgcggagatttccggcgtgctggcggtttacgcagaacgtcgtcaagacaaccacggtccgtatacacgcttgatgtgcatcaccaccaattga

SEQ ID NO: 104612 - DNA, 471 bp, Enterobacter aerogenes
atgtcagaaataaatctacctcctgatcttccggtaactgaagcacgcaccattcgtcgtgctctccgcttactggaaaaatatcagcgccagcctggcgaacaatttaattccactaccttcaccaaaacctggctacaactgcgtcttgctctgcaggagcgcgaagtttttcttgttttatatctcgataatcagaaccgtcttctggaatgcgagacgctctttacgggcacgattaaccataccgaagtccatccacgcgaagtggtgaaactggcactacgccataacgctgccgctgtgattctggcccataaccatccatccggagagacagaaccgagtaaacaggatcgaaacatcactcaacatctggtgaaagcgctggctatggtagaggtgcgggtgctggaccatcttattgttggcatcgatgtgctttcttttgctgaacgtggctggctatga

SEQ ID NO: 104613 - DNA, 1587 bp, Enterobacter aerogenes
atgtataacaaaacccttaccttaaacagaaaagcgcagcaacccgtggaactgcctgctgattatgaccgcttgctgcagagtattaccgtgctggctccagtgcagaagatcagcctggacattgatgtgacgcataaggctgcactccctgcgattcttgagtcggcacttttactggtagctcagctcgaaaccatctccccttctgagctagggggtttttttggactcgcagaccatgaacgccaggttcttgttgatgaaatgatcgacaccggcctcgtgcaatacaatattgaaggcgatatagcgaccacggttaagctgacgatgcaacgcagggagggtgcatcggatgaggggattacaattgaggatgtggaaaatcaccgtgattttaccttcgtcgatctttgcactggacacattcagccaaagtgtaatacagacctgcagaaaggtttgccagagttggctcgtaagatcaatcgcagtgacttcaccgatttaatcgctagtcaatttcgtcgctttcaggtttgcttacccgatacaaagagtaagcgtgcgctgcgtagttccaaggcccgactttaccggataaatcgggcctctgttagtcaatcaggattgaaacagcagatctcactcgatatccacgcccattccgaccctatgaacggaattcgtctggatgccagattgatggactatagctcagaacatacacgtttgatggaaagctctggtctcaaaacagaagctataaattggttgcatgagcgcaagctagaagccgctactaccacactagaggactattgtgacctggcaaaagatatagtaatccgccgatatgtcagccgtagtggtaagctggatcttggacgtttgctccatgatcgccaacgcaaaaagaccagctatggtgatagcgcgacacaacgtatggtaattgggccgatttatacttcccccaaccgtatctccttaatcaattgggctgaacggctgccacgtaatcagcggttgcatcaaggtatctggctcggggcaaccaatgagttgtttggtgctagtttaggtcttgagtcgttcatcaaacaaatgaacaccgaactcggtagtggggagcgtaacagtcgtctcaatttggcatttcagtgcgatgagggatttcaggcacgtcgtctgatcactaatctgtttaatagccgaaccgacgatagcctacggattttccagaaaggtcgttctgaatcgcacttggaaatgttggtgttccctggcgagcgaggtattgctgtcgtccagtatcacgctgttttggatcagtcactcggctacgcaggtctcacgttgccaatcggctatctcacgacagacccagagcaagtagctcagttgtggtcgcaggtgcagcaacgaatcctgtcgccgcttcggtctgccgaccagcccgaggtagcactagaagatcttgatcaacaattgggttgtagctctgctggattagcacaattattggtcgaaaatgccgagaaaaaactgaaaaacttgatggataaattcaatcagcgctag

SEQ ID NO: 104614 - DNA, 4959 bp, Enterobacter aerogenes
atgaaaatacacattgcagcgacccaagggttacaccaaaacgagcatgatgccattgttgccatagagaaggctctacccgcgcactgggttggatatgcgggtatcttgctggtcgacaaaaatcgcaaaagcctggaatttgatgtattgatcttcgccgaagatcgtatcctgatggtagaactgaaaaatttccacggtcaggttcgtatggaagacgagcaatggatccagaccacgccaagtgggcgtaaaatcaaacacggatctcccatcgacctcaagcgcgagcatgcagtacgaatcaaatccatgtttaaggaagaactgcgcgaactttggggggatactttctacgaaattcaggcattagtggttctcactggcgatgtcgaaatcacacagcaatctcctaaagataaaggctttgtactgacgctcgatgagttcctgaccatcacgaatctggatacctattttgacaaaatgcccgaaaccagggctgagaaatattttcgccgtaatcctgaaaagcgcccttgcgctcccggacaaattgagatttttgaaaaatggaagcgtggggggaattacgtacagatccgccagaggcttgaagcaggctatgtgctcagtgagaagaccccacggctagaagggcccaacggcttttataatgagttcgatggcgaacatgagcgcgattcggacgataaaagccagatacggatgtgggactttaccaaaatggcccatgtcggcacagacatgtctgtacgcgtcttctatggattacgtgaggaccgaactcagcggcatatacgtcgaactgatagccaactgggcaaagactatctactggagcccaagcacaaccttcaggaagatacccttaccatcgacatggcagaagtctaccaaattcctcggttggctgagcgtttggacgagtacctagtatcctcgccattgtcgattgaaaaacgtacattattgttacgagcattgctaacgcccttggccggtatgcatgctatgggggtataccaccgtgatttaagtgctaagcgcttatggtgggaccgggaacgtaatgcaatcattgtcagcggcctgacgagtgccaaatttccggatttgggacacaaaagcataagcgacatgcgtcaggacctggatacgactggtatcgtgctaccagaggatgcctttggtgagaccgaggtcctgagccaagccgtggatgtgttccaactaggagtgctgtgctaccacattgcttatggagagcaactggcattgccttgtgatgagcctccacaatggaagaagccctcaaatgatcccttcggcggtaaactggatgtttttatccaacaatgcctgaaggccaatgcatcagaacgtcacgcagatgcgggtgcgatgctggagacgcttacacgcactcttaattttcaaaacctcgatacgaacgaagataaggtccgtgtactcaattctttagccgcgttcagctctggggttatgccaataacgaaatacccacaggcagaagctccaaatatggatcccctgcgtcaacgcatgactttccgttctactacggttgatgggcagccctgtattgttcgtatctatttgaatgctcggcctaacaaggataatcacggtcagtctcagcggctgctgcacttccttgaacgctgtgctgttgtctccaaaaatattttgtcactcccgccattgattgagttcggctgcggcatgatgggaacccatatcgtccagtcctatgtccctggagaaagcctggagcagtggtttgcgctacccaaccgtagctatgaagagcgttaccaattggctgatgcgctgatacgtgcagtccataacctacacgatctggatttgagccatggcgatctgaagcctgagaacttgctggtacagatggaaggaggcaagctaggtattctgctcctagatatgtttgacttagatatggacggccttgcgccgagaaattctgagtacgccccaacaaccgacgtcagtgcaacagcgcgtgatcgctatgccgtatacatgatcgttgatgagctatttgctgcttgcattcatcccggcgctaataagatacgcaaggagatccgcaatgcgttaggtgctaacaacactgtgccacgtagtctcgacatattgcggcgcactatgataaacgcaaatgagcccgagctggttgaggttacgcccctggtgatcgagcacttgtctttccccaacgagcagggcgagttgttcgagatggactctggcatctaccatctgacggcgaactatattaagggggacgttctaaagttatttttccaaggtgtttcacataaactgaccctgatcctcaaagttgatgggcagagtattactgtgcatcgaatgttctatgataggttgggtacgggggagatcgtctatgacacccgtaacaaccgaaagaatggtaaccgtgcaatgtcggtaggacagccctttttgcttaaaaaaggctcttatgatgcgacaaatgcggaactactggactttgttagaacattacacatagtgcagcacgctctgggcaccaaaccagtggtggaagagccatcgatagctgttggcaatgatcaaggagaaggtcttaagcgtctctggctacgtctggttgaagtagagcgcgaaacgctgcccacagtcaaagtcattgcgagccctaaggaacgcgatggaatcgttcatgtacaggttaatgagaacatcgacattttagagcttgccgacgatgaggtgattaacgtaaccgcggatgatcatgaaactcacttcggccagctggatgttgctaaatccggtaacggtatactggtgttttcggatgacaatcgcgggaataacttccgcctgcaaaacattcgggaagacacaatcctcaccctgtcaaattcagggagcgacgttagctgggagcggcgagatcgggcactttctcgcattattgctaatgacgcagtaatgggagatctaaccgaccgctttattactggccctcgcggttgccagcccccggcgttaccgatgccgaccgacgaacaaatcaaccgctatgggctggatgattctaaacgcgccgcattcctgtatttgttgcagaatccactcagtgtgttgatgggcccaccaggtacgggtaaaaccacactacttagtgcgaccctagactatctgctgaatgatgcggaagtacgccgagtacttgttgtaagtcaatcacatacagcagttgatgaagtggcaaaccgtgtgcgtgagttgagttttaagcgtcaggagcaatcccctgagttcaagccaccaagcattgtacgcctaggtgaacgtcgccgtattagcgaaggtatgttggacgtccacaccaatgccctgcaggatcaagcacgaacggcctttcaccgcgatctggaagtccgactgctagcgttgtcagcgcgcttgaaattgcctgaggcattcgtactggaatctgctgcgctgtatcgagcctgcggtcgtgaattgttcgagttcactcctgcccgaaatgaagcaagagaagccaagcaagataatattgatgtggtgaatcagccaagtataacgcgagaggttcgcctagcggctgaacgtcgactagataacctgacgaatgctttgacaggccggctgtcagcttttaccgatatgcccgaccaggtactggatcacaataagccgctgtttgcggtactcaacatgattgctgagcgacatcagattaacaatcctcagcgcattgagcggatggccgaagtaatgaaggtagcccatcactggtatcagcgattagccaccgacgagaccggctacgctgcctttgctgctcgtactcgtcaattggttgttggcacattggttggcatcgggcatggcggataccaactggataaaagcgcctttgacctggtggtaattgatgaggctgcgcgcgctacattttccgagctagccatagccatgcagagtgcgaaacgagttttgttagtgggggactacaagcaattagcaccgagttatgatgtgggccatgtacgccaagttgcacgagatctaggattaactgagaccgatgtaaaacgaacagattttgaacgggcttacgccttgaacgatggtcatatgttgttgaagcaatatcgaatggcacccgctatcggtgacataattagccactgcttctatgacggcacgcttgccacgggtcgacctgcagctcccgagtggatgtcatccctacccgccccgtgggatcgtacagtatcatggatcgatacctctgacagtaaggtacaggaaactagtattggtaaagcgattgccaatgaggttgaagttaacctattgtgcagtctgctgcgacaattagtcgacgatgaacagacgatggtgcaattacgccagtggaatgacaaagatacaacgccagccatcggggttattaccggctaccgtaagcaagttgagctcctgcagaggaggctggaatctgaatcctgggcagcgccgatacgctcaatgctgaaagttgataccattgactcctatcagggatcagaaaatcgtatcatcttattaagtttagtacgccataactccgagcaaaaaggcggatttatgaccgataatgcccgagtcaacgtggccctctctcgggcaaaagagcgtctgttaatcatcggtgccgggagtatgtggcaacaggtgaatgtatgtcagcctctggcccgcgtcttcgactatatccatcagcagcttccgtgccgtgatagcgaatatcagatcattcgtttggaagacctgccccatatcgcttgcgcagaggtgcaggagactgactatgtataa

SEQ ID NO: 104615 - DNA, 363 bp, Enterobacter aerogenes
atgaaaacagcaattagtgccctcaccctggcactgataattactcctctgacacatgcagcagaggcaccggtcaggattggtcttgagcaggtcaggaacccgtactatccgaatctgcatcagcagcgcgttcacgttcagtcgctcacggacagcgtcaccattaaggatattgtcgttaaccggggtaactgcccgattcagaagatacccaccgtctacgcaggcagcaagccggtcccgctggtgccgtcaacgctgccttacggcaaagaaattgccgtctacattaaaggcccgtgcagtgtggcagagattaacgtcatcaccagtcagggggactggctgatgaagcactga

SEQ ID NO: 104616 - DNA, 441 bp, Enterobacter aerogenes
atgaaaaaaatcgcatttttactggcgctgctttcttcagcgcaggccagcgcagccgtaaaccagtggacccgtacctgggttcagggtgtcacggaataccgcatacaggggaaaaatggcgctgaactgcttctgacctgttcaccggacgacaatgtgttcgtccagtacacatcacccgatggcaaaacgctcaccagcggtaatgatgacgggcgtagcgttcgggcacaaaccgacagtggcgacatctttctgattaacgacactctatccgattccggggggagtaacttcgaagccttctgggacgctgcccgtcagtcacaccggattcatataacggcgaccggactgacctcaactaccttcaccttcagcaatgccgcaaaaattctgcctgagtttgataaatcaggctgtctgacccggatgtga

SEQ ID NO: 104617 - DNA, 687 bp, Enterobacter aerogenes
atgtctgcggaagaaaaacagcacgatcgcatggcatcacggctggcgatcatcatcagtcgcctgctgatgggggaacggttgtcagttagtgggttgtctcaggagtttcatatctcggagcgcactctgcgccgagattttcgtgaacgcctgagctgcctggaactgacataccagcagggttgctggtcattggcccaccagcacgaaggcctgcgcaccaaccggcatattcagcactttgcacgagtaacccgcacggagcagctgttcccggcgatggataaccgtctgatatcggtgctaactgacagctccgtagagccaccttttatcgtctggcagtctcaaccggagcgcaagcccggtcccttcggcagtttctggcgtatcacacaggccattctggagcgaactctgctggatctgaccgcagaggggcagcagtaccgctggttcgcaccttatcgtctgatttatttcgagaacggctggtatctggtcggagagtacgcccggcaactgcaggtctttctgctggaaagcattaccgatgtctgcctgacgccgagacagtttctgcgcagaaaacacatcgatgcactgaccgccgacccacatttcattcactcactgccgcacttccagtatatccgcacggtactggcagaaacggaaaattaa

SEQ ID NO: 104618 - DNA, 738 bp, Enterobacter aerogenes
atggccgtttatcgcgaagatgctgacctgcggtttctggggcgttgtgagaatgaggacctggatttactggtcagcctcattacccgtgacccacgggataacaccctgcgctgggcggaaacgctgtccggcagcgacaactacagacgtttttacccggcgcaccgtaattactggcaggagattgccgctgaaatccagacctttggtgccagcagtattgccagtgtgttcaggggcgggaaaggcgtgttgtaccgggaagtgttatgcgatgtctgtgaccatacgggcgtgaaatacaaaaaagaggaggcaaccgaaaccattgagctctccctgctgatgaagatgctcgaaaaaagcctcagcgaaatgtccccggctgagctgcgagagtttgctgacagcatgggcacggaattgaccgcgccaacggtgccgctgatactgatggcgatacagactgcagtccggtcttctggttttgcagcctatcgtctatcggtcgtgatgctcagtacgcttgcgaaggttgtactggggcgcacgctccccatcgtgacttatctgaccctgacccgctctatcagtgtactggccgggccggttggtatcgccctgagcaccggctggctgattgccgatatggcaggcccggcacggcgggttacggttccggcctgcctactggtcgcttgtcttcgtcagcaatatctatacaaatcaatgtaa

SEQ ID NO: 104619 - DNA, 579 bp, Enterobacter aerogenes
atgtatgccctggcggtggaaggcacagccgtcacggactctgccgcagtactggcggactgttacctgcagaacggcatgagtcgtgctgaggcagctgaatcactggtgctgtacgagtcccttaaagcctgcggctccggcttttcctgcgggcttgccggtggtgcgctgctgccgctgaccgtcaccgctgacgtctgctcttcgctgttcattcagatgcggctgtgtgcggccgttgccatcatcggaggccatgacactgcagacccccgcgtgcgcctgctctgctggggtgcgctggccggggatgcctgctcggatgccatcagtggcatcatcgcccggttactgacccgcgcacgggacctgcctcaggccgagaccgctctgctgacggtggttcgcgacgcgttactgctgaaaagcagtaacgtgttactcagggaaagccttctgctccagttgctgggcggggtaatcaacggtggtgccgcctggctcgtcacccgcctgacggggcaactcgccattcgtctgtttattccaccggtaactccgccctgctcagcataa

SEQ ID NO: 104620 - DNA, 1059 bp, Enterobacter aerogenes
atgaaggcaacatgccactataaaggttgtcacaaaagcctgtcggactcccgtaataagcgtttctgcagcaacgaatgccgccataaagctcaccgtattattgatgatgacaatattgttaagctggtgaaacactcttggtggcttaacatcgaatctatgctgaaaaataatcctggcgggttaggaagtattaatggcccggatgatgttgtcgatatactccacttgtaccggaataagtcacgtcatcaaagggcttacaatgttctgtatgatgaatggatcaggggtgatgacgggctgccactctttcgtctgcgtccctggcttgagcttgaagtcagtcatctctatccgaactcaaaaggaggcgctaacataagcaaaaatcttctcattgcccctaaactgatcaacaggatgctgaaagataccattccgcactatccaccgaaagatgagtttcgtggctttattgctgccagtcacgaagaacccgtgaaaacaacactgttaaaagcactgacctcccggtacggtgttgatactgtacaaattgcgctaaaacggattcggaatttaaacttcgttgacatagagaagccgcgcagactgctttcgattaatacttttttttcacctccgctggagaagcttttaaaagaagagacgctgcgccttgggcattttaaactcagagccgcaattacggcgctggcatcccatctgagtatggaaagtggtggcattgataatgagttgcttgctgtagcctgctttcacgcaatgttaaagggtgatgccgacagttttttgaaagaactgcaacaattgtccgggtacctagagagaaccgaaacgataccaattcacatgcaagaaaatggggtttacggctggtataccagtagactccacaactatatgaaatgttactttgggcttgatatgactcgtctggaggagcgtgttaatttttacaatagatttttcacggtgcctgcacttgcaaaagatggggggcaaatcatcatcggcccaaatggtttttga

SEQ ID NO: 104621 - DNA, 216 bp, Enterobacter aerogenes
atgactgtacaatctgtaaaaatcctgcgtatgcgtgatgttatgctcaaaacagggctcggccgcgccaccatctacgactggctcaaccctaaatcgcctcgctatgatgcgactttcccgaaacaacgtcgcctaggcatgcaatctgttggctggctggagtctgaaattgatcagtgggtactggagcgctgccctccggtaacaccgtaa

SEQ ID NO: 104622 - DNA, 240 bp, Enterobacter aerogenes
atgcaaagactggaacatcagcaactgaaggtattagaaaatcagaagcgggctgaggattcaaaaaaaggcggtgcagttgtggcggaaaactattcaatcgtaaaaaaagagctgattcgcctcttgaagtgcaaagatggtggatgggagtcaaagaaagctgctattgattgtgttgttaatgagttatggcttttcattcagcaaaaaaataacgaaataaaaataaaaaactga

SEQ ID NO: 104623 - DNA, 1242 bp, Enterobacter aerogenes
atgctaatcgcgttcaccttagagaactataagagctttagagaaaagcagaccttaaattttatctcgagcaacggtgatgaacatttagatcacaccttactattggcaaatggattgagaatcaaccgattcgccgccatcattggtggtaatggagctgggaaaactcagcttttaagtgctattactgattttgctactgctatacatacaggaaaactcgatagtttacatgagccgtatttatttagcaaagaatgtcaattaaaaccaacttcatacgaagttattattttaaatagagctaaaaatagtttcttaagatatggatcatcaattttaggggactcaattctaagcgagtatttatattcaagacctgtaaaaaaaggcgcgaaagaagcatgcgtatttatcagaggggcagacggactttcattcaaaaaagcagagtataaaaaacatgaaacacttataaaacctattttgaaagatactggggcagtaattacttttgccaaatctttgcaaatagacgaactaggtgaagtctatgattggggcattgcacaactgccgtatagcgctgattttttcgtgaacgaccttgaattctttgaattacaatttgagaaggattttaaaagggatgatgaaggtaagattataattaacaaaaatgaaagaaccatgcttgatatatatagagggtttattgaaaaatcacctttacatattgatagcgtggattttgtgccgtttggaagtgatggcaagcatagatttatttttaaaattaaaaatatagatggtggatttacaactattggaccaagtgaaaggaatgagttcttttctcaaggaactatgcatatactgacttttttagctgccttgatttggtcgatggattcagggttcactcttcatgttgatgagattgattcatcgatacatcactcgcttgcaacttcattgattaaagaagttcttaattatttttctagtcgtgatgatatgcaatttattctttcaacgcacaatattcctttgctggatgagtgttttcgtagagatgagttaaatattataaccaaagacgcttcaaaatcgtccagtattatcaatgcctcggaattttcaatgaggaaggacgctaaaatatctgcaaaatattttaggggagagtttggtgttttaccctcttttttgggattgaacttagacgagataaattaa

SEQ ID NO: 104624 - DNA, 1086 bp, Enterobacter aerogenes
atgtcagataattttgattacgatggactatctcaaacagctaagtccctgtctattgatagttttgaaagtttagcaaacaaaattcgcgggaagaaagtttgtctttttttaggcgctggtttttcaaaagcgtgggacgataaatatccactaagcgacgatgttttttcaatttcggcagaggaagcatcggaaaatcatagctcatatggctttttatctctttttgaagaattaaatttaaaatggcatcctgaatctgttgataaaaaattaagagcaagcgttttcaagaattttaaatttaacctagacatttatagacggtacccaagtctgttaccatcatatttagataagcaaacattggatttttttgaaaaacaggtaaagctctttattaaaagtaaattctctaccctgttgccttcaagtgagttaagtttatcaaaaagaggctcttccagagtacataaaaataatatggtaaggttttttaaagggttagataaacttaccacgggtttggatgtaattacaacaaactatgatattgttattgataaaatcctaaaggaagcgataccaaataaaactttagtcagaggttttcctgtacattataacaatgttgttcaatgcccaaaaaagggtggtgttggactttataaattaaacggaggttttgaggttgttcctcaaggtgaaacatttaaaattgactatgactcactaaatgcgaaagatatctgtccaaatatcatactgccttctaacgaacaggattacggagataagtattttaaaagtgtttttcttaagtcatcctcccagttaaggatggcagatatgcttatatttattggttattcatttccatcagaagatcacattattcaatttctattgaagacattcatggatagtgaaaataaagaaaaagaagcattaattgtaagcaggagcgaaaaaagcgccatagagtgccattcgcgagcaagcgtgattttttcagagttgaatgatgttggaggtgtatattactttaaaggatctttcttagatatgtgcaaaaatgtttaa

SEQ ID NO: 104625 - DNA, 516 bp, Enterobacter aerogenes
gtgcaacgctctgctttatgccatggtgatttgcttcggcctggctgctggtatccggatttatattgcctgggaatcattaatcaatctggcgtggagtgcgattcgtggctaaatcccaagcagaacgaaaagctaaagctatacacatattttacatttagcgcgcatcttaaccggatttatgaatgtataatcctgtcgtcaaacaaaaaaggcgacaggattatggttaaggtgttggtttatggtggtggtcacaatggcattgttcgtgatgttgagtctgtaaattcaacaataagaattacccgaggagattgggttcgggatcgtgatgagtatcggaggggtggaaaagttgaatcggtaaaccacgatgaagagttttcaatacgcgagtttgaatatgctgaaggacgagtttattttatcgcagaacacgatgttaccattcctgatgcagagctcaggaagcgtatagacgtaatgatcagcttaaagtttctgccatga

SEQ ID NO: 104626 - DNA, 228 bp, Enterobacter aerogenes
atgagtaaattcaatatcgccgccaaaaaccaagaaaatcgagacaagattaacgtcgacttcgcagcttctggcgtcacctacaaagagcgcctgaatatgccggtgatagcgttgccagagagcagcctgagcacctccgggagtacttcctggaacgcgtatggtactaccgtgaacagagcttacaacttccgcgcgcttccgatccgcgctacatcgaaatag

SEQ ID NO: 104627 - DNA, 288 bp, Enterobacter aerogenes
atgactctgccagtagacggcataaacctccatcgcggtaacttcgcggccatcggtcagcagatccagccactgctggatgccggccagtgcttccgcttgcaggttaagccttggcgcgagaagcgcagcctttctcagaacgcgctcagccatatgtggtacagcgaaatcagcgaatggcgaagtggggtgtcggtggccgtaagcaattgctccatgcggcgcgcgatcgtgctgctgatgaggtccagttatatttacccggtatcgcatagttatcgataa

SEQ ID NO: 104628 - DNA, 708 bp, Enterobacter aerogenes
  misc_feature (650)..(659): n is a, c, g, or t
atgttaagctatttaaaaaaaagcgatggacttactgttgcaatattaactgcaagttgctacgtagcagcatatttttttgaagcaggatatgctcggcagtctggcattcctattgagttaatatcaatatcattaggtaacattatatcaacttcaatattccttttttttgccacagtcatagctttcttcgcatgcacctttccgtatattgtaacaacaagaatgcttggtaaatatcaacttgcagttgtgtcctcatttatattttcacttgcaatatttgctctattgaatatttatctccttggagaactcactaaaggtgttcttattaaaactctaagtgcatggatagcattctctttgttattttattttatgagaagtgagaagaagaatgagtccccttcaaaacacataaaacctttatctgaaaaaattcacgatattacagggatgtttttttggttattttttccttgcactttttttatcatgagttgtggcacttacagtgccagattacaagtctcatttgatacctttacattaaaaaataatgaatacgcgatcttgagaatctatggtgaaaatataatcacaaagcaaatttttgataaaaaaatgtctgatggtatatacannnnnnnnnnggtatatacattttcaaaacagatgattttaaaggcattgaaattttaa

SEQ ID NO: 104629 - DNA, 513 bp, Enterobacter aerogenes
atgagaaaggttggaagtactacagatacggcagatgcaaatggtgaatacactaatggtaatgttgcacaaggggttcctcctacaattatcaatgctgagatgttgaatacatttcaacgtgaattagtaaatgtagttgaaggtgtggggatggtactagaccaaaatgatgatgggcaggttattaaagcaataatgaagttatttagtaacgctatttctattgagaaaaacaataatggattgtatttgaaagtttcaggcgcaatgaacggtttgggctttattattcaggctggatctggagttatcaactccgttagtggttcagtcgttttccccaagccattccctaattcagttgtaagtgtaatcccttcaaaaataactgatactaatagatatgtttcaagctccaatcataccttggcaggctttgatattttcggttggatctctggaaattcaggtaatgttgataacttcacctatgtcgcgatagggtggtga

SEQ ID NO: 104630 - DNA, 1053 bp, Enterobacter aerogenes
atgaaaagtagcaggaattatataattgatgtgtttcgtggggttgccgttcttttggtgacggcattccatgtttttttatggtcctcatcacctgggcattcatttttcaataaatgggatttatttggccccatgggaaacggttgggtaggcgtaggcttgtttttcatcatttcagggtattgcatgggaatgtcaacaaggcgcacattctcttccggattaaatacaaacgaatataaaatatatttcacaaaaagatttcttagaatagccattccatattatatttcaattttgttttggtgttatatgattaatgtacatggggtggcagtgaaaccaacgggtttaactgatatattaatgcatatgttttttgtgcataatttatcagatagcacgatgtttagtattagtggcgtgtattggtcgcttgcagttgaaatgcaattctatatcgtgctacccattgttgttgctttaataaaaacaagaaaggagatgctttattttttaatcgcctgcctttttttaactgtattaatcaacaccacgtctgttaatcgtgttttgacatggtcactgttatcatatctttatttgtttattcttggctgggtgttgttttatttcaaccctaatcaagccattcataaatacttaaagaaattttctatcattatgtttaccatctttatggctcttcttttttataagggtgagggattcaataacaacataaagatttatgaaacgctaacttctactgttgcagcactctttatgtgggcctgcattaatattggtcagggaattgatgatgagagcaacgtgataattaaagggatgtcttttattggtcggtgctcattttctatatatttatataattatatattttggattttcccaagggatgatgttggagcttttaaatcatttttggtttttgcatttgtcatattttttggtattggaatgtattttatttttgagcgcccatctgaaagaatgagaaatggtttgtttaaaaagatatatcaataa

SEQ ID NO: 104631 - DNA, 312 bp, Enterobacter aerogenes
atggcctttactcccccgctcgggagcacctccccggaggtgttgctggataatgccacgcgcctcgataaactggtgaacggcccggaggcgaccatcccggatcgcgccggagaaccattagactcatggcgccggcaacaaaagaaagttgacgataccctggttaacttccaggagaacggcggtgctatgggtttcagttctttgcaggaactactggcctttacacctgataaatctaatgtgctggctgtcgataccagtacaggagaacaatatttgtggaatggtaccgaatgggtagggtga

SEQ ID NO: 104632 - DNA, 210 bp, Enterobacter aerogenes
atgtacatcctggtcatcaaagaaaatatgcggtttaaaggccttcaggactttcgttttctctacaccaccaagaaaaaaagcctcgtcgacatatacccccagcttctcaatgtcttaatgacgcgcatttctgatgggctgtttctggccgtcaccagcgcgatacgaacgggagaatactcaacgcgggtcggtagtcgttcctga

SEQ ID NO: 104633 - DNA, 1380 bp, Enterobacter aerogenes
atggctaagtataaggcgtatccggagtataaggattctgaggttgagtggctgggggatatgcccaagtcttgggaaaaaatgtctcttcgtttccttgttaatgcaatacgaaatggtagtgttgctactcagattgaatatacagaagaaagttttcccatttcgagaatagagacaatttcttctggtgaaataaatatgtccaaggttgggtttgttgatccgaaaacaatttcaaatgcgtataaattaacgcgtggcgatttgttgttatctcatataaatagtctatcaatggttgggaatgtcgcattaaaaaaaagcgatgacgtattgtatcatggtatgaatttacttcgtatcattccgaacaatagtattgtaaatggtaattatctttactgggcaattaaaagtccctattgtcgaaaaatgatagagtctattgctaagcccgcaataaatcaagcaagtgttagtattgaatcgctaaaatctattcagataattgtgccaaaactgaaggagcaagttaaaatagcattctttctgcagcacgaaaccgcaaaaatcgataatctgatcgagaagcaacagcaactgattgaactgctgaaagaaaaacgtcaggcggtgattagccatgctgtcaccaaagggctaaaccctggcgtgccgatgaaagattctggtgttgagtggttgggggaggtgccaaagcattgggttccaatacaattaggaaaagtttgttatcaagtatcagatggacctcatttctctcctaactatgttgactcaggagttttgtttatttctgcaagaaatatcaaagttaatgggtggtcattagatgatgctaaatatataactgaaaaggattacaatgagttttccaaaagagtgatccctgaaataggagacgttttatacacaaaaggtgggacgacgggaatagctagaactgttgatattgaagataaatttcaagtatgggtgcacgttgctgtattaaaaatattaaaagacaaagctgttccagatttcatagcatattctttaaatggcacatcttgctacgcccaatctcaactttatacccaaggtgcaacaaataatgatcttgggctcactcgtctgataaagatatggttggctttgccaccaaaaaaagaacagcaggaaattgttgatgctttaaatagcattacaaaaaaatatgatgtggttatcgataatgctatggccgcaataaccattctccaggaacgccgcaccgcccttatctctgccgccgtcacgggaaaaatcgacgttcgcgactgggttgcccctgactcgcaggatgtagaggcaattcaggaggccaccgcatga

SEQ ID NO: 104634 - DNA, 888 bp, Enterobacter aerogenes
atggcgcttacagatcgcgcaatccggcatgccaggccgcttggcaagtcatacaggctctctgactgtcacggtatttacattcaggttaaccccagcggatctaagctgtggtatctgaaatttcgctttggaaacaaagagaaccgtatggcattaggcccttatccgcttatttctctggcactggcaagggagaagcaagcagatataagaaggcttattttagaaggcattaatccggcggaaaaacgcagagaggaaaagcggggtggagagcccctttatacgttcgagtccgtggcgcgcgaatgggtctccagcaacgtgaactggtcagcggagcataagaagcgggtgttgcgttatttcgaactttacgtattccccacgaacggcagctgcgacatcaccaagatgaaggtcaaagagctgctggtgcccatcaaagaggtggagaaagcgggcaaactggatgtcgcttctcgtctccagcagcgtaccgcctgtgtaatgcgctacgccgtccagaacggcattatcgatcataaccccgcatcggatttaaccggcgctgtctccacgcccaaagtgcgtcaccaccctgcactggagcttaatctcatccctgatttcctggaaagagtcgacgatttcaaaggacgtaagctgactcaactggcggtaaagctggcgctgttgctgtttattcgctccagcgaactgcgctttgtccgctggggtgaaattgacctgcataacgccatgtggaccattcccgccgagcgagaaccgatccccggcgttaagtactctgcgcgcggtgcagcagttcgatggcctgtagcgcgctggtggagtcaggcctgtggtcaagcgacgcggtag

SEQ ID NO: 104635 - DNA, 1233 bp, Enterobacter aerogenes
atgcaacatgctattgataaaatttatgctgttaaaaacaacaacccatcgataccatttattgttaatttagaaggcaaaaatcttatcatcactggaaataacggtagtgggaaaacagtttttctaagaaaaatatttgattttttaaatcagagtatagtaaaaactggaaacgatcatcatgtagaatatatcaagtccgaactattaagaatggaggaacgattatctagagttaaccctggtgatgatcattacgagtatcgaaaaaaccaagttgctgaactacaagaaaaactgaacagcagaaattatttcaacattacctttagagatgaaaattcattaaaagttaattatcatcaaaaaaaatcaataatacgattttatgaagccacaaggcaagcaattatatccagtgatggaagaataacaagtttagaaactcttgctgatgagtataaatctcacggacctcaagaaaactcaggaatcttctttgaaagatatttagtaacaacatggaattatgctttactccaaaaggggttaaacaaaatagaagaagcaagcaaagctgaaaagtggattgaacgaataatagaagatttgaaacagttatttgaagaccccacattaactcttgaatttgatattgaatcactacgcatcaatattaaacaagagggtaaagaaaaatatcggctagaccaactttcttcaggtttttcatccattctttcaatttatgctgacttattggttagagttgaactgggcaagatagaaagagacgaaatatcaggtatagttttagtcgatgaaattgatgcgcatctccacgttactctacagaaaaaagtgtttagcttttttaaaagctcatttccaaacattcaattcataatttccacccactctccattcgttgtacagtcagtttctgacgctataattttcaacttaacaacccttgaacagatggaggatttatctttatattcatacacctcaatcataaaagggttgctgggtgaaagaagctcatccagtatcttactggaaaaaattgaagagttatcctctctgatgtctggtgaaaattttaacgacgcagattatatagaaataatgagcgatttagagccttttattcaagatatggatgcaagatcacaagccataattctttctgcaaaaaataaatttattgaaaaacagcagggatag

SEQ ID NO: 104636 - DNA, 675 bp, Enterobacter aerogenes
atgtttaatataattagagatgttgaagccccggaatgtctttcgcacggaatttataacgacccgtcagtgactgacgcattaaaaaaaatatttcatgggaaatgctatttatgtgaacagtcgagaatcagcgatccagaaattgagcacttcattccacatgaaggagatgcttttttaaaatatgactggaataatttattctactcatgcagtcgatgtaatagcattaaaagcaacaggcatgtaaatttattagattgttctgatccaaccattgacatctcaatggaaataattcatttagctccatctttaacatcagaagacgtcactattcgtccatcaaccgaagataatattaatgaaaagacattaaataccataagattattgaaggaatgctataactcaaagtcaactggcctcaggggtataaccagagaaaatcttttagagaaccttttgaaaaactacactaactttcttctgtcaagacaaaccctaataaaccttgaaagtacagaagatgaaattgactacgcaaaagcaagaatgaaagccatgtgtaaaattgccttccctttttcagtattctggaaatggcatattcgattagataattttttgctcgaacaataccctaacttatttgaagatctaggcatctaa

SEQ ID NO: 104637 - DNA, 240 bp, Enterobacter aerogenes
atgttcaggataatccagcctaatacctggtacgccgacctccacggcgcgccctgcaaaatcctccgctctaaccacgaagtaatccactacatccgcaacggtcgcacctgcatcgccagcatgggccgctttcagcatgaattcgaaccgctgaccaaagcacaggccgcgcggatcgcagaagaaatcgaaacagcagaacacctgaagaagctgcgcgcccagcgtgcggcatga

SEQ ID NO: 104638 - DNA, 327 bp, Enterobacter aerogenes
atgaaagtactgatagtttttgaaaatgtccccgaaactactgatctttttatcgttgaagcaaacgaagaagatttgaaggacttgcggctatcgcatggaaattacattaattcggtggataacgaggacattgagaatgcaatctcacgcgtaaaccttcgactcggatcgcccaatgactattcagcggaagcggcgactgagtgcggccttgctcaagaagaagtgggcaagtgggatggttcagctgtagatactggcgaaccgatccttgtttatgagggccgcatcgaaatggttgtagtgaccggattcatcatgtga

SEQ ID NO: 104639 - DNA, 627 bp, Enterobacter aerogenes
atgggttcaaattgcacctatgatattccaactaaaaccgctcgaattgtctttttcactcgtaacggtttagaccagattactcagaaggtagaaggtggtcggttcttatgggaagcgcttaaacgcgaatacttcgactatacaaaacaacctgaatttgcagttccccagactttcgcagaagctttaatgttggcgggtaagctggaagcggaacgtgttcaattagagctggaaaacaaagaaaaagaacagttgttgatccagcaggaagcagaacacgaaacgttcgttgataccttctttgatgaaagccaagcaatcagcatcgggacgtttgcgaagattaccggagtgttcggaaagaatcagatgttcgaatatcttcgtaattctggggtgatgatgcaatctaacggtaacgagccataccagcaatatatgaatcatttcattattcgcggtgtacacaacacaccacttttgaaatgttcaagcgcgaaatggttacttgcacgaatgatgaaaagcggcctgattaccgccagtaaaaaagaatggtgtatcgaagaaatcaatgcgaaatattcgaatgatcttaatgcagcattagccgcagcataa

SEQ ID NO: 104640 - DNA, 555 bp, Enterobacter aerogenes
atgaaattcaatttacgtattgcagaaggttcgcgttttctaaacgaaaaaccgagctattattatatcggaacgaataacaaagagtcaatcgagcgcgtttcttctttaacacctatatctatttatggggaaacatttaaggagcttcgaaagaatatccgcgatgaatttaaaaagagcgaaaacccagcgttcgaaatgaccgcagcattgaagaaaagattctctgttgttgaacagaaaattaacgagcttgtagaagcatgtgaaagcatcgagcgcgtttatttccactacaacaaggaaatgagtaagccaatgatcatcgtgtgcttaggagtgcgtacaggcgatttagcaggtatcgaacaaggtcgggtaatcgtatctggtgttgataccatcgttgaagaaaacaacttcaaacataataaccgctgtgattacttctggggtatgtggaattaccaaagaagtaaatccgacaaatactttattaatattgattgcacccgacgccaggacgaaaaaccgatcgcgttcaggggctaa

SEQ ID NO: 104641 - DNA, 627 bp, Enterobacter aerogenes
atgaatacggaaaaattaggacgtggtcacgttggcaagaaacgcaaagaagaacgcgcaaaagagcttatagggacgttgcaccaaacgaaagatggaacattagagattatcggttatgagggcaatacgcgcgttctggtgcggtttatcgaaacaggatatcaaacaacggtatcaatgagagctatcacaacggctgaagttcacgaccgatacaaaccgaccatctttgggatcggatacgtcgatgataaattcagtatagaaacagaaatcaggaaaaaggcgtataacgtatggcacgcaatgttaaagcgttgcaccgatccgaataaccacaattataacgatgtaactgttcatccgaggtggcacagcttcaaaaacttctgtgaggatatccgagaattagaagggtacaatcactgggtgaacgaaaaaggatacgccctggataaagacatcaaggtcagagggaaccgaacctattcaaaagaattttgtaagttcgttaccgtgggagaaaatgcaatagatgcgatatcgcgcaagatggaaaaacgctggttagataaacaagcacaacgtaaacccgtttatcaaccaagttcggttatgtggtaa

SEQ ID NO: 104642 - DNA, 648 bp, Enterobacter aerogenes
gtggaatatattacaaaaagccaggttgcgaagcggtacgggttcgatctgaaatctgttactaactggatgaacgaacgcggcgcggattcatgctggtcaacggacaaaagaaaatttcgcgaacctgagattaccgaatgggtgattaaaaatatcattacccctttacgcgaagttgacaataaagagttaatggatcaggcgaagttacgcaagctcgatgcagaagcgcgaattgtggaaatgaccgcacgggaaaaagcaaattcgttaatccctgttgaattggtggaagcgtcagtttctaaatttagttcaatggtcaaaacatcaatgttgcaaatcgctactacccaaacacaacagattcttgaagctgctaccgataccagaacgctaaaaggtgtactcgcggaaattatcaacgaacggttgaacgaagtagggcaggtaatgaaatctggtgaattccttaatgatgaagaaataacacagtattcagaagacgaggatcacaacgatggacatattacagacgatagcactattgaagattctgtttcagacgataaccattctgttaatgggttatctgatattggatctgatccagatgattctaaccctgatttcttcgaagattaa

SEQ ID NO: 104643 - DNA, 675 bp, Enterobacter aerogenes
atgtttgatctaagtcctggtatgcagggatttctaggcggtgctgcggcgatcggtgttcctcttctttttaatctgggaaaagaggtaatcttcgatataagaaaacgaaaagctgaatgcgcttatatcagtgttcagcttatattccttttggataaattcgtagctcgttgcgcggacgttgcttgggataatggttttgatccgatgatgcccgaaccgcacgatgaagaactcgaagaccaaacacagatccccgtgttcgatatgatcagtgttaaaggcgaacacaagtatctaaaacctgcaatgctcgctagattgcacaccatcgaaatcaaacttaatcaggctaatgaatcattgcacaatgaagaggctgtttggggatgggagggtagtttgtggaaatactacgaaaccagacgtgaactatacggtaacgttggattatatgccgcttcaatagctgatgatttacgaaaagaatttggtatcaaaaatgttgaaggttggaaacccagcgaaagaattatcgatagttttgaaaatataaaagaaacaagagcacaacgcgcagaacgtaaaaggttaagaaaacttgaacgcgaacgtaaaaaggcagaagaggaaaaacagaacgttgaatcaggtttagttatgaacgaataa

SEQ ID NO: 104644 - DNA, 333 bp, Enterobacter aerogenes
atgactaccgaaaccaaagaagtaacccagcaagaaccaatcatccctaccgaacacaccccaccagaacaagaacgtgtaccgttcacacaagaaacgattaagggaatggtgttccagacaatcgaccccaacggaaacaccatccaggttaaagcggaacagttgatcaaccttatcgttcgatacgtccgaaacggtgagatcgtcacccacgataaaagcgttgaaatggttatcggtgatgccgtcagcatctacccagaactgttacagatagcacaggacaaccgaccgttcatcggcatgttcaaaccagagcagggcgcgtaa

SEQ ID NO: 104645 - DNA, 1263 bp, Enterobacter aerogenes
atgtttctgtttccgccgctggcgctggccggcaaccactggaacgtcacggtggctgggggaaacatgcgttttcaaggcgtcatcatcgctgagtcctgccgtgttgaagccggcgaccagcagatgaccgtcaatatggggcagatcagcagtaatcgctttcattcagccggggaagatgccaacccggtgccattcgatattcaccttcaggattgcagcaccgcagtcagccagcatgtcggcgtgtcttttcgcggcgtggccgatggcaaaaatccggatgtgctctcggttggcgaaggaccgggtatcgccaccggcgtcggcatcgcgttatttgataacgaagatcaattgattcccgccgggcgcctggcggcggctgtataccggccccaccacgctgcattttgtagccaaatatcgggcgaccggcaatcaggtcaccgggggagcggcaaacgcgcaagtttggttctctctgacctatcagtaattaaccagcaaatatgccggaaacaggaaacaacggtgagtacaaaaggggtaaacgtgaaaaagagactggggatgacgcgcggactactggcggggttattgatgatagccgcaagcggttactccgcctgggctcaggccggcgttgcgctcggcgccacgcgggttatctatccggccgggcaaaaacaggtgcagttaggggtgaccaataatgatgacagcagcacctatctgattcagtcgtgggtggaaaacgccgacggcggcaaagatggccgcttcgtgattacgccgccgctgttcgccatgcagggcaaaaaagagaataccctgcgcatcattgacgccaccaataaacaactgccgcaggatcgcgaaagcctgttctggattaacgtgaaagccatcccgtcgatggataaatccaaactgagcgacaacaccctgcagttggcgattatcagccgcatcaagctctattaccgcccggcgaagctggcgctaccgccggatcaggcggcggaaaaactgagctttagccgcagcggttcgtcgttaacgttgactaaccctaccccttattacctgaccgtcaccgaacttaacgccggcacccgggtgctggaaaacgcgctggtgccgccaatgggtaaaacctccgtcaagctgccgccggatgccggtagcaacattacttatcgcacgattaatgattacggcgcgctgaccccaaaaatgactggcgtgctgcgttaa

SEQ ID NO: 104646 - DNA, 1203 bp, Enterobacter aerogenes
atgaagcgcatcgaagcgggagatagtcagccacttatagattatatagatggatttgatgatgattatggagctaatgaccaagcctcagcgtccctatctgttagtgctcctcaaaagcctagcattcccgaagataaacccagcgtaaccgtagcttccctctttgagcagtacgagcaggaaaacgcccaaaactggaagccagcaactttacaagaaaacaaagcatcccatgctgcgttaattgaaatttttgactatctgggactcaatgttgatgccaatgcgataaaacgggctgatatgctcagggtccgtgatgtcctcctgcagttgccgaagaaccgtaagcagcgtttcaagaatgtcccattggttgacctgctggaccgtgaggataaaaccgattgtatggatgttgttaccatcaataataaatatctcattaagatggcggctgtcttcaagtgggctgtacgtaatgatctgatcaaaaagaatatggctgaggggctggaacttaaggttccccagcgtaaagcctctgaggcccgtaatgcttttagtccagagcaggtagggcaactactagccgccgcgaaggcatactcacagaagacctcaggtaaaccgtatcattattatgttactgcgttagccgctatcactggggcgagactcaatgaagtagctcaactacaggtcaaagacgtcagggccactgaggcggggaccgtttatattcatattaatgaagacgacagtagcttacccggtaagagcatcaagaacgctcacagtgatcgctgtgtgcctttggttgatggggcttatggttttgtattgtctgacttcatgacgcttgttgaggctcgtagaggcactgatggcgatgacgctatggtttttgatggtcttcgtctcatgaagaacggctacggtgagcaggtgagtaaatggttcaaccgtacgttgttacctaaggttcttgctgaccgagacgggctggctttccattcgttcagacatacagttgcgactcagttaaaacaacatggtgtcgagttggcgtatgctcaggcgattatgggccatagctcaggctctattacttatgaccgttacgctaaagaggttgaggtggatagattgattattgtgatgactgatatttataaggagagtagagtaaatggctga

SEQ ID NO: 104647 - DNA, 642 bp, Enterobacter aerogenes
atggctgagtattaccctgcggaatacggaaaagaaaactttaactgtccccgatgtggtgtctatgcacaacaacactggaagcagcttctttttagaccgatggatggttattccaatacagaagctgctcctatgcatatggcgatttgcgaacattgcgatggtttaagtttctggttttcagaacaaatgatcgttcctgcgtcttctaatattgaaatgccaaacccggacatgccagaagactgcaagtctgactacatggaagcacgcagtatcgtcaatctatcacctaaaggggctgcggcactccttcgtctatgcctccagaaactgatggttcatttaggagagccggggaacaatattaacgctgacattaagtctctagttgagaaaggtttacctcctcgcatccagcaagcagccgacatctgtcgcattgttggcaatcaggctgtacaccccggagagattagccttgaggatgacccacagttaacgcatagtctctttaagctgttgaacatcattgtcgatgaccgaattacgaggccaaaagaaatcgaggcgatgttccagagtatgcctgaaggcccacggcagggaatcgaaaagcgcgacaaaaagacagcttag

SEQ ID NO: 104648 - DNA, 492 bp, Enterobacter aerogenes
atgaataataaattatccagtaatcaaatcgcttatctaaaccgcgctatgacagacgggaagggtcttattgaaataggtgagctagctcgtggtcttggtaaacagaaaggtaacattattcgtaaactggaatccaacttcccgcctgaacagcttttcaaaatgaaaaaccgttcggttattccaaatgggggcaatggtgctacacgtgaggtcgaaacctacatgctcgactataagacagccggagcactggcgatgagctatgatctccggttaggtattgaggtcctaaccatacttgaggactctctaaagaccatccaagagatgaccttagccgcagccaatgatgacacctcaggtgtacgcaaagcggctgtaagtttccgtgagcgtcacagggagcgactggagttccgcccgggcgcttcagagaatgaggaccgtagcgttgcactcaggcgtttgggcagaaagggactgtaa

SEQ ID NO: 104649 - DNA, 474 bp, Enterobacter aerogenes
atgtttgggctttttaagaaaaaggcaaaagcggaaaggcgttatgatgtaacacgcattcaatacgaactggttgtaatgtcatctaggctgataaaaaaacagaccgatatgttcaaagtaataaaagaggagcgagaggaggctgtaggtgatcctttattatcagcaggatatatcacaccatgggtcattggatattgcactggtctcttggatgcagtgactcagactgaggctaacaggatggcatttacatccgaaatgctcgggcttctatttgcagcagttttcggtgatgataagtctctggaggccatgggaacttatatagcctgtaacgaagcctcctcaccagaccatgaatttcatgttacgtatgagctttatatgtctggtttagcgaaagcatttaatgaggtatgtgaggataaacctgtaataggacttctgaactatttaatgcaggattga

SEQ ID NO: 104650 - DNA, 990 bp, Enterobacter aerogenes
atgcaacctaaaaatctccaagcgaagaagcgacaccattatgtctgggcgagttacctcactaggtggggaaatgggacgaaaaatgttttctacactacaaaaactggaaagattgcccatgacagcgttcgagccatagctgctgatgactacttttacaaaacgactacactggcacaaaaacatgttgaagtgatcaaaggcttttcacacttaagcccagaacatctccaaaaacaacatatgtcatacctaaatgattttctgaaagtacagcaattggaagccatctaccgaaaatctggcatttcgaatcaagaggctgagacactcttacacgcaacaaaatgtaacattatggaaaatcttcattcatcgcatgaagatgctgctttaaaggtgcttaccgcgcttgcgggccagcaactcgaaattttgcaagataaccagaacatgatcgagttcatgatgttcttcggtcaacagatcgccagaacaaaggcttatcgggacgaagtattaaaaagattacgtagccatagtaacttagagagtgaagtagctgacgcgatagcacattcatggtggtttttaagctatatgttcgggatgaatattggattcagcctatattcatcccgccatgactcaaaccatgcgttactagtgaatgatactgatatcccttttataacctcagatcatcctgtcgttaatgtacacccgtgtgtctcagaaagtgtattttctgtacctgaacatgcagatttttattaccctatttcaccaaatattgcttacattatctgcgattcagaacgatttacgcctggtaaacatagtgtaagcaacgatacggtgactgaattcaatactaaaatcgcaacccaagcaatggtgcacattattggtaataccgatagtgttcttgctcctctcaagaaacatattggtctccgctatgcaagaaaccaaggtgtctcttga

SEQ ID NO: 104651 - DNA, 351 bp, Enterobacter aerogenes
atggaaaataatggactagtcagagtattgaaaaacgaatggttagaatcgtcttctggtaactcctaccacggagaatataaggttggacgatttcatctaacagatacgtttatcgtaaagtatatgatgctggtacatggagtcgatataccagattcgtgggttagtaatagtttcactaacataccagatatcaatacccgcaaggttatgtatatggaatgcagtgatatgttatcgaatgacactatgaatgagatccgtaatacggttaaatatccaccagacagtatggaattatatcgtaatagagatcaagtaactcatataaaaatcatggaagaatga

SEQ ID NO: 104652 - DNA, 813 bp, Enterobacter aerogenes
atgacgctctatccctctattgagtgtgaaagaaagaaggtatcaaaaatgaaaaccctaataaaaacgttaaaaatcatggcgtcaggagttgccctcatttctggcataacagcagcctccagtaccgtctattttttgccagaggcaaaatcagctggcgtagcaagcagtaatcaaaacgcgctgatgtttctcgggatggacaggaatgcgaatctaaagggaatatgcttcacaatggcaatgcaatcaccatcgatcacgccactggtagacatcacagctactactgataacggcaggttcatcatgcacgggcttcgcccgaagcatagtgacgatacgaaagaattggtctgttcactcggttcagaagctggggatttcttgactagccttgcaaagtcatcagttgttaacgtaaagctggatttcaatggggaggtccgtagttacaggttcgacacgactgaattcggaaaaatgctaacaaccaacggacaaagcgtgtgggaaaaagcagccaaagactacgctcagggagttcgtgcacccattttctatggaaacaacatcaaagcccttaaaaacaatgcaatactgccgaatgttgaaacgcacgcttataaagctagcgatgataaactaaattctgtctggaaaagtcttagccctgaaacacggaaacgtctactcccctctcaaagggagtggataaaaggaaaatcagtttgcaagaatgaacaaaaatgtcttaccgacatgacgaacaatcgtatcctcgaactggaagctgaaaatggaaaataa

SEQ ID NO: 104653 - DNA, 621 bp, Enterobacter aerogenes
atgactactaacgcaatcgtccgcaaaaacgaactggttcaactgttaaacgctgctgagttcgctctgaaagaagtttccgcaggtaaagcgatgaaaggcttcaaagaagttctgggtatcgtgtgtcgtctgcgtaaagacttcatcaccgctgttactcaaatcatcgagaaagtgaaagctgatatcgctgatgttaaccaggatatcaacgcggtagacggcgaagtagtcaccaccaaagaagtaacccgctctcctgtttctgttctggttcactggagcgaatcaagcgtatttcgcggtgaagaacagacttacaccttctccgacttcgaacgaatggcacgacaggccgcagcgattaacggcaacgttaaagacaacggttattcaaaaacaaaagtaacggttgctctggttcgttcagataccggatgtaccgaaacatacggttgtcgccttgatttagcactgggtgatgttgtcgggttccgtgaccacgcacagcagatgatccggtatcacgacacctccgaggggttcgcatatcacaaagcgatcggtttagtggaacacgttgagttcctcaaaacaatctgctggggtgaagcgtga

SEQ ID NO: 104654 - DNA, 390 bp, Enterobacter aerogenes
atgaaagtattaaaaactgtagttgctctgggtattgtttctattctggctggttgttcagcaagtccagaagttcagcaagcacgggcatttattgccgcaaactctccggttaaaggagcgaataaagcggaatgtgatctgatgtggcaacaggcgcaatacttcatcatgaagaattcaacgcgcaaattgcaaatggcaacggatattgtgattgaaactcacaacacaaccgatgttggtcaacgttctggtagtgcaatgcgtttaaacaaagccgatggttcatgtgaaattgaaggttcaatgaacatgtatatgatcggaatggattcagttatgaccgcgaatatgatccgcgctattaagtcagcgcaagcgaaataa

SEQ ID NO: 104655 - DNA, 1938 bp, Enterobacter aerogenes
atgaaagctgtaaacaccgttaaaactctggttgctgttgctgttctgtcttctatttctgcgaatgctaatgctctgaacgttggtgattatctcactcagcagggtaaagaagattttgaatatgctactggttctaatcctgatatgggatttattatcaagggtgaaacggcggtgattggtcaaactaacggttcttatccgtctgattttgacctgggtaaactggttagtgatgttaatgccgaacttgaacatgttacgaaccacgcaaaagatcaacttaacgtgaacgccgaattcgctgatgaaatcaaagcggctaatgatttagcggttgatgcgcatgttcaggcagctaacgcacagaatacagcgaaccagaataaaactgatatcgctgatatcaacacccgcctggataacatgggttctgttgatatctccggtaaagcagataaagccgacctcgatgcactagggggtcgtgtaggtagcattaacgaccgcgttgatgatatcgaaacaagcatttcgggcaaagcagataaagcggatctcgatgcaatcaatacccgtatcgataatatcgcccctcttgatatttcgggtaaagcagataaagccgacctcgatgcggtgaaagcaattgctgatcaggccgcgaaagatgcacagcaagcacaaggcgaggtgacaggcgctgttaccgtagcgatcgcagcgaaagaaaccgctgatcagaacaaatctgatatcgctgatatcaacaaccgtttggacaacatgcctactgttgatgtttcgaacaaagcggataaagcggatctcgatgcactagggggtcgtgtaggtggaattaatgaccgcgttgacgatatcgaatcagggctttctgatatcaacaaccgtttggataacatcgcccctgttgatgtttcgaacaaagctgataaagcggatctcgatgttgtaagcaacaaagcggatcaggctttagcgggtatcaccaccgcacaagataccgcgaacaaagcacaggagatcgcagaaaccgcgagtatcgcaacgggtaaaattaaagatgacgttgacgggttgaagaatcaaattctggataaagctgataaagccagcgttgaagcgattgcagcagcggtaagcgataaagcggataaagctcacgttgatgatgctcacgcaaaagctgatcagattaaccagattttgcatggtgcgccgaccacattcgatacagattcaacgggtgatatcggtctgattgcgaaagttgaccagaacacaacagatatcaaagttgtttctaaccaagtatcggggatcgttgattctgttaacaccgcagcaagccaggcagcagaagcagtttcaaaagttgatgttgctaccagcaaagcggacaacgcggtcaccgttgcgaacaacgcacagcaaaccgcagacggtttaaaaaccgaagttagcacagcatctacaaaagctgataacgcgatgaccacggctaatacagcgaaccagaacgcgtctattgcatacaacacagctaacaccgcctacaacatggcggagacaacccagaaacaggttcagaagttcgacggacggatcaccaacgttgaaaaccaggttcagggcttgaacaaatcgttctctaacctgaaaaaccaggtggagaagaaccgcaaagaagcgaacgcgggtattgctggtgcaaacgcaattgcatcaatcccaactatcgcgggttctcgtttctctctgggggctggcgttggtgggttctatggttcacaggctgtagcagttggcgcaacttacaactttaacgaacgtgtagccctgaaagctggtgtatccacttctagcgcttccgaagttggttatggtgttggtatctccgttggatttaattaa

SEQ ID NO: 104656 - DNA, 282 bp, Enterobacter aerogenes
atgaaatttgttacacctgaatatctgattcgtatcttcggcattttaaccagcatggatcataaagttgaatttaaagtaaacgatgaaaatgcagttgtaatgatggtttcagaaaacgataaccaagaaattttttcttcaactttattttcgattcataacagcaaggaacaagcggacaatgcgaaaaaaacatatgaggcggcgtttgcgatttatcgtaatgcgatggaacaatacaaagaattagcaaaagataatcaaccggaatctaaatag

SEQ ID NO: 104657 - DNA, 321 bp, Enterobacter aerogenes
atgattatcaaatgtgcatcaacgatgtgtaactttgaaaaggtgcagcacaacgcgcggtttcttctttgcgaaatggaaaagcgacaaactaataaatcgccaatgttcgcccatttaaaaatcatcgttaatttagaacgaaaaagaaagtatcacagaattatcaggtttgttcgcaatatgaaaactggtatcacaaccgaaggaacccagttaggttatattgacaacgaaaacaattattacgatatcggtcttacgttgaaaggtaaaacaactgatacatttttcaacatgacgcaagacggttatttgtag

SEQ ID NO: 104658 - DNA, 477 bp, Enterobacter aerogenes
atgatagctgcaagattcgaacttacaaatgtttttccggcatttggactcgcaccagaaatcattaaaacgttatttcttgcttccatcatcgcgaagtgcaggctagttctcaatcctcggatagcctcaatagccaaatctgctggattttctattgccaacaattggagagagtggtttttcccttcgaataaatttctggagcgaacttttttctgcgaatatatttcagcaacaggaatacttgcatatacgtttattgctagttcttctaactgttcaggcgactcgattcctttacgcaagaaaactctaaacaggactaaaataacagataccattccgcctaaaacaataccaattagaacgattaatacctttttgggcttaacaggttgcggttcagtaatagcttcatcaattatccggacattcccgatcgcacttgattttgaaatattgagttcttgttga

SEQ ID NO: 104659 - DNA, 144 bp, Enterobacter aerogenes
atgcaaaccatctcttttgaaaatcatactctggtgaagggtatgcagctgaaaacagaaaatcagtatttgccccgtcggcgtgacggcaagaaatgccgaacggtaatgtccagttccagggaacgtccgacgcgcgcatga

SEQ ID NO: 104660 - DNA, 276 bp, Enterobacter aerogenes
atgcctattgaattaatcattggtgctatttctggtggtgtaactatttgtgctgctctctggaagattcaccattcaatgacaaaaaagacaatcgatcatgaatcaaggttgaaagatatagaacacacaaacgagattcaatctcttcatatttcaaatatgaaagaagggcatgaaaatcttggtgttcgtattttgcgcgttgaaaacaatattgaatcaatgaaaatttccatcgctgaaattcttcaaattctgaaacaaaaaggttga

SEQ ID NO: 104661 - DNA, 3759 bp, Enterobacter aerogenes
atgccaataatggctattgccgctatcgctattgcggctgcttcaaccgctgcggctcttattgctgctggtgttgctatcggtgtggcaatcgggatcggtgtcgctgtaggcgctgctatggcgattatgtcgctttctatgcaacctagcgttccccgaatgcaatcacctgataacgcaaccgctcttggttcgacaaccgatccagcaacggtaatccctgttatctacggtacaagccgaacaggtgcaatcaacgtattcaaagcagttaacggaactgatcagcgtggtaattacctcgttcaatgtttcgctgttgcagaaggtgaaatttccggtatccgtcaaatcttcatggataacaaagcaatcttgattgctaataatattcatacagacggaatcgtagataaatcgaaaatcaacaaaacctatcaggattatgttcaggttgaaatttcaacgggcaaaactcctggtcgtcatatgtcattagccaaaaaatatcttggcgataaatggcctgttactttcactggtaacggtgttgcaacgatttgtattgtaatgtacaaaacgaacaaagcattaacaaacggtgttgatattcttcaaccgaactcacaggttgcggtcgaactcgacggtttgaaaatcaccaacttggtaaatggtaacagagaatttaccaataatggtccgtcttgcttgctcgatttcattacgaatactcgttacggtttggcaactcctttatcaagaattgatatcgaatcattcaaaactgctgcattacgtactaaagataattattggtgtgatggtggtacagatccgaacgccagcaacaaagcgaacatcgaaaatatctgttcaagttttggcggtattatctttgattcgttcggtaaactcacgttaaaacttgatgcaccagacgtaacgaaatattcgttcaatgaagataacattatcgctggtcaggttacgatcgaaaatggtggtagtcataaaggatacaatacacttaacgtaagttataacgatcctaaaatcgattattcgaactcggtgttgcgttatccttctgatgctactaatgatgcgctgatcaaaaaagataaacgcattatcgcgaaagatatcactatgcgtttttctaaaaatcctggtgctatcgatcgtcttgcttctgtcgaacgtaacaaagcgttaatcaatcaacagatttctttcaccacagcggatgctttcagcctcgaagtatgggatgttatcagcgtaagtttagatgaatacaatctgaaaaataaactgtacagggttatcgcgcttaatccgaaaatggatacaggcgtgggcggcacggtagatgttcaggcggttgaatatcgttctgatatctattcgaatcaggatatcgcggcaaagccagattatgatccgatttcaatttcaaccagcatttatcaaccgtacaaccttaaagcggttgcggtaggtgaaaccgtttacggtaataatattttgcttacgtgggattgtgaacaggattttaaccgatatcagttctatattcagtatcgtaaaacaggtgataccgaatggttaaacgctggtaatacttccgaactcgaattcactctttccggtttggctgccggtgttcaatatgatttccgtgtttgtgctgctggtttgtattatcaatcaccgtggacagaacttggaaatcctgatttaaccgttcagtttttactacctgctccggttgttcgtttgcgtaatggtatcgcacctggcgcagttgaaacccgtcaccaggtattcgatctggaatgggatgatcagacacagctaaaagtgaacatcaacggtgttgaaacacctttcgtggatctgttcgactattacgaaatcgaagttacgcagaacaatcaggcgttcatatatcgtactaaagatatcaactggtcatatttgtttgagatgaatgctgttaacggattatcacgtaatgtgaaattcggtgttcgtgcggttggtttcagtgggcgtaagtctgatcaaacagttctccaatgcttcaacgcacaagccccaggattaacaggctttaccgcgacccctggtttcggtgcaattttcgttaactggaatccgatcgaacctctaacggttcctgattatgctggtgtagtggttcaggcttcgaaagatgccagctttacgggcgatacggttaaaacgttcgttgctccgtttgcctcggagatccacacgattaatgttgcggacgggaactggtatacgcgcgtagctgcatatgacgtgttcggacaagataacgttaactggtcaagcgctgttatggttcagcttcaatcaaaagttgattggactacccaggacgcgaacgcggttaaagaattgctcgaacttgaaaatcatttgcaagatgctgttgactcagcctttgaacgttcgaaggatgctttacagcaagaagtttcaaatcttcacgcgaacatcaccagcgaaacagatcagaagattgcagcgaattcaacacagcttcaacagattgttaaggatggtgataaggtagttgttgatcagcttaatcagttgaaagtaaccatcgacaacgaaatcagcgcccagattgatcatctgaacactgttgttgcaagcaacgataaagcgcaagggcaagccctacagacggttaaagccgaactacagggacaagttgcacaagtcagcacgaacgcacaggcaagcgttgacgcgcttaaaaacacggtgaacgcgaactataccgtgaaagtgaacgcgaacggtgttgttgctggtatgcaattagttgcggattcaaccaacaacaaatcagcaatctatttcaacgcgaaagaattctttgtgatttcggattcgagcaaccccacgaacccggtgatcccgttcgctatccagaacaacaaagtattcatcaacagcgcaatgattgcgaacgcttcgatcggtgctgctcacatcatcgatgcaaacattagttctgcaaaaattgccgatggtgcgatcaccaacgcgaagatccaaaacgcggctattaccaacgcgaagatttcaggaacgttatcatcacaaaacgcggctggttgggcgctttatcaggatggttcgtttgtggcaaccaaagcgaacattaccggaaccatcaacgctaacggtggtgtgttcaataacgtaaccattgcgggtaactgcgaaattcagggtacgttacgagcaaatcagatcattggtgatatggcggttcaagggattttacccgctgtagcctggatgcgaccaacagaaaatacatggactaccgtttctagacaggtttactctggacagggtacgaataatattatcgtgtctgttccaaacgttaactgttatgcaaaaggtggttctggttcaacaactggcggtgctttccaatatcgtattctggtgaatggtactgctatttgtactgaaacaatttctggtggtacgaatgctggcgcgggtttcttctcacagaatagcggtggagcaaaaacaactatgggcggcgggattcgtttaaacaacgtaacgggcgcaaccatcgaattacaaatctatggtagtgcttatgttggttcttatccttacgcaagggttgacgcaattccggtaatcgttaacgttctgtatcgtaacgcgttcactgattaa

SEQ ID NO: 104662 - DNA, 513 bp, Enterobacter aerogenes
atggaattcagaagcaatctggacagccaaaaaataattataaataccccatatatcactatggggttttttatgttatcagacatcatcaaacaaacattaatcaccgatttcattaatgaaaccgttggtcaccagtttgaatacggaaagtacgattgcaatcttcaacttttaaagttgattgatattctcactggttccgatctgtatcccaaacttcacaatcaatacaccgacccgaaatcgggtttcactaaatctaaaaaagaaatcgggttcgctaatactcaaagttgtattgagcattatttcatcaaagaagaaacaccgtcattcgacaacggtacgattcttgtttccgaacaaaaaattcgaaataaaaaaacgttgcatattgcgatcgtttattcgggttatgcgttagctgttaacccacacaacgtttatcaaatgattccggtatcccagatcgatttcgcttcttcatggaggattaaaccatgccaataa

SEQ ID NO: 104663 - DNA, 660 bp, Enterobacter aerogenes
atggctactaaacaagaagaactaaacaacctttgtgttcatcccgatttcttaaaggcgttcaacacaacatacggcacaaacaaaactattctttcacaacaggaattattttctgttggtacggtttaccatattatcaccgtaacaatggctgtaggggaaggggtgatccgtatctgtgatggataccacgatattacatacaacggatttaagtttttggcaacgggcgatctgttagatgttcagacccctaccaaatcaaaagagatcaacaaccaggggatgtctgttaagttttccaacgtcaggaaagactatatcaatctgattcagcaaggtaaattagacaaggcacaagttcaaattcaaatggtattcctgaatccgctgaaaggtggtgttgttggttcgtttgatgtgttcatgggtgaagtcgattcaactattctcactttgaacatggcagaaaatgattcagaatgggaaaacacagcagaaatcaaacttaattcgaactgggcttgtttggatcagaacgcacgacatcacgcctccgatggtattcacagaagttatccgggcaatgctaacgatggattctttagtaaagctggtaaatggaattcagaagcaatctggacagccaaaaaataa

SEQ ID NO: 104664 - DNA, 564 bp, Enterobacter aerogenes
atggctaatatttttacagatttacaattcaaaccggaaatccgtattaaatcaattgcacctttcttcgcgaataaatccgcatcgggaaaggtattaagacgatttaccggaattcaatattataccgctgatatcaccgtgaactttatcggtgaagaccaatatctttttgaccaatggttagccgaatatcgttacggtaaaccgtttgttttcccgatgtacaattcaatcaacttgaaatataggggtaaacaaacatcactttgtaacgtttccgctattactcctgctggtgctcgcgaagttcccgtttcggtattgctcgaagttggtacgaaatttacgttcgcaaatcaaaccaaagtttacgaagtaaccgctgttgataccgcgaacaagtcaatgcaaattttccctaaccttcgggaatcagttcaggctggtgaaatgatcaattatcgaaatccggtactcaccttaatgattacttcgaacgatttcgaatatgacttgaaacagacaacacagatcaatattgaagcaacagaggctttataa

SEQ ID NO: 104665 - DNA, 2166 bp, Enterobacter aerogenes
atggcggataatagacatacattagaaattaccgctgatatcggcgggttggccaccaatgcccaacgagcggaaaaattgcttgatgggttatcaggacaagcaacgagtttaaacggtatcctgggttccctggggaacgagatgaaaggatcgctgaaccctgcgttaatgggtatcggtgctgctgctggcgttgctgctgctggtttgtcgttgatgatgtctgctgcacaggacgcgattcaacttgataatcttgctcaacagtcagggttaacaacggacgcacttcaacagttagcgcacgaattcggtgataccggaatcgcaatagataagtttgcatcaataaacaaagatgcgatcaaaaatctgggtgaagcggttgctactggtggcggtgtaggtgaagatttagcgaaatatggtttagacctgaaaaacttcactcaatatatcggcgctgctaacggaggtgtaaaagcctcaattagtttgttctatcagatgaaagatgctggtgcgtctgtttctgaaattactgctgctatggaaaaattagctggtggttcttcggaaatgatccatcgtttatccgaaatgagttcagaacaagaagcattgaattctattgcgagtcagaacgttgatattaccgatgacgcggtcgaatcctatcgtgaattctcgcggagaatgggcgatctcgaaactaaggttaaaggggctgttgctaacggattaaccccgatggtcgataccatcaccgccgtttgggattggttcgaaaaagattgggcgaacaccgcttttgctaaagcaatgaaacaattcaacgctgatgcacagaaggtgctgaaaactaccgcgccttatcgtccgtccggtatgacccagggacaacttcaaaatgtcggcgctacgtattcaaaagaagaactcgcacagcaagcctacgacaaagcgaaagcggaagctctagcaaagtgggaagcgaacgagaagatcatcaaagagaaccaggcgcaagcaaaacggcaatccgaagaagaagcggcagcgaacgcgaaaattgatcagcgtcgtcgtgaagaggcagaaaaagaagctgaaaaggcagcgcgtgaagctgcacagaaagctaaagctgctgctgcggaggctaaacgccttgctaaagaacaagctgatgctgctaaaaaagctgctgatgaactcgctaaatctcgcaaagaaagctatgacgcactgaaccggatcaccattgaagggttcacggctgatgctgctgctatggcaagcggtaacgcgaagattgaacgtggttatcaggatctaaaacttctgttcgatcggggcattatcgatgctcaggagtacgagcaacgccgcaaagatttaatcgatgcgatgggcggtaacttctacgaacaactgttaggactcgacccagaaaagcgggaagagatcgaacaagccgttgaagatacatatgctgctgaactcgaaacccttcaaaacgcgctcgattctcagttgattacgtatgaagaattcgcgcagaaaaaagccgctatcgatgatgcttatacagaacgtaaaaagcaactcgaagagaccgaagaacaagctgctatcaaagcgactatggcaacccttgatcattatcagagcgcggcagatggggctatggctgctatctctgcggttgctggtgagaactcggcagcggctaaagcgtcgttcgcagtgtccaaagggttagcgattgcgaaagccactatggacgcttacagcgcgttttctgatggtatgaaagagggtggtttcgctggttatgcgcttgccgcttcgaagatgggcgcggtgcttcaacagcttgctagtatcaaatctgtcaaaggtcaatttcactcagggatcgataacgtaccggataccggaacttatctacttgaacaaggtgaacgcgtcgttgataaacgtctgaaccaggatttgaaaaactatctcagtggtgaacagggcggcgggatcaccgtcaacgctcctatgacaattcagggtaacgtaactgatcaacgttggtttagcgaacaactaaccaaacacagacagatgatcgctactcaggtcgaagacgttcaacgccgaagaggataa

SEQ ID NO: 104666 - DNA, 381 bp, Enterobacter aerogenes
atgataaagcgtggattttcatattcggaaattcacgatttaccagtaccgctttttattgaattggaatggttcgatcgagttattgaaccatccagtatcgaaattttagatgcgatgttcgcccgcctgaacacttcaatatatgcagcgtcggggaatttatccaaagaaggattgcgaaaacttaaatcatccgatttcaaattattccgtggtgagaacattttcaaaacgccagaagaaatcgagaaagaaaagattcagcgtaaacgaaacacttacgcaacattgatcgctgatatgcctcctgaacttattaaaaaaatggaacaggaaaaaaataagcgtaaaaaacaaaaggtgaaacatggcggataa

SEQ ID NO: 104667 - DNA, 306 bp, Enterobacter aerogenes
atgcaagattttaatcaaatgatgaaagacctcacggtcgaaaacaaacctgttgaattcggtaagtacactttttatgttcgtccgatgaccgttgccgaatatcacgaacatatcaccaacgatgataaaggtcttcgcgatgaacaaactattcttcgttgcactctgaacaaagacggttcgcaaatgttttcggatatcgaacaggtcaaaaaactggtggttcaggttcgccaaactctgatcggcaacatcgcacatgttaccctttgtgtagatccggttgtattcgaaaaaaagtaa

SEQ ID NO: 104668 - DNA, 765 bp, Enterobacter aerogenes
atggctaaatctcaagatattttcatgggtagtgcgattgatgttgcgatcggcactgacctaacaaatacatcattaaacggtattggttttgtaaccattcctgaaatttcaactttcccagaaatttccgcaacgcgtaatactatcaaggtaagttctttttctcgcaatgaagatcgtactctggtaggtcgtcgttcctatgctgatactactatcgcgattaactatcagcctggtgatgtggttcacgaacgcctgatttcaattgcggaagcgggttcccgtgttcagctccgtatcacctactggatggacttcgaacgcaactacggtccgtcattcctggtgaacggtttcctttcctctgatgcgatcggtggtggtgatgaagctgcggttactcgtactttcaccttcgctattgataaaatcatgggtaaaggcattctggatctgacctctcagtctatcgacgtggttaatcctctgatcatcactcaggatttccctgctgttctgaatctgaccacgaacgaaaataaacgtttggcaatcgaagttagcggcggttatgaaccgtattcttaccgctggtataaagacggtcagttaaccaatatcggatctactactaacgcacttgattttgttggtggtagcgaggaagcaggttcccacgttcgtaaagttattgtaactgatgcgatgggacagagtgttacttctcgtgaatgtaccgtgacaatcacgcaagcataa

SEQ ID NO: 104669 - DNA, 810 bp, Enterobacter aerogenes
atggctatcgttggttatcctggatggatcggaagttcagcagtaaccgaaactggtcaaagatggatgtcggcggcacgtaccgccgtccgtcaatctgctgctggttggatgtctcaattagctggtcaaatggtcgaaataaatgttgcatattcaattggtgcaaacaacgcatatacaaacgcaacattgatcaactatgcgaacggattagcaaaccgaagtattaccaacttaacgattactgttactggaacaattgtttcaaacacttccggtgctccgtgtcttaacttttctgctgctccttttaatgaatttaaatcggtacatttgattataaattcgggagtaatggttttaggtcgtggtggtaacggtggttcaaatgcggctggtggcgctggtggtgttgctataacaaactctatcggtactaaattacgaatctctaataacggaaccatcggcggtggtggtggcggtggtggtggtggttattacgataccaaatacaacaatattaaatatatctctccgggtggtggtggtcgtccgtttggtgctgcgggtactggtaaaagtggcggctctgatgcaactgcgggttcaatctccgcgcctggtgctggtggtgtttatggttcagcgtttaaaggcggtgatggtggaaatctaggtgctgctggtcaaactgcgcaattctcacacggaactaaatacgcgggtggtgctgctggcgctgcgttaaatggaagtgctccaacttggggaaccctcggaacaatcaacggttctcgactctaa

SEQ ID NO: 104670 - DNA, 3288 bp, Enterobacter aerogenes
atgaatcgactccaattaagaaaaagctcaattccgggacataaaccacaaagtttattgtacggtgaaattgttattaacccaactgaccgcaaaatttatgcaggttctgaatcaggttcaattgttcagcttggtaacgatccgatcatcacggaacaccttcaagctaaagcaggggcatcaatcgagaatgggttaaacgtaggcggtaacgcaagcgtacaaggcgatctaaacgcgtccggtggtttggtatcccttaaagaagttaaagccccacagggcgaaatagacactattacagcgaagaaaatcaccactggttcggttgctggtgaaacagctacgtttaccggaaaagtaacccacggtgaaaccaaaacgggcgcactcgaagcgacaacagcaaatatcacgggcgcggcaactgttcacagtttgatgactcccggatctgttagtgctggggggaatatcgttgcaacgggtaaattatccggtggttctgtcgaatctccgtcgattagtacaactgacatcaccgcaacaaaaatcgaaacagcaaccgtaaccactacgggcaaggctaaatctggttctgtcgaaactggttcaatctccggttccgatatcaccgtaacgggtaaagctaaagctggttctgttgaaactggtgatattcaggctacaggaaccgcaaccgttcacaatctggtaatcactggttcgagcaacgttacaggcggtgtgaacgcgtcgggtaaactggttggtagttcactcgaaactccactgatcaccactaccgatgtaaacaccaaaaacgtgaccgcaacaggcactttaaccgctccaactgttcaggctggcgcgttgtccggtacttcactgaacgttacagctaccgctacagcaaaaacagttaaggctgataacgtcgaaaccatcgaaatgagcgcaacgggcaatttgaccgctggttctgttgttgctgttggttcctgtgctgttggtacaactctgaacgtaacgggtaaagccacactcggatctattggaactggtgctgttagtgcaactggtatcactacgggaacgttaaccgctacgggcgcgactgtgctcaaaggggttacttctggttcgattagcgccacgggtgatgtaaccgcgtcaggccgtttgaaaggggctacaggtgagatcacttctctggtgtcgaacaatatcgatgctgtcgggctggtgaaagccggtactcttcaagcaacctcgatcgcgctaaccaatttcgacaatttcgacgctcgatatatcaaagtaggtgcatcaatcaccacagcagaacgtttaggtactccgcgcaccattgcgggtgttgctttcgatggttccgcgaatatttcgatccctgctgctaacgtgggcgcgttgtccgtagctggtggaacgatgaacggaccgattgctttcaacgtgagtacaaccgatccggttctggtagggctgtcaaataacgctactggttcgaaatgctaccttactaaattccgtggtggtgcggcagatactatctggcatcaaaccgttcagggtggtacgtatcgtttagcaactggcacaaccgattcacaagaagaactccaggtatcaacagcgggttatattcgcggtcgaaacgaaattcaaagttcatcttgtggttccggtggtcagttccgcgctgttcagggtaattacggtttctttatccgtaacgatggtggcaacacttatttcatgttgaccgaatccggcgcaccgtggggaacgtggggatcgttacgtccgtttaccatttcaaacaccacaggtcgtgtatcaattggtaacgggttgaatgttgcgggaactgcgacactcacaggaacattaaacgtaagcggtacgttaacggctacggcagcaacaatcatgatgcagtcgaatcaacgccgtcatatcacgtttaacaatggtacaagtaccgatggttatatctataaggacgttaacggcgggtgggtgtttaacaacggcgtgaatgctggttcgtggacgatggatgttggcggtaactttaccagttcgggcggcattatttctaaagcgggtgttgctgttggtggtgcgttatcaggtgctactacgggcgcgtttagcggtaacgttactattactggttctcttactacctctggtcgtcttgctaccaatggcggtattagcattctgaataaccagggcatcagctccggtcataacgattcgatgatcctgaacgaccacggcaacggcaacgtaacgttgtgtgctgctcgaactgcttcaactggtacaacaggcggtgaattgtatctgggttataacgctagtgctggttctgctgtaagtcgcggttattacacttcgaaagtgggtgtatatgcaccgatgcaggttaacagcacgttgaccactacaagcacaattaccgctggtggtgctgtcagtgttcccacaggttcttcattccgaatgagaggaaccgcgaagaactctttgttccatgatgacggcggcgcattttacatcatgatcaccgataccgatggtggtggttataacggattacgtccgttctatatttctaaagcacacggcgcggttacgatgtctcataacgtaactatcggcggttcattagctgctaacagcggtgttcgaatctcgaatcaaaataactcgtggattcaagcgcgtgatagtggaaacgcattacgttgtgaattgttaactgataatgctgctggaatgatggttgttcaaaaacattctgctaatacatttactttgggtggtttaggaaaccaacaattcggtatctatcgttatacaaacgctcgtactgataacggtaatgatggttatgcggttatggcggtagataatacttggacatgttctggtaacggtaatttcaacgatgtttatattcgttctgataaacgattaaaaaccaatctggttaaaattgaatcagcactggataaagttaataaacttaacggttattcatacgataagaaattttctctggatgctactgaatataccgaaaaagaagatggtttgatcgcgcaagaactccgcgaagtattaccgaactctgttaatgaggataaagaaacgtccgtattaacaatttctggttctggtgtaaatgcgttgctagttgaagcaatcaaggaattaaccgcacgggttaaagaattggaggctaaataa

SEQ ID NO: 104671 - DNA, 1443 bp, Enterobacter aerogenes
atgtctgaacaattcgacatctttacaggtggacgggttgaaatcgcggtaagtacacaacttgaccccgatgtaaactttcacgatccatcttttcaggtaattaatgagattctcgcatttcctgaactaagaatgacccgcgaaattaccgcatacgaaacttttgattctgatactgaatcaaagttatcaggaagtaaaacatacgaagataccgaaatcgttgttgctatgcagccaactgatccggttctaaaagttctcgatgatgcagaagcaacaaagcaaatgttgcgtttccgaaccttctacgtgatcgacacagcagaagacgaggcacctggatcacagggctattatcgcatttacgatgcttatgttgtgggtaaatcaaccacaggcgaaaatgatgctgtagtacagaatacataccagctcgcaattgaaaatatgtacgatgctggtatcgatcgccgtggtagtccgttgctcactggtgattacggtatcggtgcgggtactgctgattatccggggatcttagactggacaaaacttagtggaaaccgtttcgtttcgttccctggttcgagcgttcacaacccgttcgggactgatacgggcggtatcgctgttcagggtaacgacaatcaaggttttcaaattatcgcttctcctgatgataattcgcgtattcgtatccgtggtgtatccaccaacaaacaaggcaaatggatcaaggtttattccgaagtggaaaaaccgacccccgctgatgttcaagcggttgctctgaaaggcgacaagatgacagggcggttacagactccagaaatcttgaccgacaatatccggttcggtagttcgaacggggttaactctggtggtacaacccgtttaattcaaaccacaggcgcagacggtttaccgatcgatctggttgctttccgttacgaacaacagacacaaacgcctgtactcgaaacaggaacaatcaacgcgctcgtttcacttaaagaccgtggtcagtctgtctattctcctttgaatattcctacgcctggtgtagtcggtgcggtgaataaaaaaggcgatacaatgagtggggttctggttgttcctgttagtaacggactccaaaccacaaataacactcatacttctggtgaagtttatcgggctactgtatccgctgaatctggctatgcaatgttgtggcgtagaccgtcaacacctccaacgggtaaaaatttcaaatctgctgaattcgtcgggattaataataacagtgcgttgttgttccgtcaggatattacaaaagatactgatactgctgcgaaatataaagattggcaagtttaccatcaaggttttaaaccaaccccagcggaaataggcgcaatcaacgttaacgatactatcgatttaggtacgtattaa

SEQ ID NO: 104672 - DNA, 306 bp, Enterobacter aerogenes
atgaaatttacagattcacaaatcaaagcgttcatgcgtttaggcgatgaattcaaaaaagatgatggttcgaaggtagccgggctattagaaaaaacactaaccgatgttgacggcaggatcgcggaaacaattacgttaaccgttgaatacggcgaactggtaaaaggtgattttgttgttgtagatggtgaaaaattcaaagtcgcttatattaacgatgacctttcagggattattacttgttacctcgaaattgcaccgaaggaaaagaacccagggggcggtcgtggaaaattcaaatga

SEQ ID NO: 104673 - DNA, 1863 bp, Enterobacter aerogenes
atgttacgccgtaatgttcctgttacggcgcgtgacctcaaagttgaaaccgatgaagcaggggaagaaacattacttgtcaaattctccagcgaatatccagtaaatagagaagtattcgacgaaaacggcgaccctgctgtttacggtgaagttctattacatgaatcaacggacaacgctgatttatcgcgccttaacgatggtgtagccagccttttattcaaccacaaccacgataaccacttagggattattgttccgggtagtgcgtttatcaatgtggacaaaaaggcgggttatgcccgtgtgaaattctccaaaattggaaatctcgcacaagaaatttttgcaaaggttaaagaagggactatttcgaatattagtttcgggtacgacctcggctcttattctttcgacgatgcaaaccgacaagttttagttgatcagtggtcagtaaacgaaatcagtttcgtaactgttcccgctgatccgactgttggattaattcgttctaaaaatggctccctaaatatattcacaagaggtgagaaatcacctgaacaaatcaaacaagagatcgcaaatatgccaaagcgtcaaaccgaagaagaaattgaaaagctggaaacagcagaagaagaaattcaggaagtagaagcggaagttgaatccgaaatcgaaaccgaagaagaagaacgcgaagaagtagatcagcaggttgaagaggccgttgatattgccgctgtcgcagaagccgtaatggaaattatcgaagaacgcggtaaacgctccgcaattaataaaggccgtcgctcaatgactgttaaaaaagacacaattcaaaatctagaaaagaaattcgatctgatggctggtattcgtgcccgtatcgaaggtaaagaactcactggcgcagaagccgaatatcaccaggaacaagaacgcaaactcggcggtcgtgctcgtggcaacctgcacatcccaactagcgcaatgcgagcggctccggcttatgctcagagttccgcaaccgttgataaactgcgtgttgacgatatgcgcatggattccttcgtggaaatgctgatgcctcaatccctgctgggtaaactgggcgttcagactctcactggtctggaagatcgttccgtactggttccacgtcagaaatctaccgctgttgattccttcggtttcattgcggaaggtgctgatgtccctggcggtaaaggtgcatacgatcagatcagtctgaccccgaaaaccttcggtggtgaaaccgttctgaaccgtcgtactctgctgactaccccaggcattcaggcgcgtgttcaggcagatctgatccgcaattccgcaatcgcacttgaaaaagctatgttcggtgctgctgatcaggctaatggccctcagtctattctgtctgttctggatgagtggaaaaccggaaccgctgattgggattacaaagcgttcctgaataccatcgctgctatgaccgatgctggcgttccagaagatcagatcatgttcgcgatgaaaggcgtaaccctggctcagttgaaaggcatcctgaaagataaaaactccctgggtatctatctggtaggtgatgacaatctgctgtgtggtcgttctatcgcttccagcggtgtattcggcaacgattccatgattgttggtgacttctccggcatcacgatcggtgaatgggctggcctgtctctggacgttgacccgtggacagaagcgcgtaacggtggtgtttgtctgcgtgtgttcgcggatatggattggactgtaactggtcaaactggttctctggttcacctgaaaactggcgttgttaccgctaaataa

SEQ ID NO: 104674 - DNA, 1482 bp, Enterobacter aerogenes
atgcaatggaaaaatttgtttgcacgaagcaaacaaccacagccagaaaaaagaaattctcgttggaatcgaaaccggaaaatcatcaacagtgatgttcgtatgttcgaaaaacagttaaacgaacgttcacgcggaattatggacaggttgaacgatatcaccggggtaatgttcggaggtattaaccgccaaattcgcgcaactcaccagcgaatgattgaacaatgccgacaattaagcattgataacccgttcggcgctcgttacgtacagatgaccgttgataacgttgtaggtactggcattttcccacgtacccagatgacgctaccaactggcaagctggataaacgaacgaatctggttctggataaaatgttttatcggtggtctgaaaataaagaacgcgtatcgcttaacgggcaattcgacttctacgaattctgtcaacaggtagaacgtcaacgaattatcgacggtgaagtttttattgtaatgcaccgcgaagacggtgatcttaaactcgaaattatccctgctgaacgttgtgatatcaccttagaccgtaaagaacccgatgggacaattatcaaaggcggtatcggttacgacgaacgaacccgtaaacctgtttcgtactggttccgtagacacgatctgtttactgacactctcacatatgaatacgacgaatacgacgcggaagaggtgatccactatttcgacccgaaagatgcctctcagttacgcggtatttccgatttcgcaccagtgattaagacaattagccaactggattcgtacatctacacaagtatcgttcaggcgcgtgtatctgcttcaagtatggcgtttattactcaggctgataaatcgggcgaagcattagatgacgaagacgaagagaacgaactgatcgcagaatacgcaccaggcaccatcaacatgcttaatcctggtcaggatatcaaaagcgttcaggcgaatactcaggcgaatgaattcggcggttgggtagacaagattcaagcgactatcgcaatgggtttaggttgctttaaacaagcgctcacaggcgatatctcaggcgttaactattccagcgcccgattcggtgacctcatgcagaacgcgcgttttgcgagtctccagcgtcgtttaatcaatactgtgttgacccgtgtgtatcgcgaattcctcgaaaatctggttgatgaagatttaatcgatattcgagtgaataaagcaatgtttgatacctcctggattaaaccagaagtgaaaaatgtcgatccagaaaaagaaatcaaagcaaaagttttgatgattgaaaacggattaacttcacgccgcgcagttatcgaagaaatgggacgtgatcccgataaggttgatttagaaattagcgaagattcattttcgccagtgccaaaaaatcccgctctaaatacacctgtagacgttccacaaaaggaataa

SEQ ID NO: 104675 - DNA, 501 bp, Enterobacter aerogenes
atgcaacagcttatcactatccgcaaaggatcgcttttgtccgttaaggttcagaacgccgacgataccgttaccgttatgaccgaagacgaacaaaagaaaaataaatattccgctaatgaaactttgattgttcagatccccacggtggattttgaactaggtcagtattacgtggtgaccgaatcagcaaaaggcgatttactcgatatccagcctttcaaagtaatcggattattcgaaaaagaatcccgcaaggatactttgaaacaacagatcgatctactcgacaaagttatttcagcgaaattatccgaatccgaaggtgttttacaacagctttcaatcaacaacaaaacgcttgtttattcctcgctttcagaactcacgttgctggtggattcattacgtaagcaactcaacgcggaaattaccaaagaacaacgcaaaaacggaaaagcgccgtttaagcaaattaaattagttttaaacaggggctaa

SEQ ID NO: 104676 - DNA, 1851 bp, Enterobacter aerogenes
atgatcccgcctccaatattgaaaccgtccgaatgggctgaacaaaatttagtgttcgttgatgggccattacaaggtcaaaaaatgcggttgttcggattccaaaaacagatcgcggattcaatgaatgaaggtaaaaagaaaattgttctgatgctatcagcacaatcaggaaaaacaaatcttttgaatgcgatgatcggttataaaatgttcaccactggtcataacgttggaattctgcaatcaacaacgcgtgaattaggtcaatggctcaacggtaaacttttaccgatgatcaaacaatgtgattcattaaagaatttagtgactgataagaacgacaaaaacgcggttaataaccaggctcagatccagttaacgaacggttcgtttctttacatgatgtcattaacaagcccgtcacatcttcgaggtaagtcgatcggaggtggaatctttcttgatgaagtagacgcggcgcagttcgacgagaacgaaggttcaccgatcctgcttgctgaacaacgtgtgacaacgttcaacggtgaatcacctgttgtgatatcgagtacaccaacaacgaagaacggcgcgatcatgctcgaatatgagaaatcagataagcgcgtgttttattgccgttgtcctcattgtaaccacgaacaaacgttagattgggaaaacgttaaacacgattggactgataaaaagattccgattgcaaaaggggctaaatatgtttgtcctcattgctcgaccccgtggaaagaaggtgatcgtatccgtgcggctgctggtggagtgtttcgcgcaactaaccccggttcaccaattatcggttttcacgcatcacgtttaatttcaccgttggcaactattgaatcaatggttcaggattacgcggacgcaatgcaatcatattcattgcagactttttacaatactgttcttgcgacaagttacgacaatttaaacgctgatatcgacccgcacgaactcgaaaaattcgtaacgcctgtttcagtaaataatattccttctgattgtttatttctggttgctggtggcgaccaacaaaaagaccgattagagaatacattaattggagtaggggaaaagaaactgtatgttctcgatcaccgttccttttacgatttcgattgtgaacgcgcagactcaaaagcatacaccgaactgatcaacttccttaaatccgatttcatagataccgaaggaaaaaaggttccgttgttatgggctaatctggactcagggaacggacgcgcaacacaagccgtgtaccgcaattgtaaccgctggaacaagctacacgctatcaaaggttcaagttcagcaaacgcgcccacaatcccgcttaaagccacgacaacagcaggacaagaattatttgtacttggtgtaaatatgctcaagttcaaagcgcaagaaatcttgaaccgtaatttgtccgataaagcatatgtgaaaatagaattctcgaacactttaccagatgactatttcgatcagctcacagcggaagaattaaaacgtgttggttctggtgttaaatgggttttaaaacaagggcaggaacgaaatgaagcgggggactgtttcaactactgtttagccgcgatcgaacaggtgatgaaagggattaaacaaaatccgtggaagcgcctacgcgagtacaaacacaaaaagaacgttgatgtacaaccacgcgaacaaaaccccgtagaactcgatacagccctgcaagaatcgaaatctgaacccgttcagaaccaacgtaaaccgaaacgtaaaataacacgtcctcggtcaagctggatgaacttctaa

SEQ ID NO: 104677 - DNA, 462 bp, Enterobacter aerogenes
atggctgtattgacacaaagaaccctccagcagtggaaggaaacccaatatcacaaacaaggcggtacatgcgttctgtgcggcttaccgttggattcatggcaaaaggcaaacgccgaccacaatcaccacacaggacacatgcgcggcttgctccaccctctgtgtaattcagttctcgaaggtaaagttgctggcctgatgtatcgggcagggctgaaagggaaagcagactttccgaccgtacttcgtaaccttgctgattattgggaacaggactacgacgcggaacctgttcacccctcgttcgttaacgacaccgcgaagaagttcgcacggcttacccgtgaacgcatgatcaaagaactgcacgaagcagggctaacccatatcgacaaaacttattcgaaagaagaactgatcgatatcttcaaacgcgaattcaaaaaacaactcgcataa
